United States Patent Application Publication US 2008/0114160 A1 - sequence listing, part 20

SEQ ID NO: 6548 - DNA, 7043 bp, Oryza sativa
cccccgaccccctctctaggtcaccacgtacggtgggttaggcgtccgcctccaggtgcccacctaccgcatttatggcatcccgagcgatcgcgccacgccgtatttaatgcggcgtgcagtgcactcaaccgttctgtgaccggtcgaatgaccgatgggactggctagtgcgcctgtgcgctgctcgtgtgtcaggcggcgtgcagcctgacatgtcccatcaaatagtgatggtgagaggttctcatcctcttatctcagccggagtcaggcctcccgctctagtaaaagcaaggctcccgtttcccggtataataggagcccagaagtcttcacccattaaatggtgactgacaggggcaccccccgtgtcaggcggcaagatttgacaggccccatcatcaagacgacgtttgcttggcttcccaagtcaagagacaagacatgcatttaatgcaaagattacaatacttctccaccagagctaggttaggttgttgggcccatatggtaaccccttaaggtataaaaggaggtccaggcctagtggtggaggggagacttcggggcgaactggcgcttgggtctcccaaccccaagcacttgtgttctacattcaatcaatcatgcacaggagtagggtattacgcttctcagcggctcgaacctgtataaaccttttttgtctcatcgtcttggggggggggctaaccccctcaagatcacacagctctgctcaccaagccctcgaatctcacccgctgcccccggccgaactcacaaaggggggcctcacggttccctggttgaggaattcattctccgatatctggcgcgccaggtagggggcgcgttcgtgatttttgaggttctttcgagcgccggtgtggtgagtgtcgcgccgccgctactggggaaggcgcaacatcctcaggagtgtcgtgccaccccaggcagggggcaaggccccccacatccccaccaggtaatcttggctacctggtctttgtggcgagtcttcagaatgtccgagggcccccaaagctccagccctgcctcaccgagaagtacgacgatggcgccgacccctccgagtccctccagatctgcacggcgatcatagaggtggcgggtggtggcgaccgggtcatggcgaacgtcattcccatggcccttaggggccaagcgcggggttggcccatgaacctgctgctgcctcggttcactcctgggaggactcttgcagttttgagctccgggtgccgtcgaagcccgggaccccctgtgctagctcttctgtagcggctgactttggtcccgtcggctggctacgatgcccggcccggctcaactgatcgtcctttcaagcttcaagtattttcaatttttcaattcattagcttgaaatcttatatttctttccccccattctattctcatggccctgcgacgcccgcgtgttgcgcatttgtttgctccctcggtggtaagagcccaacctctcccccatctacatgaacgattcttcactaagtgtgggggctaagttttctagccttatcctagccttaagttgagccccgggtgccgtcgacgcccgggacccagtgtgttggctcttccgtagcggctggctttggtcccgccggctggctacggtacccggcctggctcaactgtggacggggattgctggctctagagttttcggctctcacactcatgcgaaagtaatcgtgcatgtagaaggaaaagagattggaaggaggccaccgaaaggaaagagcaaacagaatgtgtagtgtggggacacaggctcgtgggaacctaacctcgtttgctaagtggtcacaggcttcccaagatggttcggaacccatggtggggggccctcttcgagctaaaggtttgtgtttgcttcattcatacaagcaattctttgctgtaagtgtggatgctacgattcctagctctatcctagccctgtgtcgagctctgggtaccgtcgacgcccggggccccctgtgctagctcttccgtagcggctggctttggccccatcggctggttacaacgctcagcttcgcttgatcgcaggcgaaaattgctggctatagaaagttcagtcctcacactcgcgcgaagataatcgtttgcataaaattattattgcttatatttatctctcgcctatctcttcctcgcggtctccgcggtacctatgtgtcgcgcaccggcttgcctcccttggtaacaaaaagtttgtattcgcttcatccattcaaacgattctttgcttaaagtacgggggctacgattcctagctctatcctagccttgcgtcaagctctgggtaccgtcgacacccgggccctcctatgctagctcttccacagcggctggctttggccccgccggctggctatggcgcccagcttagcttgatcacgggtgaagattgctggctatggaaagttcagtcctcacactcgcgaaaataattgtttgaatagatgaagtagaacatgaacaaaggttaacaaatggcaggggcaagtgaggtacgcggcgtaaggtcacgggcccgagagaatctaacaacgtttgctgaatatatacataaaataatttcacagcctaaggtatgggctagcgagtcgcccttaggttggggcgaaaaaggcgcatgggtcctagtaccagcaaagaaagaataagagatcgggcccacctatcatcagactaggaaagtggcgtcaccctgaccacctggggaaggttttggtcagggctaacgccgggggctactgtcggtgatatgggcccggggctatcatgtttagagggaggaggctgccccccgatgccacgtgcccctcccccgaggggagttaggcccgaggtggggtggtggcccctccttccccaaagactagtcggtggaggctgccccccgatgccacgtggtcctccgccgaggggagtcaggcccgaggtaggacggcggccactccttcccagagactagatgtaggaggctgccctccaatgccacgtggccctcccccgagaggggtcgggcccgaggtagggcggcggccactccctggccgagactagagggagaaggctgccccaggcgccacgtggctccccctcgagggggaatcgggcccgaggtcgggcggcggcggccccttctcgtgactaggggtcgggctcccccgaccccttctctaggtcaccacgtacggtaggttaggtgtccgcctccaagtgcccacctacccgcatttatggcatcccgagtagtcgcgccacgctgcatttaatgtggcgtgcagtgcactcaaccggtctgtgaccggtcgaatgaccaatgggactggctagtgcgcctgtgcgctgctcgtgtgtcaggcggcgtgcagcctgacatgtcccatcaaatagtgatggtgagaggttctcatcctcttatcccagccagagtcagtcctcccgctctggtaaaagcaaggctcccgtttctcggtgtaataggagcctagaagtcttcacccattaaatggtgactgacaggggcaccccccatgtcaggcggcaagatttgacaggccccatcatcaagacgacgtgtgcttggcttcccaagtcaagagacaagacatgcatttaatgcaaagattataatacttctccaccggagttaggttaggttgttgggcccatgtggtaaccccttgaggtataaaaggaggtccaggcctagtggtggaggggggacttcggggcgaactggcgcttgggtctcgcaaccccaagcacttgtgttctacattcaatcaatcatgcacaggagtagggtattacgcttctcagcagcccgaacctgtataaacctcttttgtctcatcgtcttggggggggggggctaaccccctcaagatcacacagctccgctcaccaagccctcgaatctcacccgctgcccccggccgaacacacaaaggggggcctcacggttccctggtggaggagttcattctccgacatacatatacacatatatatatatacatatatacatatatatatatacatatatacatatacatatacatatacatatacatatacatatacatatacatatacatatacatatacatatacatatatacatagatatatatatatatacatatatatatttatatatacatatatatatatatatatatatatatatatatatatatacatatatatatacatatatatatatatacatatatatatacatatatatatttatatatacatatatatatatatacatacatatttatatctatacatacatacatatacatacatacatacatatatatacatacatacatatatatatatatatatatatatatatatatatatatatatatatatatacataggaagcctatatactactccctgtagtaggtactcctattgtaaccatcggacacctgcccaactcatatcagggtttcgggctttaactcactaacggttggtgagaaaagatccactgatccaccgatgcagaaacttgaatattctttttttctttgaaaattcgtatcaccgcgtggtgttctgcatggcgagtcattttgaatgttctgcatgcatggattgttgacccgcacgcatgcatggccgtgcgaccaggagagtagttagtgtggaggttgctgttgatactctatttaagttgacggtgatgtaggacagaaaatgaggagcagaattatatttcggatttgtgaggaagaagattttgttctgcaggtttttggtggagcagaacccctccggtggaaagggcagaatgtcgtcggcgaggtctgttgcgtcgccttccgcggcgcaagtaggcggaggctcgtcggcgcgtgatgtcgagcagcagaagtcggtggtggccgtaggcgcgtcgtcgccagtgagtagtagcaagcagcacaatctggcgaaggaagaaaatggaaccattacagctaatggtgacaagcagcagaagcctgccgcagataggtacacatagaagtttagttttaggttatgttctgttgaaaatttttctcttgtttgtttgtttggctctgactggttattgcgttatttggtcatcaggaatggttttgtgcgttgcatggatactgctgcccggagtgaagtgatgaaccactccctccagaaatatgtcattcatttggatggatgtcatcctctttccatgaggaatcctaggaagagatgtgcttggtgctcactccgtgatattcgcgtggcttgcgacgtgaatttcagaagcaacgaaacaacccggggcaacagtaatagttgcgaacatgtgtccaaggaaaatatgtagccaatagtgtgatgatcaggaaaattgtaataagggcttgctttctgcacggccgtagattagtcgtacgaactgtctctagttttgtatggtatattctatgagaaaaaagcgagtagtatctgagttgagaaatctgtatcttctgctatttgggaagtgaaataaaattgagatgttatcctttcatttatctatttaagttgtgtgtactgcaaactccctgttgtcatcgtgaatgcaatccttcaccaagatgaagttcttcgagcagaatattgtacaagaatggagcagagatttcgaattggtttctgtgagtgtagcgttgcgtattcggaatatttgttatagatgctatttttgtggcggtatggtttcatcagaattcgttaatgttgctagtggctgactttccagagtccaataacatgcttcgcacgtaggagccttgatttcggggaggttgttgagcagctggtggaaaataaaccgtaattatttgtcagtatatatccaaccagctgaaaaaaaaggacaccctagagcaaattctgtttgccaaaaggggtagctaccagagtccgtgctggacagaaacaatattcacggagataggtatggaggaagaaggctggccggagaaaggtggcgaggatcatagtggacaacccatggacgtagttccgttggaaaggtatttttttatgtcagtgtgattgtagtgtacaattcccctttctgcattgtttcctgatttctcgttttttgatcctaggatcgtggttgagggggaggaagatagtgatctgctgcctatttcactctctgacccagccattctgttgccggaaattgggcagaccttcaatgaggactctaatggctatgcgttctacaatctgtacgctaggttcactggttttggtataaggagatccaagaacagatacaaagatgaaggcgtgaagtccatgcaagagttctgctgcattcgtgaggtaaaaatctttagtgtgttctttttttttttgaaaaccatggtttcgtattctcgtaggattggcaagtttctacagtgtgatgcgtaggatcatcattcgataggttttacgtagtaaggtgttcctgtaatttatgcaggtagagataattctgtcactggtccgccgaccaggataggctgcaaggctatggtcaggttaaatcgttcttctgaaagtcaaaagtggagagtttctgcattcattagtgagcataaccatgaaatgaaacgggacctgcagcatactaagcacttcaggtctcataatttcattgatgaagggacaaagaggaacataaaggaaatggtagataatgggatgacacctacagctatgtatggattactttcaggtatgctcggcgggccgtccttaaccccctttacaaggagggctgtgacaagaatggcgtatgccatcagaagggatgagtgtagcaatcatgtgcagaagacactgaatttttttagggaaatgcaatgccgtagtaagaatttcttttacaccatacagattgatggtgcttcaaggattaaaaatatattttggtgtcattcactgtccagatt

SEQ ID NO: 6549 - DNA, 1618 bp, Oryza sativa
attcctgcagccctaatctagataatatatatcaaataataattgatcaccaaatataatgaattaaccgagatcaatcagacttgatatatttatgtagagtgatctatctatagaaatgacaaatatacgtataatagattatgagacatgcactatcatatatggtaagatcggctaaaaccccaatgctatccttagttataattaattccaagttaatttttaaggttctagacaagactagggttgatgtaactcaaagtatgtaaagagacctaaagtctaaacaatgaagtaattaattacttttcaagatggtagatatcttaaccaatctaatctggcatgatgatttagccgataccagcataaaccctaaagtaggccttagccgatatgactaaatcgagatgctaaactagattaaataagatatatgataacaaacgtcacacgaacaatattaatacatttaaagcaatgtaaaagccccgatgatgcaaaccattgagacaggttacctcttgtcgagagatcgtagctgatgtcccgacttgaagcaagaacctgtactgattttattgtcgtcatttattacaataaaaagtgtggcgatgtgcagaaaattgtactgattttattgtcgtcgtttattacaatgattcggggtttatatttatacacagagtacaaaactcgtccattatggacacgactcaaactttcataaagataaaaacaacaaacaagtccacacggcggactcttaccatttctctaattcaaaccgacattaatatcctaatgtaatagaaaaaattgccttaaatcagctttatctttatatggcaatgccagttatctcaatcgaggctccaaccgagcccaagtcgaggtgtatcagctacttcccatattggctgagttggtgtccaactctgtttcctgccgatatgatgtccagccgatgcgcagttagtttctggcaagatcaaatctctttcaagcccgctttaatatccatgtccaaatccgaatatatcttgccaaatttcattgttcacaataagacatgagaactaccttaattagacacagactaggggcccattggtccgatcggctgaacatctgcaatccaaccatcactatgccacaattatagaagacccggagtaagcgtcaagaaaacttagcaactcacagctggttgttgaatccaccaattggtctattcgaggaagagaaaagtaatcgtttgggcacgccttgttgagatcggtgaagtccacacctattctccacttttcgttgccccttgcggaccatgaatggattagcaagccacttcggaaggagaacttctcgggtaaagccagctttgagaagtttgtacagttcttctcgtatagcttgttttcgatatgatgcaaatctctgcagtttttgcttaactggcttggcatcgggtcgcaccatgagtttgtgctcgatcacctccctagggactcccggcatgtctgacggctgccaagcaaatacgtctgtattgtcgcggaggaaggtgatgagctcgagttcctatttactgcctagcgttgccccaatcttaatg

SEQ ID NO: 6550 - DNA, 17104 bp, Oryza sativa
cggatccaagtaaaggccaagacccgcaagactttgagtaaggcaagtcatcactattctttgaacatgttgatcccaattgcgaaattgttttgtttacaaataaaattgcatgcaatgatgaacatcctacttgcgattatgccatgccttgattattgtttaccccttattccttcgtaaccatgtttacgtatgagtccctagtcaactatgacaaatgcttagaaatgctattctagaatcatgcatactcatatttatcaaatgctatatgcttgggcaattacctttgggaaggtaattgagatgcggcatgtggagacatgagcaccacattgccatgatattgatgacatgatttgcgacaggagaaataaaactaaacaactattttcgactggggcggacggaggatttgggtggtatctggaaaacgctagtaccgtccctggtcaattaaggaccgagccatgaagttaagcatgaaacgacccccgcagttctcgtatgggtatagacctagcagattagatagccgagcggaggcagtatccctgcatagatggttcacccctgagcgaggcaggtgcgctacggtgggacagccgttgaggtagggccgagaggcgtgccctacatcggtgtcgccattggtaggactgccatgagtgtgtgtgagagagaacttaacttgaaccataatttaagatgtgtgtgagacttctctttcccgggagcgccagaactcctctcactgctagaaatatggacgcctagagtgcatgaggatttaagttcatggagcaggtactgccaatgcgaggttatcgaaaaggtttgccgtgacgtgtctcatgtgttgggacgaggctcatgtgttaagcagtcgcggagtgcgggtaaagtgtatccactgcagtgtgagtaaaccaaatctattcgaatagccgtgctcgtggttattgagcaccgggacatgtattatacttggctagactctaaattcttaacttgtatgggatgggatattgcataatgatttctatgctgatggagccacttcctgagaggtgggcaggtggacgttctcagaaaaccatgacgactcaatggcgagaatccatccttgggatcataatggatggtggacagaaccgtcattgtttaaatatgaacactggtactaaaatttgatcagtttgtgctaggtcttagggctcgtgaaaagaattacaaaacttgctttgcgcaaaagaactatagccacactttgaatacccctatcatgtgcattgttgctgtggtggcttgctgagtacggttggtactcacccttgcaatatataaacttaatcagaggtcggagatgaagcttcggaggatccctatgcttactaccaggagggtgatgaagacgatggcgctcagtaggtcttagttacggtcgttgcctgtggcaatggcgtgccgctgccttgactccgctgtcttacttacttctgtttttggaatgaattccggaccgcccggtccgatgatttaaaactatgtctgcgggcttatgatgtaataattcataccagacactcgtgtatgtgcactaggtatttcagctatgaattcgtgtgtaccagactacttgatccaggaaatggtactgtttacacgattaattcctgttataaaaacgggggtctacatatgacaagctacaagatattaatgtcgctacacctctgttgttgacatggcgcgccactatcgacgtttgatgtcgcgattccggtatttgcatagtatagggattgttggtactaggatatatgcgagactaacactacagcaaaaacctcgtatagaggcacttttgtagaggcgttttgcaaattgcttttaaaatcagaagttttatagtgtagagacactttatagaggcactttcaaaaattgcctagaaaacttttactctagagacatttttagatcagtttgttagattttatctcgtagagggattcttttggcactataaaatgcgtctaatatgtaaaggcattttgttgagacattttaaactatgtagagactttttagaatgataatgtatactaaaggactaaatataagtaactaaaggaacaagcatatataagtaatgtcatggagttgagttggttagtgtactgaagattaaaatgatttaaccaagagatcatgagttaaagacttgtcaaaagcaaggaaactattttattctcttttttggactggttttatatgtttgcggtacaatttaatgtctctagaaaatgtctctaccatcttatagacattttataaaatatctcttgtttgtagagacaattcaccataagacactaactagacattttttaaaatgcctctacattgttgtaaacgcatttgataagtgcctctacagtactagaaaaatgtctctacaaagcatttttcttgtaatgtgaagtaaaagagatagagacgatgatttttatacaggttcgggcccctgaattgtcaggtaataaccctacatcctattgactgaagccggttgttgctcttattcatcataatcacatcagtacaatatttggggtagcctatctaactgttgtcgacatggcggtctgaaggtctgactcgtagtcaacaacagggtagtcttcctcctcgaatccgtgcccggcgagatcagagatagcgctttcgtctctcctgacagtatccggagacaccgtaggggactagccatgcttatccctgaagtctatgtccggcgacttgtcttggcgcatgttggcttgtatattgtagcttctattgttccgtgtatgttgattgtgggtctcttcctctcctcctagggggccttgtatttatacccatagatatctccttgtccaagtagaattagggaaaccaatatggatacaatccgagtagtccttgtcatttctatgtagaactctattcatccttccttatacggaactcctcctatatccgaaggttgtttccgtataagacatagtatgcggttagttcttggcggggtcgggtgggattgcggctcaatccccatggattaacccggcgaggaaacaatcccggcccatgagaaaatttgcgctcggttaagcccagtcgctgattttaacccggcccaccacggggttcccctattatcaggcccaggaaaaaatcatctagtttgtaggtgaggaaaaaaatacttgagaggaggcggcacagcgagaggcgctgccgcgggggcagcacgcggagcgtggcatgacccggaagcgacggcgacgacacgctttctcctccggcagctgtctcctccggtgagttcctccccttcccttctcccctcctgttctagggttagggtttctcggccacgcggcactgctgcgtggcggcgacggcgcacggtggtggcaggcatggtggggccttggggaagccgccacatcacactccctcgccaaggcgccgttgaagctccgccgttgcggcatggagaagcatgaggacacggacacagcttctttctttcactggtttcttgatttgttcttctttctaccccatctgccacctagctagatttcctcctaccttggttcttggaggttaatcctcggtatgcttcttgttccaacgcatggctgagaatgctagtctgttgaataattagttggagaatttataggttggagatcatctcataaactagttgaccaatggcagtagtaactagttgtagattaaacaaagcacaagatggctttatgagaaaccaagaactaacaggcttaccttttgcttagttttttgtttgtgaaacagtcagtcagtgaagtttctgcaattgatcttcctgttagatttcttgtcttgtagggaaggttgtagaggatgttctctcaaggtaaggattgattgtcagtttgctcaattagtcctttctttttatcaccaagtcgggatttagttaatatggatagataaactgcaaagtttagttatttgtcagcaacaacttagaatagactggtaggtttaagaaaaaaattcttattattcctctcactttcccatcaatctttaaatatgcttcactagcaaaaatgtccgtgcgttgcaacgggtgaaaaaattctaataataatatatgtttgtattttgatgagtggcttgtttttttataaacggtatttcttttcttgcgcgattttctcaaactatttttcagaaatggcgcatttctttctaatagttttttcctagcattttttttattttgctttttttactgacgatgaaaaccatatttttctcccttttttttgcttttattttctcgtgtgttttttgcatgttttttctaacaataattttctcgcgcgtttttttcttgttttgtttcaaatgttattttttgcttttttccaatacaggagaatatgtgacgaaataaaagccgtgtagtagatggcaaaaaatcgatggattctatccgactcaagcgtccattaatttagtgttttatctgacagttttgccagagcgatttgttttttaatagatggtgttctttttccttgcgcggttttttcaaaccattttttttagaaatggcgtgtttttttacagttttttcctcacatgttttttttaaattttttttccagcgatggaaataatttttctcgcacttttttttatggaagatgtaaaacctttttagtgtgttttttgcgcttttttctcacgcatttttttaagcagtttttattttctcgtgcattttctatttttatatagttagattagattagagatagagaagagatatatacttattagaaatcggactttgtttcgccctttctattttttttcaaaattatagggacttaaatgtaaatataaaaattaccaggactcgaatgcaaaagtacaaatccaaaaattaaaatcatataaaatggaatgctctcgacctataggttttatttttgcaaacagatctttaatccggcatattaatttttttcaccaagatgtatgggatatcatggtatagattgaaacgaaaggagagtgcctgggatctcgatctcggacttaaacagagaggagtggtgccttttatttttcctttttaagggggaatcagatagagccggatttttttttgtttctgataggaataggagtcggaccttttttttttattttttcgcttatttttttgacggacggactttttttttctgagaggaataggagttggaccagaggaataggagtcggatcttttttttatttttcgctattttttttatttttgacggatgaaggaatcttctctttttttttttaaagtagtagagataacttggatctgcttaagattaattctcagagtttagtgattttcttttgtgcttatctctctagatcttttgttgttgtgctaagtgcaaaattgtaaataatttgtgtgctacctatagtactactctcatatccataactcactagaaagaggagggaaggggaggacaatgatatgatgctatttattttccctccaccacatttgttgagttgtaggggaggtagtggaggaagcgaaaagaagcggcgtcatgcatcaaagctaacgggcgaggagtgcgttcggaagctgcttcaagggcatgtgaaaaattgccgagtagcatttaggatggagccagatatatttagttactgttctttccaaagcttaaacaaatgtgcagaccaagttgatagaatgttcaagtagcaattattaaatcatgataaagatatattttgtttaaattttgataatatgctaacaatatttttttgagaattacacagtacaacatagacactcataacgcacgtgcactcacccatatgaacgcacacacgcacacaaaccctacccctatgagcatttcgaagactgtgctggcaaatccttgagattgacgaagtcaccacaggcgcctcgctgtcgacgggtacgccgccaaccacagaaagcacaatgcaattaaatcctgaaaaattcgctcctatgaggagtcgaaccaaggacctcaggtgctactgaagctcttgtaaccagtcctttcgcgctaataataaattttgttaagacaggccatggtggtactggcctgcatgcatggatgtattacatttatttatcattcatcatgtgggatatataaatgaaacaaatatggagaaagtggctagttaattttctagaggaatctaagtcctgttgaactacttgctgtcctttcacatgagagtactgtttcttggatacaataattttgtgtgcttaacttgaactgttactaatacaataatatttgttcaccctatacagttattactttatttcacatgatagtacaaccgtgggcgacaagatgagagggatagaggatgggaggggacaagaggtgtgagggtgtcaggaacctgacgttgccgggagagctacaggatgctgacaactcgagggaggaagaacagacctatgctgggagaggagcaagagtccgtaagtgtaatacgcgtgtgtgtgggccggattgtaccaaatgagtaccaaccgagcccactagtaagtctagagtgagagagagttgaactgtaataagaacaaagcaccctgtctttctttcgtatcgatgaagtaagaactggaggcgaaggcggcggcggcaccaatcctgttggatttggtgaaactatcttgtttcttgcttgttcttactgttattgaggagttgggttagggttctaacaatctggtatcagagccttgccattctctcgcttcctggattttgctgcaaaatttttcccggaagaggtgggaattgttgcctcggcgactgattccgcaaaagcttcggctccctcgactgggttagcgagatccagaacgagatttcaaccacgggtacctacaagaaacctcgctacgtcaccaagcagggcgtgaagatcatggaccaagatgggaagctggacctcctcaagaaaatggaggaggtggagaagaagcgcgaggaaagtgagaagaagagggagcggtcagaggagaagagcagggctgagctcatggctctcaaggcggcggtagaatctcgtttcccagctgtgaagaagagggtggatgctctggaaggttcggtgaaggatttgcaaggcaaggtggagcagctccgtcagatgtagcaaatttttgttggtgtgatgggtttgggtagtagcgttccaccgatgtcttgtcgaaagttttatggtgtttaatcctcaaatgtggaagtgtaactgtgaagaatactttgagatctatggagtacatgctaagaattgggtcaggatagctggtttgaattttgttggtaacacagctttctggcttcaatctatgagatccaaactgtcgggggttagctggccagtttttgttgaacaagtgtgtatcagatttgctcaagatgactagaaaattcttattagacagtggattcttattgtgcaagatactactttgtctgactatgtcgaaaaatttgacagcattatgcaccaactgttggcctacaataattcactgcctctcaattattttgtgaccaagtttgtggagagttgaaacaggaaatcaggtcagcagttctgatgcagaaaccacaggatctggattcagcttgctcattggccttcttgcaggacgaaatcttggaaggttccaagtctgtcagtcataaaaagtctgataagcctattttagtcaagaactctttgaagtctctctctcctcaaagccattctaattctgttgttaagggcaatgcatcacctccatcagaggacaggagagggtctgacaataccagggctagagatgacaggctagccgctctgagatcatatagaagatccaaggtgctgtgttttacttgtggggagcgttggagtaaggaacacaaatgtgccaactctgttcaacttcatatttgtcacgcccggaagtttccccctctccttgctttaaaaattggctaaataaatcgtccgaagaaattatcttaaataacctagagctaattccctaattaataaatgcaattaataattgaattcggcgtggtggaatttttcttgagttccccatgctccaatgcattaacaagatttttagtggaattttcagagccttggaaataatttttaaccaattaaaaatgagcaagtgcaatttttaatcccaggaaaatcctttcttctttttctttttcctttttcctcctttttcctcttcttgggccgtcggcccactccctcccgcgctcggcctcttttcctttgggccggcccgttcccctttcccctccccgaagtcctccctccctccctctctccttcgggcgccgacaggtggggcccacctgccggtcgtcttcctcctctagccggttggagccgagccccaaccgccggcgccccacctccccacgccgcccgccttctccgtccctctccgcgcccgcacctcgcgcccacgtcgccgctcttccccccccccacacatctcccgcgcgcgcgcgcccgcaagtggtgggggatttgaatccccctctctctctctcttcctccccactcccccacatcgccggcaaaatcggccacctccccggccacgtccgccccctcccgcacctataaatcgctccccgcgtcttcctctctcgtttttcgcactcgccgcgctctcccgtgccgtctaccgcgcccgcgccatcacacccgagctccgccgcttgccgccgccttcggccgcgagccgccgccgctagagccgccgccaagccgcaccatcgccgccgtcgcgctcaccgagcccgcccgcacctcggccgccgcttcattgccgcgaatcaccgccggagccattttctcctcgcgcgccggtgagaccctctctcccctccgtctccggccggcaattcaagccgccatggtcgccttcccttccctaacccctctatgctctctcctagcgtgctgccgcgcccgtccgcacctcggcatcgccggtcgtcgccgccgctttcttccttcgcgccggccgtcgtgctcgccggtgaggaatcccctctcctccttcctttcctctctctcccatgagcgccgccgtcctccgcgcgtgcgccgtcgtcttcggccgccgccgccgccttcgcactggccgccgccgtcttccgcgccgccggtcaccgccggggaccgcgcgtgccgccgccgccgccccatggctggccggccggcttgagccgtgccaagccaacagccacgcccctctcccgccctgtgccgctgcccggtggggcccaccagccggtggaccacccctcccttttagccgctgccagtggggcccgcttgccagccgcccccttcctctctcttgaaccgctgacaagtggggctcgcctgtcggcgcccgccctcccttccgctgacgtcagccctgggctttattgcgcaataaatggattaaggacttttctttattagtaaaaacacagtttatcttctaaaattcataagtaattcatccgagccccgtttaagtccattcaagtctcagtaaatcaagaaaaatgcaaagaatccattaaaaatggttttgtttcctgtttcagtagtcttatagcatgttttgcttgtgtgctttgtttgtcgcgtaggtttcggccgtttcgtcgatccgcagtttctcgaagacgttgctgaggtctcatcagtgcgagagcaaggcaagtcatacattgcaattgatcatattgtacccaatttacaaatgtcccgcatttctattaaatattgcattgttttacaatatcatgtgggattggtcctattactcagctatatgttgtttcccttacgccattgataacttgggtattaaaatgactagatgttggttcaggagatgcttagccatgcttagttcaactagtgcacaaaaggggatcacattaaagcatagactttgtttattggcatagctttggattggtgccaccgcatgggtgtcgttaattaaaatacactgaatggtgggctgtgggtgcatggttttgctggtcgcacccatggcaattaaggaccggttcacgggaaaccctgggagacttaccgtgcttaccacaagcgggagtgggtaactgcttgatctgaagtatagctcgaccctttcctaggcaccggtggcgagggtgggcgtgatggagttgggtcggccggggtgtccggttgtccagctgccggattcaccgcggcgcaagaggggaccgcccactgccttttgaggggtgggggtgaaaccttagcgtggtgtggatggttaggggagggttatgtggagggtcttgtcacgatttccccctttgcagtatcatggtgatacttcggggcatggcgacatgtgcggaatcgtgtcttgtgggtacagttgtacacctctggccagagtaaaactattcgaatagccgtgcccgcggttatgggcgatcaaccagattcaccgtgattagtctcacccctagtttagcttaatgaactggtgtagttcaggtggttggttgggcctgttgcaacgtggtgtagcgttggacagtgtttggttaatattgattaattactacaactgttttaccgctttcaactactgcttttaaatgctagctttatgcaaaagaacctctagcctcctttggttatatcctgcatcatacctcctcttccggtatgacttgctgagtacagtgggtagtactcagtcttgctctcttctcccccacaccagagctgaagatcttcctagttggagctgttttgtcaaagttggtttcgtcgctgccgtcaaggattgcctgtggagtggagtcgctcgctgctgaagtcaagcttcctggtttagctcgcttttatcttttccgctgcatttgtaatcttttctatttttgtaagacgtggatctgtatgtcaacaattgtcgtttgtgtaccctggctggtcctggacaggggtttaatgcacattcagcttagaaattctggtccgagaatttctgggcgtgacaagttggtatcagagccgaccttgaccgtaggacaagccaactggaaaccctaagagccctctgaaccccttttcatatgcatatgcccttttgcacttggaatttgttttgggaaaatttggagttttgcctctttggtttgcgggaaaaatcttggtcgttcattcggatcggatttttttttaaaaaaaaaaattagctcagtctagggctttagaaaaattttagttggagtttattcgacagtcagtcgggaatttattgggggttatgcattaggtcgtgtctatgttcgatgggggcaatgttatgcgcatcattttccatgcaactagtctatgcattaatttattgcctagttgcattagtgtctttattttgagttcatgaaaaatgttctatgcataaaaatcatcatgctcggttatttatttgggtcttcttttgctttgtttaatttggatttgagcatgaattggttcctatcccttgtctactttagatgtcagtcctatccctcgtttgcaagcgccgcccgagcttcagagtcgccgcccttagctttatcgccttcttagtctgtttgcttgctagttttcgtgtttaggtttgttgcttgtgggttagtcagcggtcgatatcatgtgtcagtggtatgactgcctcaattaggagttgcgtgcctctttttcagtgttttaatcaagattaagataattgcacttaaattcataaacaagattagtttctgagccccctgtttttcttcattttctcatatttctacctatccccttcagatggagataaggaatggttcacgcgactccaacaacgtcagtggcagcgaagagccgatcaatggagcacgtgccaatggtgcatctgactacagtctgtccccaccgcccgagaacccaacaattgctcaggtgttgaacaatcagactcagatgatgacaatgatgatgcaacagatgcagcaacagtaccatcaggtgttgcaacaggtgcagcagcaagcacagcagcagcaacagaacctgcagtttggtcctccacctcctcagtccaaattgttagaatttcttcgtgtcaagccgcccattttctcaagcaccaccaacccaatcgaggcccacgactggcttcatgccattgagaagaagctgaatcttttgcaatgcaacgagcaggagaaggttgcttttgctatacaccagctacaaggtcccgcttctatttggtgggacaactacatggtgacccgtccagctggggcagaggttacttggacagagttttgtcatagtttcaataaagcacaggttcccgagggaattgtggcacaaaagaagagagagttccgttccctgcaacaaggaaccagaacagttatagagtatttgcatgagctcaaccgcctcgcgcgctacgcccctgaggacgtgcgtaccgatgccgagaggcaggagaagtttctgtctggtcttgatgatgaattgactaaccagttgatctctagagattatgaggactttgagaagctggtggataaggctatccgtcaggaggagcactataacgaaataaaccgtaagaggaaggcagctcagttcaggactccccaggggaagagtcagaagcctcgtttcacgatgggacatcagggtggaccttccaccatgattatccggcagtaccgtccctaccacccgggtagcttcaacaagacccaccatagtggcagtcacaacaacagtgagcagcacaggctcaagcctactccaagtccattaatgattccagctcagccagctctgccagctcagccagaacagcccaagaagtttggagaaaagcccgaactctgcttcaattgtaacgagcccggacacacggtcggaaggtgcccgaagccaagacgtgctggacccaagtttgttcaggcccgtgtcaatcatgcgtcagcagaggaggcgcagtcagcaccagaggttatattgggcacatttcctgtcgactcgacaccggcaaaaatattgtttgattctggtgcaacccattccttcatttccaagcgttttgctggtgcacatgggttatctttagtgaagcttaagataccaatgcgagtgcatactcctggaggtggcatgaccacaactcactactgcccatctgtgacagttgaaattcaagggatgatttttccagccaacctcattcttctcgaatccaaggacctagacgtcatacttggaatggattggttgacaaggcacagaggagtgattgattgcgccagccgcaccatcaagttgaccaatgcaaaaggagaggtggtaactttccagtctcaagtgccgcggaagctagggattagtttaaaccaggctgctggtgaagaacaagaggtagcagtggagaaaaccactaagaagctggaggatattcccatagtcagagagtatccggaggtttttccggacgatctgacaacaatgccaccaaaaagggatatcgagttccggattgacttggtacctggaactgcaccgatccacaagaggccttacagaatgggagccagcgagttggcggaagtcaagaagcaagtcgatgaacagttacagaagggatacatccgcccgagcacgtcgccttggggtgctccggttatctttgtggagaagaaagacaaaaccaagaggatgtgcgttgactaccgcgcactcaatgaggtcactattaagaacaagtatccgttgccaagaattgatgatctgtttgatcagttgaaaggagctacggtgttctctaagatagacctgcgatcaggttatcaccagttgaggatccgcgaagaggatattccaaagacagcattcatcactcggtacgggttgttcgaatgcacagttatgtctttcggactcactaatgcacctgccttcttcatgaatttgatgaacaaggtgtttatggaatttctggacaagtttgtcgtggttttcatcgatgatatactgatttactccaagtccgaggaagagcatgagcagcatcttcggctggtacttgaaaagttaaaagagcaccaactatatgccaagttcagcaagtgcgacttctggcttaaggaagttcagtttctcggtcacatcgtgaatgctcaaggagtagctgtggatccagcaaatgtggagtcagttaccaaatggaccccaccaaggacagtcactcatgttcggagtttcttaggacttgcgggctattaccgccggttcattgagaacttctctaaaattgctaagccaatgacacagctattgaagaaggaagaaaagtttatctggtctgctgaatgcaataggagttttgaagaactcaaacgacggttggtgtctgcaccagtcttaatcctgcctgatcagacgaaaggtttccagatctattgtgatgcatctcgccaggggctaggatgtgtgttgatgcaggatggcaaagtggtttcttatgcttcacggcagttgcgtcctcatgaaggcaactacccgacgcatgatctggaattggccgcagttgttcatgctttaaagatttggcggcactatctcatcggtaaccgttgtgaggtatatacagatcacaaaagtctaaagtacatctttactcaacctgatttaaatctcagacagcgaagatggttggagctgatcaaggattatgatatgggaatacattatcatcccggcaaggctaatgtggttgcagatgccttgagcaggaagagctactgcaatgttgcatgggtagagcaactatgttgtgaggttcaacgcggtctggaacatctgaaccttggtatagttgagcacggattcgtggttgccctagaggcacagcccacactggtggagcaggttcgcatagctcaagcaagtgatcctgaaatagcagagctcaaaaagaacatgagggttggaaaagcccgaggttttgttgaggacgaacaaggaacaatctggatgggagaaagattgtgtgtacccgaaaacaaggaattaaaagacctgatactaatcgaggctcatcaaactcaatattccattcatcccggcagtaccaaaatgtaccaagacctcaaagaaaagttctggtgggtcagcatgagaagggaaatagctgagttcgtagcactctatgacgtctgtcaacgagtaaaggcagaacaccaaaggccagcaggtttgctacagccacttcagattccagaatggaagtgggaagaaatcggaatggatttcatcaccggtttgcccaggacgtcatcggggcatgattctatttgggtagtcgttgaccgactcaccaaagtggctcacttcattccggtgcacactacctactcagggaagaaattagcataactctatctggcaagaattatgtgtttacatggtgtacctaagaagatcgtgtctgatcgaggaagccaattcacttcaaagttctggcagaaattacaagaaggattgggaacccggttgaatttcagcactgcttaccatccacaaacagatggccagactgagcgagtcaatcaaatgctagaggatatgttgagagcatgtgcgcttgactttggtggagcatgggacaaaagcttgccgtatgcttagttctcgtacaacaacagttaccaggctagtctgcagatggcaccgtttgaagcactgtatggacgaaggtgtcgtactccgctcttctgggatcagacaggggaacgccaattgtttggtacagaagttttaaatgaggcagaagagaaagtcagagctgttagggaaagattgagaatcgcacagtctcggcagaaaagctatgcagacaaccgccgaagggagctcgctttcgaaacaggggattatgtgtatctccgtgtcactccgctcaggggagtacatcgcttccaaaccaaaggaaagttggcaccacgctttgtgggaccatacaggatcttggaacgtagaggtgaagttgcttaccagctcgagcttccctccaacatgcttggcatccacaacgtgttccacgtctctcagttgaagaaatgtttgagagttcctgaggaacaggcaagtccggatcacatcgaaattcaggaagatctgacgtatgtggagaagccgactcgtgtcctcaaaaccagcgagagaaggaccagaaacaaagtataagattctgcaaggttcagtggagccaccactcagaggaagaggccacttgggaaagagaagatgagttgaaggccacccacccgcacctcttcgccagctcttccgaatctcggggtcgagattccgtttaaggggggtaggtttgtcacgcccggaagtttccccctctccttgctttaaaaattggctaaataaatcgtccgaagaaattatcttaaataacctagagctaattccctaattaataaatgcaattaataattgaattcggcgtggtggaatttttcttgagttccccatgctccaatgcattaacaagatttttagtggaattttcagagccttggaaataatttttaaccaattaaaaatgagcaagtgcaatttttaatcccaggaaaatcctttcttctttttctttttcctttttcctcctttttcctcttcttgggccgtcggcccactccctcccgcgctcggcctcttttctttgggccggcccgttcccctttcccctccccgaagtcctccctccctccctctctccttcgggcgccgacaggtggggcccacctgccggtcgtcttccttctctagccggttggagccgagccccaaccgc

SEQ ID NO: 6551 - DNA, 3053 bp, Oryza sativa
ggacccccccttaaactgttgtggaagaaggaaggtgtccccgtgtgggacgaggacaaacaggagaagtttaacctacaagcgctactgttcgtaaccatcaacgattggcctgcacttagcaacctatccggacagtccaacaaggggtacaaggcttgcactcactgtatggatgaaacagaaagtacgtatcttaaccactgtaggaaggttgtgtacatgggtcatcgtcgattccttgcagcaaaccacccggtacggaagaaaggcaagcactttgaacatacggcggaccaccgtacgcagcgggaaaacagtgtttgctatggttaaagatcttaaagtagtgtttggaaaggagcctggcagccagcctatagagagtgaagatggtcacgcggcgatgtggaaaaaaaactccatattttgggagttaccctagtgggaattcttggacgtccgccacgcaatcgacgtgatgcacctcactaagaaccttttcgtaaaccttcttggcttcctaggtgtatatggaaagttgaaagatacactggaagcacgtaatgatctgaagcatatgaaacaacgcggcgaccttcacccggaaccacaggagaaaggcagccattacttgagtccagccagctacactcttagcaaggcagagaaggaaagtatgtttcaatgcttggagagcatcaaggtaccgtctggatactccacgaatataaagcgaataataagcacgaaggagaagaagttcacaaacctaaagtctcatgactatcacgtgttgatgacacagctgctaccagttataataaggagtatcctcccagacaatgtccgggtaacaataacaaagctatgttctttcatgaacgcaatttcgcagaaggtcatcgatccggataggttagaagcccttcagaatgatgtggtgcaatgtcttgtcagctttgagttgatatttccaccttcatttttcaatataatgacgcatctgatttgtcacctagtgaaagagatcggtattctcgggcctgtgttcctacacaacatgtttcctttcgagaggtacatgggcgttctgaagaagtatattcgtaaccgtgctcttccagaggcaagcatcgccaaggggtatggaacatgggcgtagaatttattgaagaccttcgcccaatcggggtacctgaatcacgccacgaagggagactacggggaaaggggactctcggaaggaaagcaataatgacggtagacaacaatttatttcataaagcccatttcacggttttacaacaatcttcattggtggctccttacatcgaggagcacttggctctagttcgcgccagaaacatcggtaagtccgatgcatggattacacggcatcacattgatactttccccgcatggctgcaacaacatctcatgggtaacgagacgattaaccagtaactggccttcctggcaaggggttcatctgagtcgatcgcgatattccagggatatgagatcaatgggtacacattctacacaagagcccaagacatgaagagcacgaaccagaacagtgctattcgtatcaatgccatgggacacgatggtacaactggcacatattacggagccatcgaggagatataggaacttgactatggacctctcaaggtccctctgttccggtgccaatgggttaggttgactggtggaggcgtaacgattaatgacagtgggatgacaacggttgaccttaacaaggttggatactcggacgaaccttttgtccttgccaatgatgtaacgcaagttttttatgtgaaggacatgtctagcaaaggaaagaatggcaaagggcctgacgagccgaagcgccacgtggttctcccaggcaaaagaaaaatcgtcggagtagaggataagactgacgaggattacgatcagtttgatgggcaaccccctttcacggggacgggtgaccctagcatcctcctatcaaacgaagacaccccttactcatgtagcgatcacaaggaaggaacaatagtgaggagaaagtacgtgcggacaaccgtcaccgctgatctattgccgtaattgttgtaaactaatttggatgtattgaatatgctagttatatatgattaattacaatttttaacaatttaatatcatgcatatactaattatatatgattattagaatttttaaaagttttaaatcatgcatatgggatttacatatgttagttacaatttttaacaatttaatatcatgcatatgctaattatatacaattattagaatttttaaaagttttaaatcatgcatgtgggatttacatatgtttgttacaatttttaacaatttaatatcatgcatatgctaattatatataattattagaatttttaaaagttttaaatcaagcatgtgggatttacatatgttaattagaatttttaatgcattatttactattttagaaacacatatgcaacgaaattcaatattcagtgctattaactttagtcctgtttcttaaccctaaccaggtttaaaaaagaatttgaaaatagcgggaaaatatctttactcccggttgttgttacgaaccgggagtaaagatatctttactatctttactcccggttcttctcaccaaccgggagtaaagatccgggggtatatatattcccggtgcgccctcgtcttctccaccaacacttagacgtttttccatcgagatcgagcatcggcttctccttcgtcgccactgcctagcgctaccccgcgccgacgccgccgttgtctctcaccgtcgcctggtggtcctcgccacctccgccgcagacgccgtcgccgcgtctcttgggtgagagccctcgccctctctctctctttctcgatgtagctctctgtctctctctctttcgccgacggacaccgacgacgccgacgccgacgtatgccgccgggccgctacgttacgctgccgccgcgcccccatgccgccgggcccccatgccgccgccgcggcccg

SEQ ID NO: 6552 - DNA, 14690 bp, Oryza sativa
ctataaatcgctccccgcgtcttcctctctcgtttttcgcactcgccgcgctctcccgtgccgtctaccgcgcccgcgccgtcacacccgagctccgccgcttgccgccgccttcggccgcgagccgccgccgctagagccgccgccgcgccgcaccatcgccgccgtcgcgctcaccgagcccgcccgcacctcggccgccgcttcattgccgcgaatcaccgccggagccattttctcctcgcgcgccggtgagaccctctctcccctccgtctccggccggcaattcaagccgccatggtcgccttcccttccctaacccctctatgctctctcctagcgtgctgccgccgcccgtccgcacctcggcatcgccggtcgtcgccgccgctttcttccttcgcgccggccgtcgtgctcgccggtgaggaatcccctctcctccttcctttcctctctctcccatgagcgccgccgtcctccgcgcgtgcgccgtcgtcttcggccgccgccgccgccttcgcactggccaccgccgtcttccgcgccgccggtcaccgccggtgaccgcgcgtgccgccgccgccgccccatggctggccggccggcttgagccgtgccaagccaacagccacgcccctctcccgccctgtgccgctgcccggtggggcccaccagccggtggaccacccctcccttttagccgctgccagtggggcccgcttgccagccgcccccttcctctctcttgaaccgctgacaagcggggcccgcctgtcggcgcccgcccccccttccgctgacgtcagccctgggctttattgcgcaataaattgattaaggacttttctttattagtaaaaacacagtttatcttctaaaattcataagtaattcatccgagccccgtttaagtccattcaagtctcagtaaatcaagaaaaatgcaaagaatccattaaaaatggttttgtttcctgtttcagtagtcttatagcatgttttgcttgtgtgctttgtttgtcgcgtaggtttcggccgtttcgtcgatccgcagtttctcgaagacgttgctgaggtctcatcagtgcgagagcaaggcaagtcatacattgcaattgatcatattgtacccaatttacaaatgtcccgcatttctattaaatattgcattgttttacaatatcatgtgggattggtcctattactcagctatatgttgtttcccttacgccattgataacttgggtattaaaatgactagatgttggttcaggagatgcttagccatgcttagttcaactagtgcacaaaaggggatcacattaaagcatagactttgtttattggcatagctttggattggtgccaccgcatgggtgtcgttaattaaaatacactgaatggtgggctgtgggtgcatggttttgctggtcgcacccatggcaattaaggaccggttcacgggaaaccctgggagacttaccgtgcttaccacaagcgggagtgggtaactgcttgatctgaagtatagctcgaccctttcctaggcaccggtggcgagggtgggcgtgatggagttgggtcggccggggtgtccggttgtccagctgccggattcaccgcggcgcaagaggggaccgcccactgccttttgaggggtgggggtgaaaccttagcgtggtgtggatggttaggggagggttatgtggagggtcttgtcacgatttccccctttgcagtatcatggtgatacttcggggcatggcgacatgtgcggaatcgtgtcttgtgggtacagttgtacacctctggccagagtaaaactattcgaatagccgtgcccgcggttatgggcgatcaaccagattcaccgtgattagtctcacccctagtttagcttaatgaactggtgtagttcaggtggttggttgggcctgttgcaacgtggtgtagcgttggacagtgtttggttaatattgattaattactacaactgttttaccgctttcaactactgcttttaaatgctagctttatgcaaaagaacctctagcctcctttggttatatcctgcatcatacctcctcttccggtatgacttgctgagtacagtgggtagtactcagtcttgctctcttctcccccacaccagagctgaagatcttcctagttggagctgttttgtcaaagttggtttcgtcgctgccgtcaaggattgcctgtggagtggagtcgctcgctgctgaagtcaagcttcctggtttagctcgcttttatcttttccgctgcatttgtaatcttttctatttttgtaagacgtggatctgtatgtcaacaattgtcgtttgtgtaccttagctggtcctggacaggggtttaatgcacattcagcttagaaattctggtccgagaatttctgggcgtgacaatattgttcaggaactattggaatccttaagtcctaactctgttgattcatatgagctggaagtggaagaaagtaacctgatggccctatccctgcaagcaatcagtggtactgagtctgccacttccttcaggataaaggggtgtatccaaggaactgaagtgctaatgttgattgattcaggcagctctcattctttcttggatacccaagtagctcataagttccaaggtgttcagccactacagaaggtgttgtcagttaaggtagctaatggaggtatcatgttatgttcccaattgattcttcattgtgcctggtgggttcagggagtagggttccatacagattttaagctgttgagtcttggagtttatgatgttatcctgggtatggactggctagtgaccttggggacaatgaatattgattgggctgctaaatggatggagtatcagttggggaacaaaacaatcagaattcaaggaattcagactcagactgaaaactgtgctcccatttcagtggacaaatttcaggaaatgctgactattggttcagttatgcaggtcttccaactgcaacaactaacaccagataaacttgttgaggtccccctgcaattcgggcctcttttaactgaatttaaggatatttttcctgaaactactggtttacctcccagaattcctttgttgcccaactccaaacctatgtacatcaaaccttataggcacaatccaacatagaaggacgaaattgagagacaggtgaaagagatgttggcttctggggtgattagacctagcagcagtgcatactcttctcctgcacttttggtgaaaaaagaaagatggtacatggagggtttgtattgactatagacaacttaatgccataactgttaaaggtaatttcccatgccagtcattgatgaacttttggataagttatctggtgctcaggtcttttccaaattagatctaagggcagagtatcaccagattaggttgcaggaaggggaagagcataaaactgctttccaaactcatactggccactatgattacagggtaatgtcatttaggttgactggtgctccagctacatttcaaggggccatgaatgagactcttgcacctatactaaggtaatttgccttggtcttctttgatgatatattggtttacagtcaggatatgcagtctcatttaactcatctcaaggaactgttgctcctgttaaacaagcaccaatggaaagtgaaactcagtaagtgctcctttggtcagtcacaactcacaactatcttacttgggacacattatcagtggtaagggggttgctactgatcagtccaagattgaagaagttgtaaattggaaggtgcccaatactgtcgaaaagctgagagggttccttggactggctggatatattatagaaagtttgtgaaaaattttggtgtttgacgttattttgtacatacttaaatataaccatatatattacatgtattaatggctattttcaggaaccaatttagctagcaatgccaatgtgctaattaagccagttaattaaatattgattcatgcatgagccgtgcacgtactggcatatatacatgtgtatggccgcctgtgggtgttgggggagtgggggaatttccgtgggcaaaattgaccaagggaatctctaattgggccgtgaattagtgaatgggccaaaagaggaaggagggagtcagcccaataacattgaattgtttgcttttggggctgattgtggcctcctttttattttgacaatacacataagaaatacatagtataaatatcttttctttttgacaaaaatcttaggtatatacatatgaatactcttaaattgaggtgagcctgcccctactagtcaccatgttctactcatcgagatgtactcggtaggttctagtcggtatgctaagtagtctacagatttctccatcataacttgtgtggtatttttctcggcaatgtatataaactggatcgtgtatgattattatttatctcaagggtcggaattagtataaatccttatcctttgtcttcttgatatgattttgcgtataacatcctagtgccaacaacccatatactctacggataccgttgacatatatatagctttcgataatgatataattgtaatcattttcacttggattatgcatgtaagatttatttttcttcgtgttttatatataagcctttgtacttaattgaagtagcaacagcagtcagcaataatcttattctttctaaaaaaacaaagtcttcttaattattaggcaaaatttgccctaggacacctaaaaattatgtaattgggtgggagatactgtaaaatcgtgccgctgccgatggacaccacaaaattcatttaatttgccgtaggacacccaatacaatattttatcatttttgacaaaaagagtggtaaatttcaaaaaaaaaattgccctcagttctatctgatccctactgccgacacctgcttcccagcgccgcttgccaagcgcgccaccgtcgaagacgttgccacagggcttgccaaccatcgttgaagccaccgccactgccaccactgtcaccgccgccattgaagccaatgctgtcgagctcgtgaccatcatcaaagttgccgccgccgcgcgcttcccagcgctgcacaccaaccgtcattgaagtcgctgctgctgccatcagccatcgttgaaggtgctgccgccgccgccaccgccactgttgaagccgctattgccgagctcgccgacaatcattgaagccgccgacgccgccaccaagctcataagccgctgccttggggctcaccagtggtcgtcaaagtcggctcaggcctacttgccgctaggttaggggtgttgggggggggggcaaaagtgtgatgctagtggggttagatagggttgaacgcaattttgtctttctaaaatttctctctcatctttttacctgaaaataataagacattgtcttggatgttctacagcaaacaatactacaaaaatcatcttttacggcggccattttgggcctttgcaagcggcatttggcgccaccacaaaagcaaaggccagtgaagatcaagatcttcgctggcagctagctgtcttaagccagccgcgagcttgcgaaaatatatttttgttggcagatccgtaaagagaactactagcaaaaatcctccaccagatccaaacagaactgccagcgaaaatcccccacccggtccaaactcccttacataaattcaaaataccccaatgcaaatccaaaatcctcaaccaccctaatccattcacacaacataaattcattacaaatatcataatacattcaacagattcattcagaaacatcccttcacaaatcacaaattcaccaaataccaaaacaatccatccactctaaccacccgccttggccgcagctggccagacggacttgggcactcagcttgccgtcgaggatggcagccacgtcgagtcatgaagaggacgatgacagggaggatgctcgtcgtcacttgcgccatcgcagtggggaggaagacgccgccgcccgcgcccgcgcttctctccgccaccgtcgccgcccgcgcttctctccgccgccgccgcccctcccgacgccagatccctttgttgggatacgcgtaggctacgatagcataaatcaaaaattttctactacgtaaaccaggaaccgtgcaagtattagatcatagatcgctaccactggacgcactgcgtagcggaaaaaagtgctaagaaggcaaaggaaccctcgtgatgtagcgcgcgtcgatgtagaggaagtagtcgatcgcaccggctcaaccttctcttcctcgtgcgttctcctcgccgtacgcccaagccgatcaacaccgcaaagcagcagcgcctctatcggtatccacacgtacagggacaaaacgccacgtgcagatgtgctaggacccgcaagcggataaggttttgctcagggagaggtgtggcgtctagggtttctcatgtgatgcaatgcctccgccagtcacgcccctcacaaatatataggatccatgactcgggcctccaaggcctgtaggattcctattcggatccctatctgaattaagctcatattagatctccttccaatcccccttattccggcccattaagcatgcgaccctataggtttatgcacactaggctgtaacccgaaaattccttttcggtccacgtgtcaacagcggtccctagcagaacgtattgacccaccgggcatacataaagattatatcggctgaacctctagtgtatacatgtatgaacccctttgcctcacgataacgattaaaatcaaggctagatatgtgccatcctctattagctctatcattcactcgaatctgtgatagattatataacttgtgatagactcctcaatcacctttggcatggtcatgcacttccataatctataacatcgaggggtccatagatatctctccataggaggagcaaatcacatcttgattatttatatcccactacatgtttcatagcatacctcaaaactacttttataactacccaattacagcgtagtgtttagcagtccctaagtaaggtactacacatgttgggaaccatgataatcttaggtctaacaattcaacaccaacacttaatgagatcactgatgacacaatacatatggctcttgcagtgtctcatgttgggtctatacaataacatattccccaacatgtgttcacattattaatttggtatataccatgatccatgagacatgatcatcaattatataatacatgcgctgatcatttaaacatatttgttccatatataatatttgatcagggatactctagaaatagtaacatacaacataaaaagtctcatgaaagaatcacatattcattaaccaataatgagttatctatttcaaggaacaatatctgataaatatgtaaacatagtatgtaatacaatcatctctattattatctctagggcatatcaccaacactcttaggcccgcgcttctctccgccgccgctgtccctcccagcgctggatctccaccgcccgcgcttctctctgccgccgccgcctacgcgagacacgccgccggtggggagggaggagggaggagggagggagctgtcaccagggtgagggaggagggtggatctaaagaggaggatgagaagaggctgagttgggtggatgagaagtgctgggtggcggtggccgatgggtttttaactgtgacaatattttcactggcggccgtttaagtggaccgccagcgaaaaagtgcaaatctttgctgtctgctctcctaactggccgtcagcgaaaatccatttttcgcaggcagacaattaagaggtccgcctcgaaaaatagagtagtttttatggcgaaccacttagcgtggccgccagccaaaatttggttttcgctggtggtcagtagtcctgcacccctcattatgtttttgcatatggccgccggcgaaaattatggggtaacgccataaaaatcgtttttctagtagtgaaattacacagattttaaagtgtccattagtagcgacatgattttgtgatatctcctagccaattacataaattttagatgtccgtggtaaattttgccctcttattaacatagctggctcagttcggcaccccaggctcctaaccgatacatccggtacggtaaacggagcaatccattagtacgtcattaattaagtattagctaattttttttaaaaatagattaatctgattttttaagtaactttcgtatagaaactttttgctaaagacgcaccatttagcagtttgaaaagcgtgcgtgtgaaaaatgagagtggttgggaagcgaacgcgtatcagagcacgtgcccgacgaccttccgtttagaactttaccgatggacagaggtcgcccaacttagtggtaggtcggtcacgttgacgattgcaataaacttagacgaagaatatatacatataggtatcgattactttttttttatcgattatgacataactgatatttttcaattgggttatgcatataagatttatttttttcgtgttttatatataatccatgatacgtaatcgaagtagcagcaactaattaatgaatggagtcaacagtcttcttattctttcaaaaagacaaagtgttcttattgatatagcctaagtcaaaacaagagtatacgtgtatgtgagcacgtgtccaagcgcaattcgccgggctgctaagactttccggttagaacttttctaatggacagaggtcacccaatttggtgatagatcggccacgctgaggattgaagtaaacttatttttggaggggacgattgaaatacacttagatgaaggatatatagttatcggttatgacatataactgtaatctttttcaattgggttatgcatgcaagatttattgttgtgacacataatctaagtagcaacaactaattaacagggtcagccctcttcttattctttatcaaaaaaaaaacaaagtcttcttactaacaaagcctattctaaacaagagctagcgtacatgcatgagatcgagcatgtgtctgacggccatttgccgtgctgctctggccttccggttagaactttactgatggacagaggtcacctaatttgatgatagaaattcgtactgttgcacttctgctgacgaccttgggtttagatttttttttctaatagaactttagaaactactttagtcatgttgataaaatcaatagataacaattgcattgcgatgttgcaatttgtcgcgtttgttgctgcgaacattccaactagagtattctttattttgcaatttaaatgcaaagcattcttaggatgcatttgaaagctcattaatttcacttttacggttctctcgcacatttttcaaattgctaaatagtatgtttttttaaaaactgtttatgtagaaattcttttaaaaagtcaaacaaacacatttttaaattttgtaataattaatacccccgtcctagagtaacatcatttttcatattctatttgtcccaaataagtttcttttttaagcaatcatcatcgtttgtgagagtaaaggataaatacattgaaaatagataaaatcaataacaattgcattgggattagataaaagagcattttagtttttttattgatatgtgtaggacggataaaaaaacaaatttattttagaacaaaggtactgcttaattaagggcatgtataaagatagagtctaatatgagctgtctatattaattaatatcactagagactattctcctataatgtaaagacaataagatttctgaaccattaatttactaaatattttttttgttatatttctttcctttttaccaccctcatgtaacaaagttttcattaataaatataaagagtcgactttgagatgatgtcatttgtagtaaacgatatttcttcttccttctatctctttcttccacgtccttctatctctttctttcatatcaccaaatttacttacatgataataaaaagagcccgttattagacaccattgtacatacctaatcatacgactgatttagcacgcgtgaaaaaggaaaaagtaaagtaattccatacagagctgttttgtcaggtcccagcttggaaaccacattgaatgggtcgtcgcccagcttgataattgaaatacgcatatgctggatataggtatcgattgcgacggagcttaatttgttaattaggaatattttccgatcgggatatgcatgggagtttttgtatccgcagtttatgggccgaaataggtcataggtgacgaaggcaagaactaaatttatatccacccgccattttaaattatgatatgaaacatccatatctttttgcgaaaataaaatttgcagactttggctaatattaaaataagaacattgggtaaaaactaaaatatgagacatgtgcgtacaaaccacgtacacatccgcgagccatatataacatacgtccaaaatcttgcatcacctgctgcgcgtgtgctttttttttcgaatgatcagaccgttgccgatgttttatataaagaagaaggtgttccattttagttgccgatgttttatataaagaagaaggtgttccattttaaggagaaaatgaaaccaaaccttacaatgcacagttaattagaaaaaactgggtgaaaatcacaaccacaacattcactacatcggaccaagtcatctgtgacgggtccaaaccctcacctttgacgggtttttccctttgtcacagattattggtcactgatgatttaacctcacctgtgacggttgaaggtctgtcagtggtgagagacacctgttacgggttacaattagcaaaccattagtggtgagagatatttttgacgagttataattagaacccgtcacagattatgccacctcaaatgagttaaaagcagtcaacccgtcattggtatgaaaaatcaaccaaaaaaaaacctcgctgcaacaatgatttgtagatccacgctaaataatccagaatattttagactacatttctgatccaagaacttacaaggttgatgttacaatgaacataaaaacaaactagtgcaactgcaaactacttgagaactacaatgttcagattccaattttctagcaaaatcaccaaagacaatgaaactctaaacacttccaatgcaccaccttcaagaaaaacaagacacatcatgcggcttcaacaaacaaatcagtggcaacacatcagtcatccacccctgcgattaatctccagtggcaacacatcatgcggcttcaacaagaacacatgccgattaaaaacttggcaccgataacttgcaagatctaaaatcaaatcacaagaatacaaaacacatacaaacacatgctcgaagatggaggaggtggtgaggaccggtgctcacaggaggaggtggactctgcggcagccgccgctcggggatgaaggaggcggctagcccttggaggtcgcttctcggtgatggaggaggagtcggatccggtttcccccgacctagatctagcatcccctaactcgcccttggaggagctggatccggtgatggaggaggtggctagcccttggaggggctggatccggtgttggagaggccggatctggcatcccctatctcaccgacgttcccaccgggcctcagcttggtgaactgcctgacgaggtggttgcggcggccgctggatctcgtccttcctcggccgctggatctcgccaccctgacgcatgggacgccgacgcccggccacatctggtcggcgcccggcggcatctggccgcccgacggcttggacgcctgcgctcggaagaagggagaaagagggaggggcggaagaagaagggagagcgcgggtggtggcggaagaagaagggagagcggaagaagaagggaggcggaagaaaaaaggataagaccgggcgtgggttcggagccaggaggaggttatgatggcgatattttttaatcatctttgacgggcatacaaatatttgacctgtcacagctgactttacctcaccttcgacgggttccctttttggcccgtcacaagtgactagttaccctgtgatggtgttgacgatcgttatcgatcagtttcaaccgtcaatattaccaaaatagaggagaactagtaatgcttgcaatgcatatatatgttagaataataatattccactagtaataggtatactaaccttttgcagagaatagcaacgaagtggaggagaatcgacatcagcaaagatgataaatcaatcggacgatgtcgataatcagacttatgcatgaatgggccaagaacttagaattgacacgatgaattgggccaaaattcacaagtctacgaagaggatcaacagaggaggccgccagccaaaacatgggttggttgggccggcccctggttctgccgaaccaggaggttcggccaaacccccgctagcgcctttggatgcagggttgcggctggacagtgtggaatagcccccaatgacggttggagggtatttccgaccattccaaccgtcacaacagtcattcggaggctatataaacccctcaccttctcacttcactcacacacctcaagcaagagctatctcatattctctcaagtttagtctagtagtatcaagctagtggaataggaatagagtagaaatcaggagttcgaaagtcttcggaagagttcggttatggctctagtagctttcctttccttttttgtaagctttgtactttatttagaatactcttctatataaatttatggtattgaaatactttccgagtatatgaatgcctactttacattatgttcttgttatactaaatatgctgctagcttatctgggagatgctttggtgcgggtatattgtttgcttattcaattactctatatcatgacgatgatattagagtagtatctggtagtttagacgtggtgtctagattacgggatatcattatttggggttatatgctgcggatcagaggtgggccgttgatggtgacagctcagtacgggtattcctccgcgcatgtatataatcctaagttaattccctggggagggtactcctccgtatttagcccaggttgtatggtcatgacggactgtcataaggaactcggcagtaaggggtggcttctcgaagtaccaggagggcattggagagggcatcggatagagggtattagctactatattggataactagaatgtatgtatactatgtatactagaagtataggaatagattatctttctctttttttttccacttagtttagataatttaatatgagaatgagtagctactgcttgtgtgtcactctacccttgggttatcttaacatataaattattagccaagttctctctacatgatcttcccacgggataaaataaatacgatacccttggaatactctcgggtgaaatgctacaatgatatatccgtgcgcttgtggatgaactctgtaaccgtaatataatagaagtatttatgcgccattgctgggaattatatttctagtaatgtcgtcaagaaataccaacaagcatttctggcgccgttgccggggaagattcataataaagattacttgaactaatactttatatttacctatgtataatcattttcctttgtaggctaaccttggttgttttcacttctgttttgaaaacagggtagtgcatgaccggtttcaacttgccggaaaacttcaaagaaaatccagaagatttcttccggagtgtcaggccgcgagtcgttgttccgcagaaaactctaccaacagacaaaccagccataccagcgccaccgaccttcaagactatggctgacaagaccttccgcgagttcgttgctccctctgctgaaaatgtggccattgggccgcagatcaacattggagacgtggatttcgacctgaagtccagccttatcacgatggcgcatgctagcccgttctatggcaagcctaacgaggatgccaacactcatctgcagcagttcctggagatctgtagcacgtacaccatcaagggcgtcagtcaagaagccgtcaggctgaggctgtttccattctccctcctcgggagagcgaagcagtggttttacgccaatcgtgctgctgtcaacatctgggacaagtgctctacgacattcctcttgaagttcttcccgataggcaaaaccaatgcccatcgtggacgaatttctagtttccaacagacgagggacgagtctattcctgaagcataggaacatctgcaagagtatgtggccgcctatcctcatcatgggatggacgactagctaattctgcagaatttttacaatggactcacacccacgtcccgcgatcatctagacacggtagctggaggggctttcttttgtaaaacggttcgaggatccgttgacttaatagagaagatggtctccaatatgggttggagggagaaatgactccggacccgttagagaggcatgcacaccgtcaaggagacggaattacttgctgccaa

SEQ ID NO: 6553 - DNA, 10977 bp, Oryza sativa
gcccccaccgccgcaagacgccgccgccgcgaacgaacgcttaacaaacgtgactgaacgcgaacgaacgcgaacgaacgtgaacgaacgcgaacgaacgcttaacgaatgcgaacgaacgtgaacgaacgcgaacgaaacgttaaagaaacgtgaacgaacgcgaacgaaacgtgaatgaacgtgaacgaacgcgaatgaacgtgactgaaatgtgaacgaacgtgagtgttagtgaacgaacacgaatgaacgtgaacgaacgcgaacgaacgcttaacgaacgcgaacgaacgtgaacgaacgcgaacgaaacgttaaagaaacgtgaacgaacgcgaacgaaacgtgaacgaacgtgaacaaacgtgactgaaacgtgaacgaacgtgagtgttagtgaacgaacgcgaacgaacgcgaatgaaacgcgaacgaacgtgattgaaacgttaacgaacattaatgcacttgaactaaaagtgtgagaacgaacgcgagcgaaacgtgtacgaacgagataattaaactattgttgaacttagcatatatatatgattatatatacttgaaaacatgaaatacatttttttgcatgttgcagagaagacgtcgtcgtcgtcgtccctcaagccgaagtggtagctagccctcgaaggaattcgcgcaggcaagtgatgtaaagatgtgattgttagagatataatataagattgttagatttctaatataagattattagattattagagttaccatatgtgagtgttagaaattattagattattagacttagcatatttgagtgttagagatagttagagatttaatataagattattagaggtttaatatacgaaacttaattagacttagcatatgtgagtgttagagatttaatataagattattagagatgtaatattcgaaacatatttgattgttagagatttaatataagattattagagatgtaatattcgaaacttaattagacttagcatatatgattatctaccgtacaaatacacgacacttagacttagcatatttgagtgttagagatagttagagatttaatataagattattagaggtttaatatacgaaacttaattagacttagcatatgtgagtgttagagatttaatataagattattagagatgtaatattcgaaacatatttgattgttagaaatttaatataagattattagagatgtaatattcgaaacttaaatagacttagcatatatgattatttgagttttaatacaagattagtagagtgttaatattacgcttagcaaatatttcttctatgaacagatggctgatcgtgatgaggaacagatactgtacgatacaatcgcatcgggaagcagctagtactggaacgaagaagaggggaacgaggatccaaaccagtacttgaacgaggaggggaacacggagagggatgcagaggggaacgaggaggggaacgtggagagggatgcggaggggaacgaggaggaggctagtggaagtcatccctccgctggacagaagagggcatgcggaaaacgaggtgccgcgaagaagatagagggtcggcacatcataactgaggtggacgcagatggccgacgtagtgccccggcacaagcagccaagaattttgtacgccacagcggttgggttgtgagggataacgtgcctgtcagcaaggtgtactggcgcagaacaagggcacgcaggggtgatgacagctttgtcccggaatcagagaaagagatgctgtggaccacaatgctcgagacgttcacgctccctgcaggtacagagaacatagtgaaatagtggactcttaagaaaatggcagaacagttccagaccttcaagggagatctgtaccagaaatacatcctgaaggggcagacaccgaacttcgacgtattcctgaagctatgggatcactgggacgagttcgttgcttacaagacaggtcaacaagggcaggcgatgatggaaagaaacaaagaaaatgccgctaagaagaagtaccatcaccacttggtgtcaggcggctatagcgtcgcgatgccgaagtgggaggagatggaggcaagcttgcttgagaagggtatcgaaccggccaccgctaaagggcctgatcgatcgaagttctggtactatgctcacggtggaatgctcaacccagttgatggctccttggtcttcagcgatcagatacgcgaggctgcgaatcgactaacggacgcagtggaagcctcttctcagggcatgttctgacccgacagagagaaggacgagctgtcactcgccctacagactcccgagcatctaggacgaacacgagggaaaggcgtgattccctggaagatgggattcaaggaggacatccacacgtacaagagtcggatgaggagcaagagagataccgaggcgaagattgcagatcttgagtacagggtatcgagctacgagctcagcatgcaagaggaggtggcccggaaggtggatgaacgcatggcagcacatcggtcacacgatccccagccgtacatacctcctccaatggtcagcccatcaggcaatcatagcagctgcgcctcaatggggcaggtagtatcacatagcatggacgccatgcaaacccaggacgaaaccacctgccccgttgatgagatcacgcaacggacaccatgtgagctgcatattcccttcaagaacttatcaatcaaggtatactcgatgtaatatatgatttttgactcgtacattccgcaagttgctacttaggttgattactaatagataacctctcatcacgtgaaggtggcgttgggaatggccatcccaacggacatttcagggacttaccactgcaggccgattccagcaggatactcgagggttaaagttgagctggtggaagccgtgtacgaggacctcgagttggactacccaggaggagacggtgagacgcatctacgagacacaagccacaccattatactatggcgcaagcggtacatcatcctccctgggcgacaagcggcgtctcgtgcaccatctcttctggctccgccgtctcctcctgcaccatctcctccggctcctccgccacctcctcctgcaccatctcctccggctcctccgcctcctcctgcaacaggctcctccgcctcctcctgcaccatctcctccggctcctccgccacctcctcctgcaccatctcctccgcctcctccgcctcctccaccgtgtccgcctacacctcccaagacaaggtctcgccaagctccacctcctgccagcacaagggcaacgaagaaggccaaagttgacaccaccaaaaacaaggagccaccgtacggttgcagtcaagaggagcttgacgcttatgtggcaggagaagtgaagaggcaactcaagtctcggagtcttgaaaagaagatacatattgacccgagcatgaagaatttcttcaagggaatgtccaccacaaacaaggaggccttaaagctatcagactatgaccgaacacttaggaaagcctattacaagaagtccaaaccagttcctcagcttggagaacaaccacaccaagtggtagagccgttggtgaccggcgaagactttggcataacggatttcatttcggacaccggtctaaccatcgctcagtaggttggaggcgcaccaatcccgaaggcggaagtggcatacaagtttgaactcagtaaaccgcttgtcaggcctgagcagctgcagtccctaccgacacaaatgtacaaattccatgcacggtacatggaaatgagcgccaatggtagagagatgttcggagcgaggatcagaaaccccgacttcttgcaaggagaagatgttctatggatccatttcaaggatgtcttcgatctgtaccatcgggacgccctcgacgtctctcttcttagcgcatggattttgtaagtatctttgagttcgatttgtttcattcaataattagctcctggcatatatgtaagcaataataatttcctttcattgttgtagaatggagattcaaagggcccgacagcgggggttttatgatactgggttcatcgtccctcggaaaatcaacaccgaaatgctcgacaagtacgagaaagacacagaggacaatctcgtccatctcctaacgcagcagcatttcaagacgttcatactattgccgtacaacacagagtgagtttttgttgtcgtttgaacaaatttcattcccatacatataacatgtatattctgatatttatctcatctcacgcatattctagattccactggtcctgttctttttcgacttggacgcatgcagagtcactgtgtacgactcaatgaataaaaaggagaaggtttttgacaaggtcttccaactgatagacaggtaatataatgccatctattccaaagtcgcgggactctgttgctattatgttgatctcgggtaatatttaattaatcatagcttgcaactgcacatgtagggcttgggatcggttccgtcaattggtccgcgggacttggaaagaaaaacttggacgaaggtttcattttctagtgagtacatgcatgatccaaaattatattgaattgaatctctagttacagttaatataaagagtatattaaatctctcatcgtttctcatgtagtgtgcaaagcaggacaagggaactaacttatgcggctactacgtatgcgagtatgcccactgcctatcaaaccaaatatacaccacacgagagctcgatgtacgtatacataaaccattcaaaatttcattgcgtatcgatttgttaagttgtttattaatttcatatattgatatgtcattatttttcgaatgatagcgtattcacatgagggaaaaactcccacacaaggattttatcatggctgttcaagaacaactgatggggttcatcaacgaagaagtccttaatcccgatgatgaattctactatgacggatcgataattcgtaacgtctgtccttcctcttctaacgtaacgcaagcgtcgaagtcgtagctatagctagcgagcaaatgaattgtactatacatgcatgtatatatatatatttatatatgtacgtatatttactttagtgtcaatatatattttggtaacatatatgtacacaaaatgttaagtgctttaaattataaatatgtgtgtaatatatgtatttatacatatatacataggcatatatatatatatatatgtatatatatacatgcataatatatatattacaatgcatatatatgtattgtaatatatatatatatatatatatatatatatatatatatatatatatatatatatatatatatataatcaaccatgtagcaaacagggccatgcaaataaaaaaaatggtacatagatctttagtccaccaaccgggactaaagatggatcagccggccacgtggctgaccgatctttagtcccggttatttcacccgggactaaagatcgctatctttagtcccggattcgtagtcccggttggacaagcgggactaaaggggggttacgaaccaggagtacaaacgatttctccactagtggtatctgcatattgatcagtgatttgagagagagatgagaagagtaataccattataatgtgagatcagtagtagttgagttgcacacagctcttgcgctaagatcccggtcttgaaataccttgggtactctcgttaacctttagttagtgttgttcacttgctaagatcccggccggccggacatcgcttaaatatacaatgcagaacgatttccagtgtccaattaattaatacgtgttatgttctccattacaatataatgttctgcttttttggacggattcgtcctcagccctttccaacaataatatctagttttataaaatgcatgcactctaacatataatcgttataacagaaaggtaatatacgtatcatacatacatatatacaagttttacatactcatggtcggcgcacagatgtcaaaaaaaatataaaaaagttctactgctactctcagtcaagaattgattgtattttacccgtaataagaaagaaaaaatgacaattctatgagtacaaattcattagaattttctattccccgctgctctttatgtgatgaattactacatctgtctacacatataaaggattccggggttcagatttaatccacaaatatatataagaaattctataatactagttccccccaactaatcacccctcatttaatttccacccaatataccccaaccatatatccttccatcccacatccttaatcctaatctctcaaaaattcctaggtccatatatgtatgtatatatatgtatatgtatgtatgtatgtatatatgtgtatatatgtatatatatgtatatatgtatatatatatacgtatatacatatacatgtatatatgtatatgtatatacatatacatgtatatatgtatatgtatatgtatataggaaaattatatactactactgggagtagctactccctccctgtccgccaccaattcaattcgtttgcctagataacgataatgactattaacgggtttattgaatcgaatacttttacccgtattttttttccctcagggtcaacaagattgtttctgttctgtagcagattcgaaaattgaatcaagaatcctgagtttgttgtagatagaattttgttcggagacagctaaccagagatatttcagggtggttttttcgctctttagtttgcttatccaaagcgagaaatcaggatgattatcccatcgagcagaacattatcgatctaaaatcgttctctgcgttttgagagttcttaacccatctcaactcagattagtagcctcgccggcggctgcgttgcagataacgttgaaagctctagcatggagaactccagttccaaggtttgttgccatattcatctgttattttgcagtgaatgcggcgccggccatggcgacgatgaacagcaccaacccgacattggtacggtatagcagtgtcaagctgcaggctgccggagtggagcgccccaatcttaccggagaggagcgccccaatgtgccgcgtgcacgccgagcgccccaacgccggcgccgtcaaagctcgcggtagccatggatggattttttttcctaatctttgagtctttttttgatcgtatctcttaatagtttgttttgtttatgtttttgcatttgcagcacctttgcagtcctgcagcaggtgcgaatgtttcaggtggtggtggctctagttctgttttcactagagcccttcatgctgctcaagcaagaaagatgcatcagcggaagcagctacctggttctgcagtatcaaattccaaaaaaacaagtggcatcaagggtaaaaaggtagtacaagaaaaaatttacaccaggtgcactcctgctattctctcagatctgttctcaagttttggtgatcagcaaaaagagctagtgaaacagatggggtttgatgggttgctttccatgaggctgactaaactgaacaagcaattcggagcatggattctgtgcaagctagacccatcatcaggtaatctgtttacgggatctagacatgaaatttgtttgacatgtgaggatgtcagcctacttttgggaatcccttgtggacggaaggagattttgcctgcaataaaaaacgaggtaaaagatgttaaggcttatatgtatgaaatcttcgagaaagattcctttgatggacttaccattgtaacaattcagaggatattggagaaaaaatttaacaggacgatgactgttcacgaacaaattgtattcaagactgcttttataatcttcgttgtaaccaaattcttggctcctcaatctgttaacaatcacatatctataaggtatatgaaggctttggttgatgtagaaaatattcacaagtacaactgggcggaatttgttttgcatgacatcaaagatgcagcagcagcattgcaacacaaaatacgccatcggaaaagcattggttacatcaatggctgcattatactacctcaggtgaaattatcctattattcgttcgaattatttgccttttactttctaatatactcgcaacatctttcacatgctataatttatactgctcagcttttttatttggacaatctggatttcgggacggacactcccgagcaggaaaacattccacggattggcatgtacaatgactccatgatagcggaattcattgagaaggatgtaattctcaagaaccggaatcctttccccgcgtatggaaagatgaaggtaaaatcaactctcctgccggtagtatattcttgttgaaatttctcttctgcagaaacttcagactattgacatttttattgggtttcagctgcgaaacaaacatgatgaaaaatacaatattggccatcatacgggtgcaatagaggtgcaatctcatgtagtttgtcaatctattcaatatgaaaaaaatccatttttctataagaattgttgatatatctgtacacaggctatccatgtggatcatacctacgatgccaggtctgacatcgagcccccaagctttaatctaggaataacacaagatatcgaagaagtaaacatggtggcatgtaccccaggtcatgacatatccaatgtggctgaagactctgacaaagaacaagaactcaactttttagcacgtaccccagatcagccaatctcaaagtcagtagatgcctctgacaaatccggagaaggtaatgcagtgcacaaaactccctcttcgcatagaggtaatgatacccacaagcctgtatcagtttttcattttcattcataaccaaccacatgcacataatatgactcactcttactgttttgactcataataggttaccaacaaacaaaacttagtagtttctctccgtactctatgttgaaagagacgagtggggcgtgaggagtacgcatgtacaaagctcccacctaaatccaagaggagaattattggcggtccttctgatatcctattcgatcggccaaagaggtcgattaaaccaagccatttggtgaaatcaccatttctgagcaagcaacactctttcgtcaggcatgaccagaaggcacttgatgatttatgcacatatgcaatttcaatcgctgatgcagaagctcttaagtaagccacctatctgaaacacttgatgatttatacacatatacaacttcaatagcttatgcagaagctctaatgtaagccacctacctgaaatgttcctttctttcaccactaattgtaaagatatcacatttaacaggaaaatctgggttcacatctcccaacctgtccctatgtcattaagcctacatgacatacaataggctattcggctggacactcaaatgcaagaagaaacattcaatgttgcagttcaagtattagtagcggatgcgatacagagatttggaggaactgattttgtaggctggagacatttcttaaatcaagattttgcagtaagtgcttccaattactctagatcgactatttcaatttttaaatatggtgtgttttaacataatatggcgctgtagatgtttgcaacagctggtgatgaccagtggaacccagaggaccatctcccctcattcaaagatgactccctgataccatatgtcgtacctagttgccacctggtttgataattaacagcatcttgaaaaattcagtacatcaagtgcaaatgttcaggccactaacttttgcaatgtcaatattaatttgcagatatttattccactacttcaaccactgcactattctctatacgcatttgatatggagaaaaaaaatatgcattcttgacccactgagagacgcctcgaaaagataagaggatacagcagaaagacacttaaaaacaaaatttcacatttcatctgctctgaaggagtgcatgaagcttgcatttccagattggggcgaggatataccaaactgggtttctaagttcccttcggtcatcccagctttaaacaacaagttccagttcatgctcccaatttgatccaaattaatttttccattctactcatttatggtcattacaataataacaattttggtaggctggattgtgcctttcacgtgctctactacatgcgaaactgggatggaactcgccttgtgaaccccccaaaatccgtgagttttctgtacacactaggttcaacttaagtttcattgaagtagcttcctttataataaataattttctatattaacaacaggatcaacgagatcttcgaaaggaatttctgtccaacttattgtcattcagaaacaacgaagctattctgccggacttcgtcgttcactgcctgaagttatctaacaagatctgagcagttatgcaagcatgccaaaataaacattacattcagttacatcattattatctaaaatttgttagttcccaataatatttgtcttgttcttattcaacatttttcaaggcttcatgttctctgctattctcttcccaaatagatgaatttgtcatttaccttccaactatcataaatttagattttcccaacatcaaatccatgatgttcacctatggcaaattaaatactagaaactaattacatcttctgttgccgtacattacgtgatcagctctcctccgaacttagagagcagatcatgccatgatccaaatcagtgcatgcccagcgaaaaagagacatgttctgctgggcgaacatgtctataacagtcatgttttgctcggcgaaaaaaagacatgctcccagagcagaacagtatgccaattgatttatgctaccacgaggatacatccc

SEQ ID NO: 6554 - DNA, 2061 bp, Oryza sativa
atgaagaggacacggatgatgacgatgacgatgggtcggttggctccggcgtacgattacgaggatgacgacctggatcccgggaatcttgtcgttgtctctcgctgttatctcggcgccgatctccttcgtcgtcgtcgttgcggcgatggccatgaccagtattgtctggcccccgccgttcgcgatcgttgcattctcggtcctcgttttggcggtctcctcgatcatggtgccgtgaagaaacatgacgccgagagcgatttgcgtcgtcccgtgtgcgccgtgcttctcggcgaccgttaatttgatctcgaagatcgccagtgccacgaggtggaggggtagcctgtcgaggcgattccctccgctccggatcttcaccattggggttgccgattggtggctgatcttggtgtgctgcggtagcgacctcttcgaacgcattgctgaggttggtcaccgactcccgtaattgttctgtccaacgctcgaggtcgtcattcagaacgggatcgtaaggagtttccctcagtatagcttgaatagccctgatgtgctaggctggagtagtcgattgattcgccgcttctgcgttggcttgcgctgacgtgccaacgtcatcgataactagtacctcccgcggcgcacttgttgtcgatgacccgtagtcttcgaggagatgtaagaccgatggttcgtgaggatcgagatcgattaccccaacgaatcgatctgaggctggagtcgctccctgttccttgccgttatccctggcggggacgtatgacttaggagacggggctttcatggcgccgaggagaactttacagctcgagagatcgtgattctttgtcttgtggataggacaatagacatcccgagttggagaaatacgttgaattccacgttctttgcaggcgcgaatttcagcacggacgttgatgaatacccagcaatcttgaagggtatgtttcttggttttgtggataggacaccaagacctgatagcttcagaagtcatctttgtcggcccgtgatttacgtcggagggacaagacttggccgcatcagaatccttcccaagtttggatgtagtcggtaatccgttctccgtttcaacgggtggatttttcgacatggagccgtcttggtttgtagccactgcgttctagttttcagtcattggaggaccggttgagatcggcatcgtggtgtaaaccgggaagacgatttcgcccacttgagtccataccagcatcgttgaagtcgagagtgcttggctggagctggtgttgacgttgttgtcgacgaagcttgatggcatagtagtagaaccttgagtaccaagtgcccctacctggcgcgccactgtcgacgggtgatacccgtagaccggatatagagggtattggggtacgctggtacaaggatctacgtagtacgacatcgagcaatcaaaagacaagaattatactggttcaggccccttgacaggtaatagccctaatccagttgatatggtattatacggtggaaaacacagcttacaaaggaaaagatggaacttgtcatatccggcgaggttgtaatcgagttgattcgactagctctcgacgacttggctcttcgcaggctccggcttcgtaggctatgtgggttgtattggctctgagattcgatcccttatgccctccccgaggggtcccttttataccataggtctgatgctctccgagtaggactcgaacacaccagacctagcacgacacgtaggtaacccagttcttgtccgagaaggactcttcccatttgttgatttcgtgaaaagtttccttagattatgaaggaaatgtccgcgtacgcgtgggtatgccatgtcgatacataacgtatatcgaagggtagagggtatgccagacccgtaaccctgacagtagcccctgacttctactcaaaatgaactcgtgcgaccatttgcgacttcgggtgtcgagaacgttatcattccaggtgcgaggaccacggagatgacttgtagtcaagcatgccgtttgaagc

SEQ ID NO: 6555 - DNA, 2815 bp, Oryza sativa
tgttataatatgacagactagtgaattgaatgtacagaccagtgttttgtatatgagcatcttctctcttaccgactccgatcagtcagtttgtagagtcatacactctccctagcccccagccttgtcgtcggagaatcgttctcggatgacaaggctcttggacctttgacctgcctcggttgaacaagcactgatcctagcccccaaccatgaagttggaaaactcaatttccgattacacggcttggttaatacgcacggcgagaactcttacacgaccagatcttacatggtctttcgtctctgaaggatccgacaaggccttatcggctctgggcgtccccagccgaagttccctcaggttcctcggaggccttgtcaagacggcgtaaagggacagtacgataggtttcaatgctaggtgtcttttgtggtaagggatctctgggtaaaacacttggcgatcttgtgcacctaatatcaactttgttgaagcagggtaatgggagaatcgctacacccctggtcgaggaccgggtagtagccgtaacccgaccacttgaagtggaaatagtgggagaaacgctacatcgctggtcgaggaccaggcagtagtcgtaactcgaccacttgaagtggaaatagtgggagaaacgctacatcgttggtcgaggaccaggcagtagtcgtagctcgaccacttaaagtggaagtagtgggagaaacactatatcgttggtcgaggaccaggcagtagtcgtagctcgaccacttaaagtggaagtagtgggagaaacgctacatcgctggtcgaggaccaggcagtaatcgtaactcgaccacttaaagtgaggcgagagagatcactacgttttactggttcgagaaccaggagtaggagtctcttaatcacctataggggcgctaaagttggtttattacatgtgcatatcatgtggccagcatgactcacacacccaacttatagcatatccggatgtccgttcgcaatcatgtcgggtgatcaagccgacgacgttcgcgaggaattatccgttaacatccttttctcgagtagtccagcgatggccggcgctatgagataggtcgtcggtcttctttgataggttgggcgcgacgactctgcatttgtcgagatcgttctcgataatgcggtgtactcgaccacgacctactcgagtgctcaattgttcctgaaaaatattttctagaaggcaagatatatagcagataatgtcgagtatgtactcaaaaaaaactgcatggatcttctagtattatcaggatataacgagcagatgtaaatatcaggcattatgtaaaccgtaaacaagcatgatttatacggaagaaaacagagcgagcccccagcgttagatcgtagtcgatttaacatcggggacactcgcgctacagatattattgtataaagaacatgctctgggtaaacataataaatcatggatctgataatgatgtatgatatgaataggtacgataaattgcatatgaaatattgcgtacctttgtagatacatgccggatgtatctacgaaattagtagatcaatttgaaaaaccaatctaccaattaccttattgcgtactcgttggacatcatatgatctgacatcttttggtacgccgcgtatcttgaggcttggatgatctcgatagaccaagttgtcgatgacgatgatggttctgatctggttaggttggatctccccacagccgaagtcgccgagtagcttgttgtcggagagtccatctcttaaacccatctcgtcgaaatcctgaagcaccaaaatccccctacctggcgcgccactgtcgacgtttgatgtcgcagttctggtatttgcatggtatggggatcgtcggtgctagggtatacgcgagactgaggtaaaagagatggagacagggatttttatacaggttcgggcccctgaattgtcaggtaataaccctacatcctgttggccgaagccggtattgctcttattcatgataatcacaccagtacaatatttggggtagcctatctaactgttgtcgacatggcggtctgacgatttgactcgtagtcgacaacagggtagccttcctccttgaatccgtgtccggcgagatcagagatagcgctttcatctctcctaacagtatccggagacaccgtaggggactagccgtgcttatctctgaagtcgatatccggcggcatgtcttggcgtatgtaggcttctatgttgattgtgttgggtgttgatcctctgtgtatgttgattctcccgttgggcgctgatcccgttgggtgttgattgtcccccctctcctcctaggggggtttgtatttatacccatagttgtctccttgagtagtccttgtcgtttccatgtagaactctggttgtctttccttatccggaactccctcgaggtcagtttccgtataagacatggtatgtggtggatcctgccgagatttagtcaactactattaggtatgtggtatccataaccctgacagtagcccctgacttcgatgcaaatgaacgagttcatattctcaaccgcagactttggaggaactgttatcgagctcacgtgaccgttctcggtgagtttagagataacgttagacttcctttatcagcctcgtgcgggcaccgaatgagtttgcctaagtcaatctctgatgtcgaccgagaaagtacagagcgtaccactaagtctcccgctttgctgtaatcaaaaatttggattgaagtcaaaaaattttatctcgg

SEQ ID NO: 6556 - DNA, 4141 bp, Oryza sativa
ccatcacatcataatgagaggctttttagcctctcatcatagcaggagtcggtttatccactctggtcaaacaggagcctagaagtcttcatcccttaaatggcgactcacaggggcaccccccgtgtcaggcggcaagatttgacgggccccatcatcaagacaacgtgcaatagacaagacatgcatttaatgcaaagattgtaatacttctccactaagttaggttgttgggcccatgtggtaaccccttatggtataaaaggaggtccaggcctacttagggagggggtgttttttggacggatagagggaggatgagccattttagactctagagcagtctcttgcccctgatgatcaacaccaccttctactccaacaagaagatcttgtaacccccaactcaatgaacatagcacatgagtagggtgttacgcttcatagcggcccgaatctgtataaaccccttttgtccaatcgtctttgaggggcctacctaaccccctcaagatcacatgtaacgctccgcttttcgtgagtcgttaaaaactaactcggcaaaatcctaattgcgaaaattttcgttctttgtgtgagagtctaagttgtgccaaggatcccaatttaatcccgttgttccctctcatcgaaatcaaaatcctccccctcatccaaattcctcttccgattcaagtctctgaaatcaaaattctgaaattcaaatccttcctttgaatcctcgccaaatacttctacgaatccagaattattcaaatcccgcctcgaatcctttccttgactccaccctatgttcccgagaacaaatacccaagtattccttttgaaacttttccatgactcctccttgagtttcccttgatacatccctaaaccctcgagttcgaatatcaaattgaattcgaatccaaaccctaaatctctccaattctatccaaatcagttttctctgtaaaagtctactttacctccctgtatttttggatggaccgattttcctcccccggcccatctcccctccccagcccatctctctcctttgccatctccctcacgtgcgctgcacgagccgtcgccgagagaaggatctctctctctctctctctcgttttctcgctccctctctgtttctctctcgcgccgacaccgcttcccgccgtcgccgcccaaaacctccaccgccttcgcccattcccgcgcgcgcctcgcgaggtggccgaccggccggtcgccgccgacgccatgcgctgccggcttgcccccgctccatgccaaaccgaccgccgccgtcatcgtcgacgtcatccatgcccccccccccccccccggcacttcacgccggacccgttcaagagtgggagaagcaagtggccttcctcttctcctcctcctcactctccctctcctcattatggcaagggaccaagcccctttttccccttctttttcccttttccgaccactaccggtgtcactgcctctgcgccgcttgaccgaccacgccaactcgctctccttgaccgcgccagcccgcgctcccgtggttcgatttccgccgctcgatccaccgccttcgccgcccaacgcatccacgccgtcgccgctttcgcactgcccacgaaaccgccgctgccgcccgtgaacaccagccgagctcccttgaccgccaatgtcggtttccctcctccaaaccgacctctcctcctcgcctataaagcccgcgccctcctctctcgtttcatctccgcctcgctcgaaacacccgcgcctttgttgccggccgccagctgctcgcccccgccccgccgtcgcgaccacctcgccacgactccctctgcgtcgccaacgttgctcctctctcgccggtgagctcctcgcccaaattcttgccattgcatcatcttggataagccccgagccgttcggttgctcgctcgtccccctaaacgtgccgccccgccgttgctctgcttcgccgccgccgtgcccgactgtgcgccgccatgggccccctcgccaatccctcgcgccaccaccgtccttgagctccctaggacctccccaaaccattccctagcgccgtcgccgcccggcacggcctcgccgccattgccgcccgctcccgaagaccgcctctcgtcgccagccaatctcggtgccgctccatccaatccgacgccggaaacggattccttgaaccccggagatgctcccacccctttgaatcgaaccctcgtcgtctcgtcgtgttttccccttttgctctccggtgattgccgccgccgtaatccaccgtcgtcggctcctctcgcgtcgattcctctcgccgccgcgcgtgcgtcgccggtgaccatcgggtcccgcgtccccgcgtgcgcatcgcggtcgcgtaccgtttcggctaggcccgagtccgcgcccccttgtcccttccctcacaagaccacatccccgatccgacgagcttggtcgccgccgccagccaccgtcgtacctcccctctcaaatccgtgccgttaaacggattctccctgacctcctctagctgccggcggtagccgctcgctccggttcaccgctgctcgccggaacgcctcgcgcgtcgtcggccgtccgatcccgggcgcctcctcctcctcctcctcccctttcgcccctgcccgcgtggccgaccacgtggcagccacctcagccccgggcccgcttgactgggtcaagtcgcgcccagtcagcctcctccctccgtcttccctcccgtgcgcgcggtccacggcaagccgtgcggctgcacgtgggcccgccgccatccgtccacccggcgcgccgcgcccgaaccgcgcgcacccgaaaccctagcgcccgcccccgcgtgcgccctccccaccgtgaacccaaccaccgccatgtgggtcccgcgcggtggaccgcgcccaccccgtcgggcctccctctctccccgcgcgccctaatgggccgtctccccatggccgcgctcggcccaatggccggccaagccttgtgaatctctcgagccgcgcctaagtcgcccgaggaagtctaaatccgatccctccttccttttcttttccaagggaattaataattccttttccttgtccagaaaatccatttagacctccaaaattcatatccctcgatccgtagctccgatcgcctccgttccacttccagtaattccgtaaaattgagacctatttaatggcactactaataggtctaaataggatctttcttttggtcttttgtttaggttttcgattgtttgcgtatagttgcggttatcggattttcgtcgatcgcgggttttctcgaagattcgtgaagcttcgtgaagaccttgagcaaggcaagtcaccctttgatcaattgctcctataattgaaaagtcattattattttatttgcaacttgcattattagaatcacacttaacttgcttggcctcggtttgcgtgccaaaccgacggacctacccagtagtcgcactaatttccgtaggtcgtactaccctgtttccttgtcgctccacccttgtggtacctcggtattcgtgctctctgagcgcgtataccaaatatcccacatacatcgttgtttgtcgaaaacttgggaaatgggtttgtgaagccttcaaaacccgacatgtggtgtcggtgtgtttgaaaataaaatgaattgtgaaaactcgcgatgcgggggttgtgcctatgtggcactgtcccgtattcgcatataaggaccgattcctgtgggaaactcatcgaacataatcaaagtgcaaccacaaggtggaatgagacaccctggctaagtagctagtcggttcagggaaacctcgcatgccaatagttgggaacgccggggcggggtcggttggagccaaaccgggttcctggtaatgcaagaacgagaagcttgctgaattaccgatcgaggtggttggagtttgattggtgaacgcctaaaatggcctatgtttatgtgaggatttgatccttctatgtggcatgaggtatccctaggtcggcttgggaaaggctttgtcgcgaacctctgacaccggccagtgtctggagtaagttcgggtctgtgggtaaag

SEQ ID NO: 6557 - DNA, 5398 bp, Oryza sativa
acgtcgtccgcatcgtcggcacgaggagcaaggcgcagctcgcggtgacgctggagcggtacaggcaggagcacggcaagggcatcgacgaggtcctcgacggccgccgcggcgaccagctcgcggcggtgctcaaggccgcgctctggtgcctcacctcgccggagaagcatttcgctgaggtaaattaaaatcgaacgtcctcgataacttaaaaacttgcttcttcataaccatcttaaaaaatactttctagcaaatccgtttttccaattggcactgaacgtttaataatttatcactgaattcacatatcatgagaacagactataagtgataaatattaatcatattttaaaagtgacaaattgttaaatgtcccgtaattcaaaacgcgccttaatactacagaacatattggagcaaagtttagccgagtttagttccaaactttttcttcaaactttcaacttttccgtcacatcaaaacttttctacacacacaaattttcaacttttctgtcacatcgttacaatttcaatcaaacttctaattttagcgtaaactaaaaacaccctttgactcaattgtcttttcgcgtcttctttaggcgaacattggagtaaagtttcactcaatattttttttttctcgtcttcttcttcaggtgatccggacatcgattctagggcttggcaccgacgaggagatgctgacgagagggatcgtgtcgcgggcggaggtggacatggagaaggtgaaggaggagtacaaggtcaggtacaacaccacggtcaccgccgacgtccgcggcgacacgtcggggtactacatgaacacgcttctcaccctcgtcggccctgagaagtagccatgtagcagcttggacattttattgcttgctcatttgatttgaacaaaatacaccgtgtgatgttgcagttattagtaaaatgcgagtaggatcgatgttgttttcgttgggtggattaataatggagcatgttttatcgcaccgtggtgtatccaacacttgttttcagacgatactatcgatgtttgatcagaatcaagccagaggtgcttgaaactagtgacaataaaaccaaagaaaaggaaaggtacatgttgcatccggagtaccatggtcatcaatttgttttatgcacattactgtggcgattctcgactggaataccacgaattgaaaaaagaacaaacaagccaaacatctacttggttactacatcagcaagcagatatcatctcacttcttccttgcagcaatagctgcaatcccaccaaccagaagtccaacagcagttgtggcgatgcctattccgatcagaccatctgcagataacgcatgcagatgtttagacagaattatcataaaataagttgttgtcccagtgaaaatgaggaaaaataaataaatgttcgatttgtgagacaatccatcacgtagctcaatacaaaaccaataatataggatataactggaacaaatttctcaatgtctccctttggcaattttatcttctatagccttcctgagagacaaagcctgcctccaatcaggttgaatctgcaaggaaagtaagttatatagattaattcaggagataccaagccacaaaccaaaacatgttgaagcacaaggaaagcaagttacatataaaactcacgtttcagttggtatacagaacaagcacaatggttttacaaggatgctcacatgaaaatgttcttgcctactaagattaaaactttcaatcccatttgcattgtgaacataggtcaggcaagaaaacaatacaagcactaggaagaccaagtaaacattcccatgactacataatcatcaaaccaagcaaactcaagaaaacaatgctgagcaaatcaccacgatctgtcaacatatagcaaagcacagcacagcaagaaaaccaaaatcccgaaaaacatcttcagcggagttatgaagttgcaattatgataaagatgagcaatagcatattggagacaagcaattttataatttcagtttcagccaatgcccctaaatctctcaaaagatgcaaagaatagtaaattctgaaaggggctcgatgcattagcagctaaggcatccccaccaagcatgagctgaaaagcaatgagcttaaactcattaaccttgcttagctggaattgggttacaagtaaaagggggaaattaacgcctcgtattcgaaaacctattggtttgcctaacaacctttaaaccttggggtcgacttagtccgggggagggcaaatatttttaattaccattccgaaccaccgaaatatttcccaagccttccccattgggaaaacccagaacccttccttagggtacccaacatgtgtcacctttggctgtgaaaatccagtgaaaaaggatgacaagcttaaagtcaacctgacttccattgcatcatatggcacaaaaacagactattacgctagcaatcgaacagacttgcacaaacaatttcaaagtttgttttgcagtcacctaagaccgaataattcaatgcaacactctatcctgttttgatagcacaaaaactaaatgacatgaaagttgcttccaggaaaaaaacaccaccattaaggaatatgaattataccaatgaatctacaagctaaaaatttgcacacatacctccaaacaacggtccacaagctgccgacttcttgggtagtcaccatttctgtagtgtccaaccgccagcagatatagcttctccctagtctgcagtgggctgttggattgacctaatgatgctgtgaaaacaaaacgaaattgatcaaaacagattaggctgcaaaaattatgtttagattatcgaaaacaaaacaagatatgagaccttcaagcatgcctattccacgatttacatcctcctggttcttggaatgcacgagggcccaagacagcctcataatgctatcactcttctgctcttcatttgcagcctcagctacctccctttcacagccctaataaagcatacaaccatagaaactctgagcgcgaacgtgtaagcctaaacattatttggaatgtatctagtaacaaacagggtaatgatttttttgtaaagtgagactgatatgtgcattttcttagccaatagttgcagtgatgattgaatcagagatagttccagtgttactcttcagattgtgaaccgctaaaaaggaatcaaaatcacacagctcaataaagagaagccgccttgactcatccgcgttgcaacaaacaatcacgcgagctaatcacgggcagccgacggcagcaccaccatgatggaacaaacaagccactgtaaatgggggcaggctgccatgccgcctaaactaagcatgaaaaccactccacactcgaccattcgctccccagtacaaccctccaatcctcggagttgctaatcctcaagcaccgcgcgggatctcccgctagaactaaaacctccccccattgaataaattaaattagaaattagagtactagaaaaaagctccccacagcaggggattcgaataggagcggagagaatggattctcacggcgatgatgtcgcgggtgcaccaggggatggtgtcgccgccggagaagaagctccccaccgactcgacgagcttcccgatcttggcctccatcggggagggggggtgggcaggggatcgggccgatctggaggaggagggagaggagagcaagcacggcggcggtggcggagggcgaggcgacggggccagcagcggcggatgcgaatccggtgggtgggaatggatttgggtgcaagtcttgagtcgcgtcgcgtgggttttgtattgtttgttcgattcgctgctgctgcttcttcttcttcggcgctaagaaagaaggggaggagaacttccggcgacttctgagttctgacttctcgccgtcgcacgtgggtcccgcgtttaagccactgtttaattcaacatagtcatattataatctgaattattagaactaagttgaaacaaatagatagtttattatgatggattattacaatctataagctatattactataatctggtaatccattaccactataaaggtgttttttaaatattatgggtgtagctatatttatagcgccatatttttcatcaaaaaatagttggtatgtatttacattgtaagtctctaaattacatatgtaattttagtatatttacaatgtaagttctaaaattacatatgtaagtcttaaaattatatattgtcagggttacggataaggtataccctctacccttagatatacgctatacatcggtgtggtatatgtgtgcgtatacggatgttttttgtatgcgctaaggaaattcatcacggagtccacagatgaaaagattcctaaccggataggactgggtcgtcactgtatcatgtagaatccgatgtctccgagtcctacttggaaactacctgacctgcgatataaaagggaccccccgggaggacctaaggcatcgaatctcacatccgagacaaccaccatagcctacgaagccggagcctacaggagccaagtcgccgggtgatctagtcgactcgactacggtctcgtcggtatcatcgagttccactgttccctttgtaatatgtgatttccatcatataatcccatatcaactggattagggctattacctaccaaggggtcagaaccagtataattcctgttttctatttgcttaatgtcatattacgtagatcctcatactagcgtaccccaataccctctatatccagtctacgggtatcccccgtcgacaatggcgcgccaagtagggggacttggtgctcaagattctactactatgtcgtcaaatctcgtcaacaatagcgtcgaccccatcgtcaaccaaggagttccgacttcaacaatgctggtgtgtactcaagtcggtgaaatcgtcttcccgatttacaccatggtgccggtctcgactggtccatcaatgaccagaagtgagaatgccgtggccgtaaccccggacgaccccctgtcgaacgatcctcccgccgaagcggagaaggaatgtcgacgacatccaagcctgaggaagatcttagtgcggccaaatcttgtccttccgacaagaatcacgagccgacaaggacaacttttgaggcgacaaggtcctggtgtcctattcacaaaactaggaaatacaccctgcaagcttgctgggtttttctcaacgcacaagctgagatccgtgcctgcaaagagcatggaattcagcgtacttctccaactcgtgatatctattgtcctatccacaagacaaagaatcacgacttctcaaactgcaa

SEQ ID NO: 6558 - DNA, 2405 bp, Oryza sativa
atcagtctttagaattgatcaagattggcacccggccaacaactttcaaacggccacccgggccaacaactttcaaatggccacccgggcctagctgatcccatcagctgcagattttttaaacatcgaacccctttccacaacagcaatttcacaagtagtagtcaaacaaaactacactaggaatcacctcacatccgcccatgaccgtgggcacggctgttcgaacagtttgttaacctctgcagagggggtacactttacccacacgacattactaacccggatcacccagcccgtgtggatcagccacgtcgggagacctccaagctttcatgacaaggcattttcaaagccgacacaggtttaccatatgccgacgagaggggtcccagaccaacaacagattaggtcccagaccatactgtgccaggaaacccaggggtcctccccgacaccaccccggcgaatccacatgtctctcggcatcaaggctcccctgataagctagttactcagccaggggtgtcccattccacccatgtggtcgtacttgtcttatgtttggatgaaattccaaggaaacggtccttaagtgcaagagcgggaaaccgtacacccggtacgttccccggtccgcggttttggaaaattcatttagttcgcaagcaccgacccaggtgtcgggttttccaagtcttttgtaaaacccaagttttacccaagaagtttttcagattttaagtttgaaggcgatcgtcgatactcgtgcagagtgcacgattttcgaggcgcaactgggtggttacaagggaacatggtataacaattaacaaaggaaggatcaaatgcaacaaactaggtaggtccgacaatctgccttgcagacgggacaaacagattaagtgcgatcctatcaatgcataatatttttcaagcaacatgattaaattcaaatataggctcgaaatgttcaaaggtggcttgccttgctcgagatcttgagcttgatcctcgaaatcctcgcactgcgggtcttcgggctccgaaactacgcgcagaacgggacaactcaacaaacggcgaaaataaagccctattaatgacctctaagcatgccattagatagatcttaagatttgagggattttggaagttgaacggagtcaaacggatttacggttgggaagatattgaatttctaatattattggatttttggtctacaggaaaaggatttaattaaatcctttttgaaaaagaaaagaaaagaaaagaaaagagggagggaaattacacttccctcggacggctagggcgcggcccgagagaaaaggggcggctcggccgagctaaatgggccggccggcccaaggcggcccaaggcacgcgcgcgcgggaggggaggagagagagagccggtggaccgggctcacctcgcgtggtcccgagtgggacccgcttgtcagcggctcggctcaccgtgcggagggagcacgcggcgcggcgctaggatgggggagagacgcggtgcacgcgcgcggttcgcggaggacgcggatgcggcgggcccacgcgcagcctcacggctcgcggtggaccgcgcgcatggggagggagcggctaaccggggtcgactcgacccggttttggccgagctggcgccgacgtggcgcctacgtggctgccacgcgggccggcgggaggtagacgacgacgccggccgaaacggacggcggacgacagcggcgagcggcggagcgaaccacggcgatacaggcgaaagcgagcacaccgggtggttgcacaggacgaggggagacgagccaactgctcggattcgccggaggatgcccgacggcggcgaattgcggcggcggcaaccggcggcgggagaagggggaaacggcgacgaggtcacgaggggccgattcccggcggcgagagcatctacgcggctacgggaatccgatgctagcgttggattgggcggagctgcgccgagcgaggccggcgacgagcggcgcttccgagctcgggcggcgacggcggcgagcacacggcgagcggcggcaacggtcggggcggcgccggctagctacggggaggctactcgtgctactacccgagtctaaggggaggagatggagcgaggagggagaacggggagatgcactaccgtgcgggcgggcgcagtgacgagaggccgacggcgcgggagtaatctctccggcctcgggccggggaagaggaaggagtgggcgcgctcggagtccccttccgcgtccttgctcgtgccggctcctccgacacgcgcaacgacgaacggcgacggcgaacagagcacgggaggcggcggcaatggcgtggaggcgaatgggagaggaaaggaaagggggaagctt

SEQ ID NO: 6559 - DNA, 9036 bp, Oryza sativa
atggaccaacttcagttagaaataagttgagtcaccctgaaattcccaagaatggaacaaggctacccgattcagattctaagcatgaatctgaatgggtagagcaagatgaaccaggggtgtatatcactcttactgccctacctggagggactcgagatctcaagagggtccggttcaggtacacaccaaccacacagaggcaaaatatatagtcattagtcagcaaaaatcttgtctatcaatcttgaacatagtacattattcgtttggcgagtagtctatgagactagatctaacaagcaatgacagcaattgagtgattgacacttttgggcattccatttatttggcttactatatagtataatcaacttattttttgctggtcctatatagatatttggggttttaagtgtttactctttttttatggagagaacaacatgaagtgggcagtagcctctagttgagaggatcttgatacacaaaaccactattaacttactctatatatgtgcagatcaagaatgcaatgaatattacaataatttgataataactattgacaacagacctgtctaaatagaaccttcaacttgcaaaaccagatcatgtgaccgcctcaaatcaatcctgtcctgtttgagttgatgtagcaccctgtccacgacacagagccatccaactcgatttgacttgatttagcatctagcattgagtagatataggtaacagcattcagtgaggtttaggtaaataaaatgccttgcctgatttttctgccctccttggcattattgtgttctcccacttccacaagccatgtcatggatgcagtagagacctcgtcccatctgctccttgatgatagtccaggatgtagagttgtggggacgattttgggggtgaagatgttggaatgggatgctagtgggtgccttgcagggatgtgagaagggcacaccagcatttcagatccttcgggggcaagtaggtgattgttggagatggtggaggagattgttggtggtgatggtgcaggaatttgagattatgcccaccatttctggagacaggtaaaaggtaggctggagtggctgtccagatcatgctgggcttgggtatgtaagcgagagagttggaaaaggagaggacacatgggctcactgaggtatacttaaaattggtgccacaccaagtgataaccaggttggatattcctgggggtcaaaaatgttctggctatatgagttgaagatttctactttagactgttatggagctgtgttcgacttttcacactcactaattctgttatggcgcatactcactaattctatgttctgaatgcagccggaagcgtttcagcgagacacaagcagaacaatggtggcaagagaatcgggcacgggtatacgagcagtataatgttcgagtagtcgacaaatcggttggcagtattgataatgatgtacatcattgacataagaaatttgacttggtcagtcactacaaagctctcaaagctctcaccgttgagcatgggtgctgacgcggctatgatattttggttaggcccagaagaggaggggcctgctgtttgaaaaatgtgggcttgcattctttttacacgattctttcctcttccatttcccttgtgtggaatgtagagtgttcaagcagaagttatgtaaatggttagtggcagctggctaatctgtcctgtaaatgcataagcaagtgcatcaattttagactatgatcttcctgattttcctttaattggcaaatataggtgcaaaatctaagtgatgatgatgaagaatatttggtgctaattgtagattgagatgcaaagtagctttgaaagatttaagctttgttctggctgacttgagtgcctgttttggcgaaaatttcatgccaattactctgctcccccagattgaacgtcatttgtcgaacttacatggtctggatgaggtatgttttctccgtttatgcaaaattctgtactaatcattattaccccgggattcttaatagtgcgtattttatttagcaaaagttttcagatcacgctttgaacatttatctcgtaaactatacaaccaatatttttgagtacattaaaatatgaatatattagtgtaaattttatatattaattgtaacttatactagttcaaagttgaaaaaggtgaattcaagatacacctaatgaaaatgtataggggaagttatccttctgaggctaaattgcatgaatggtaaacaaacttacatagtaggtgcaaataggcacaataacttgtaacttactttttttttttgctggaatgattgaaggaggtcatccaatgtaattaagatagggagaaaatgttacgagaaaagttttacatcaacagatagctgtcgaggaaggatgtgcaccagagcacacgcctcgaaccatgtgccaactgcccaaacacacgctatagagagggaagccgagtaccgaaccggccgtcatcaggccaacaacaccaccacggagcgaagactctaaaaaacgacaccctcatgagggtcgccacgccaaatgacgccgtcgtcatccatccaaagactgaacaaggttttcacccagagctccttgctaagggaggaggggtacctcaacagtaccctcaggagagttatcatgctcaaaatagtagtcactgttggcccaaagaaaccttgggctaagatttcgctcggaacccctacaaccctaccgtcgtggtccgtcgcccaatccgaaaccaccatccaaacatcggtggcacatggcctccaacacacccgaccgacgcccctccgccagccggcttccagtcctgccaacgacaagactgccacaacaccagtcaccttggccagcgcgctgacccaggccgctttcaccacgctgcctgccggcttccccgttgaatccgacctatgggagcccgcacaaggaacaacattgcctcggcaatctgagttttccttgttgaccgaccaccgcctccagcctgccaagaagctctccacaaagaaggggaggagttccctagcagggttagcctggccaaccacaaggaagacgacctgccaccactccctagcgcgctgacccaggccgcctctgccacgctgctcgccggcctccacgttgaatccgatctatgggaccggatcgggaacctagccttggcaacctgagtcttccctgtaggccggccatcgcctccatcgtgcctaaaagctccccacaaagaaggggaggagcttcccaaacacagtggtagcctggccaaccacaaggaagacgaccccgtcgccaagctcaccggcggcctcgctgatgcctccgcaccgctgccacctcgaagctcaccaacagccacccgggccacccagcatcaccggtcgggccaccgctgctctggctttcgcgccaccagcccgagcagtgccggcctccgcgccacccgccgcgcctccaccacgccagccgctcctgcgtcggcctctacaccgccggccgcgcctccacaccacactagcagctgtcaccgccgcccacggcgccctattgcgccggccgccggatctggtggctccgctcgaggccgttgcggccgaagccgcccactccacgccgacgcaacctcagccccgccgccggtcggccgcttcgtccagccccgccgccaatgccaccacctacacgcagtcgtcgtcgccaatctccacgcagccgtcgccgaccctgctctccgccgcccagagcaacagatccgagcatggggagactagatccgtgcatgccagcgccggatttggacaccgccggtggcttttccacagtgagcgtcggcgccttgccctgagctccgtctcgccggcgccctgaccaccttgacgtgagcgagagagagaaagccctgtaaattacttatttcgaaaacaacttgtttattatgtgcaaactaggctaaatagtccaatcaaaatgatgtgccctgtaaattactcatttcgaaccaacttgtttattatgtgcaaacttggctaaatggtccatacaatcaaatgatatgacgttgacatggatgccatggaaagccagtatagtttggccacaattttcttcatttttcaaaacagaaaaaccatttggcattgagagctaactcgatgctgaactcatcatcattatcaggacttaaatgttatgtaggttacatggtagatattttagcataaatattttttttaccacaaataagaccaagaaactactgagatcacaccatgagaaccaaattacatttttttaaagagaaaaacctaaacttaagagtgatggaacatcgaattctcaatatataaatcacaacaccaatataattcgtggcatgaagcaatcactaaattagagtctacgagctttagaggtctcaaactcaagccattcgactggcagcaagatttaccacgataaacgtagcactgcagtactgctccaatcattttgatgctgattcgtacgagcaagcacacagtagatgtatacactcatatatacacgactagctaggtgaaactcccacgtggccatgtgttgctacgggcactttaggtaacaatcaggatgaaatgttttttttatagaaactagcatggtgggcccgcgcagattgcgtgtctacatcattatctttttttcctcacatactaaaatatatattttcacattttattattaaaatatattaaaagtgacaataaattttgtactaacttgaccaaactgatcaatattcatattgtagtgtatatatatgtgatagttatttaataatttttaaatttttaaatttcgttatttctaaattgtattcttatatgtactctagacttcttttttcagtattctttatttttgtcgagctaactagttgggtggcccgcgcaattgcacggctagcacctaaacaaaatcatatatttttttaagtatggttttacttaaaatttattaaatagctatctcaatgtcttaaaactttgaaagaacaaaacttatcatccccgtgtttctaattatataattttttaaaagtcgcaccagttgctaccccttgtgtcatctctttcattatttgcttgctcgatctaccactatttctatttattctccttgtaacctttaaaaattggaccttatagtttttagagtttattgtcacgttgggtttcgtttttataatttctaggcgtcccgtcaaacgttgccattatactcctctatggcccgtccactgtctcttctctttattgtcattgagattttaaaaatcgaacataattatcgtttggattcatttttactttttagaagtcccgccaaaccgtcagcggttttgccattgtacttctctatggctcgcccgctgtctcccttctttattgtcattgagattttaaaatcgaacatgattatcattgttttatttttactttttagaagttccgaacctttaaaaattggaccttctagtttttagagtttattatctcgtcaaatgatgccactatgctcctctacggctcgtccgccgcctactctttattgtcattgtgattctaaaaatcaaacataactatcgttggaattatttttttattttctaaaagtctcgtcaaccgtcggcggctctgcaactacactcctatacaccacgcccactgcttctcctttttattgttattgagattttaaaaatcgaatatgattatcaatgggatttatttttttttgctcatttgcttcatggcctgcctgccgtccctcttttaatcgtcattacgattctattatgtgttttattaacagtttttatatgtcgtatcaactatcatcgggcatgttacttaatttatctcgtcatgtgttttagatggtcttttctttcaatatttttttatcacaaattttagctatttataaattgtattcctaattgaaatcttatttttctttttctaatttcagaatttagttttttttaaaaaaaattaattcatatcttattgtgttctttaaatatttttattttttattttcaatttcagttgtttcaaaactgtattcctacttgaactctcttttagtttttctaattttggacattattttattttttattctgagttttaattaatctcgtattgggttcttatatggattattctttcaatattgcttatttttaattccgaatttcagctaattttaaattgtatttctagttgaactcttatttcagttgtttcaaaattttatttctacttgaactctcttttatttttttctaattttggatattattttatttttattctgaattttaattaatctcatattgggttgttatatggattcttctttcaatattgcttatttttaattccgaattttagctaattttaaattgtattcctagttgaacttttttttttgctaattttggattttatttttatttttattcccaattttaattaatctcgtattgggttcttatatagacccttcttttagtattccttatttttaattccgaattttagctattttaaaattgtattcctacttggactatccttttcttttctaattttggattttattttatttttattttgaattttgattcatctcgtattgggttcttatatggaaacttctttcaatattgcttatttttaattccgaatttcagctatttttagattgtatttctatttggactctccttttctttttctccgattaatgtgggaatttctaacccccacagcgaatgtgatgccttctttcaaagctgttttaataatataactagctgggtggcccacgcaattgcgcggctagcacccatataaaattatatatttttaatatgattttacttcaaatttattaaatagttatctcgttgtcttaagatttttaaatactaaaccttattatcctcatgtttctaatttctttagtttctaaagttacaacagttgctaccccttacttctgtcatattattatttatttgcttgctcgatctaccactgttttctattcattctccttggaatctttaaaaattggatctaaaaactataagttttagagtttattatcctgttggacatcttttttataatttctagaagtcccgtcaaacactgtcattatactcatccatgaccgtccactgcatcttctcttttttgtcattgctattttaaaaatcgaacataattgtcatttaggtttatttttttttactttctagaagttccgccaaaacgtcagcgactttgtcactgtactcctctacggctcacctgctgtcgcccttctttattgtcattgagattttaaaatcaaacaggattatcattgcggtttattttttttactttttagaagcccaaacctttaaaaattggagtttattgtcttgttgggttttattttcttttataatttttagaaatcccgtcaaacgctgccactatactcctctatgacccgtccgccgcatactttttgttgtcattaggatttgtaaagtcaaacataactatcattggaattcatttttttttttactttctagaagacccaccaaccatcggcgactttgccattgtacccctatacgacccacctgctgcctctcatttttattattattaagattttaaaaatcaaatatgattatcattgggtttatttttttttactttctagaagtcctgctaaccgcctaaccgattgcttcacgacttgcccgtttgtaattctttttagtcgtcattaggattctattttgtgttttattaatagtttttagatgtctttattaatagtttttagatgtcccatcaaccaccaccaatatactcctttataggcatgttacttaattaatctcgtcatgtgtttcagatggtcttttttttagtaatcattattttttatctttgacaaaatatctggtgttggatgaccttgggaggttgacggtgataggatatgcaaaataacatctctatacacatgggtttatcttggaggggggggggggggagggggatatcaaaccatggtcatattaatgtagcgtggaagcctataagatatatatgctggtgctaagtcactcgatatggattagacgtaaatgaaaccctagtttgtattaatagtatatatgaacattttttgtaagttgttacaactatttgcacctatcatatataacatatatgcaatttactctacctttgaccttgatattttgcactgaatttaacagagttgcgtgatgtcaaattgttcactaatttacgcgcatccaacataataaaaaacaaaaaataataataataaacgaattaactgcccaccagatgtttttgaacacatcacgagatagtcacccttccaaaatacacacggcagcagacgaacaagaccccaacaacacgccacgaaacgcaagcaatagatttgtccgatggttaggtccaaccgccgcgacacacacaacgttcagttaggttccagtagctcacaggtcgcaacgcccctcacccaaacaacgattttgcccttactcttagcttaactcttacacccaatactgatgactagctacttgctccaatcttattagcagctaatggttttttctccggcccccaatttcatcatcaccaattcaccaagtaattaatcttcacactaaaccgagtcttctttttctctctctctctctcacaatctcagtagtaagagccagcctctgttctagaaaccgtgcgtgcatcacagacaaagctgtgcatggtgtgtcgtgacgagcatgcgtgagtgcgttacacgctcaagaaaagtgtgttagcttagcttagctagccaaccatgcatatattcgtcacgtt

SEQ ID NO: 6560 - DNA, 3070 bp, Oryza sativa
atatgatctatgaagtcactaatcatagcaggtattcatgtagcaatatagacaatagggtgaaaatgaaggtgtggttggttgaacatcatattgataagcatgtgggttgtacctaaggattttaaccgtggaacaaccttgcagtggctttagcaataaatcaagtcagttccatttaggaattaatgaccatgtcctttatttatttatttttattaaacttgctacagtacattgtaaagtcttgacgtagaacaatctaaaacatgtatttgttataagacaatacactttagtgatgattcgctaaatacattatgaccattacttcaaaatttcaggagagaaaatttagaacgtatacctttaccccatactaggttatgttttcttatattttcgtcccaaattgcaaagatcaaatcatttcaaggatgattaatagaatgaaactatccaaaagaaaaaaaataaaaatgggcataaaataaattgaaaattgaaaaaatattgctggattttaaatcaatacttgattgaaaaattcaaacattttacaaggatggttagaatgaaaaaatatatctataattttaaaatacaatcaaacaaaaaaaataatattattgaatttgttttgaggttgtaagatatccttttggcgagttaaaataccctaaattttatcataggaaccacctccattgtttcgacacaatagtttctcatcaattaaaaaccacatgatctcaagtaattttattttagaatttatatgttgcacgggtaattataaaaatataacaagctttcaaatcacacaaaataagtttaattttagtttagaacataatatatgatattttaataaaaagccacccgcatataaatattcataataaaatttcactcacattatacgagaaggtgcacgcgcatgtgcgcgggctaactttctagtttaattaaacttgaaacaatttaactttgacatattataacctgaaacggagggagtagtatataaaaaagaagtatcaccgttttttttcttagggtattagctgtagttgggatccacacccaacgttctgtaatcggattattctactcccgtaattgggccagctcagtcctaacatgaaatggacggtgagagcaaatttaagtagcttaataaggtgtaacagcacacccttataaaaacataatgattccaaacgtaagaatgcatagtaggaagcagttctctctgtaaagcgcaggtgtgtcgacgtttgatgtcgcggttctggtatttgcatggtatggggatcgtcggtgctagggtatacgcgagactaaggtaaaagagatgaagacatggatttttatacaggttcgggcccctgaattgtcaggtaataaccctacatcctgttggccaaagccggtattgctcttattcatgatattcacaccagtacaatatttggggtagcctatctaactgttgtcgacatggcggtctgacgatctgactcgtagtcgacaacagggtagccttcctccttgaatccgtgcccggcgagatcagagatagcgctttcatatctcctaacagtatccggagacaccgtaggggactagccgtgcttatctctgaagtcgatatccggcggcgtgtcttggcgtatgtaggcttctatgttgattgtgttgggtgttgatcctctgtgtatgttgattctcccgttgggcgctgatcccgttgggtgttgattgtcccccctcctcctatggggcttgtatttatacccatagttgtctccttgtccaagtagaactagggaaaccaatatggatacaatccgagtagtccttgtcattttcatgtagaactctggttgtctttccttatccggaactcccttgaggtcagtttccgtataagacatggtatgtggtggatcctgtcaagatttagtcaactactattaggtatgtggtatccataaccctgacaaggtggtagttggatgtccatcgagggacaaaaaaatccacggtcaaatttattatttttgtttcgaattgtataagtcgaattttaacttatatgtgtgtgaaaagatacatcatatattgatctatcttgataaatttttaaaatttttaataactttttgaacgtcatgcacaaaacgaggggatgtcgagggaaaaaatccatttccaaggttatatatacactctgaggagatattgccaaatcgatcggtaaaactttggtcgctggctcgctgcctgccagagaattccttgtagacttgccagccgtcatggactcatggtcctctgatcgatcatctcgtttgtcgatcgcctccttgccgtttttctcgtcgcttatcccttcttttccagcgcgccctctctgtctgcagttagcttcgacttcgaactagtggtacatgtacctggccccttagggcttagggtgaaattgatagtacgtttgaaactgtacgaggtgcaccaggagcgtgaaagttgtgttggactgtagggtggtgcatgcaccaggtggcaaagagtaatgacatggattctcaatgtctacatgaaggtaaaccacataaatactttaaatttaaatggtgtttgattacaacacgagaaaaaagtatgaaaacatgagctaccatcttttggttattttctctgaaattgccataggattgttcaccataagaatttcaaaggaaatgataggattcaattaatcctttatttcaaataatttcatagaaaatttttctatatattaattataaccttctaaatttctatgtcaatcctccaattaaaaggggcctcattttggaggataagaacataaggcttgttttctttttttctaaaattttgacaactttaatagtatcgatgccgctacgtttagatataccttttgggttgactttaaaaagagttgagtgtccggggacatgctaagagcatctctaacagcctcttcaaattggactctccaaacacccatatggccaactcgggctgcaggaat

SEQ ID NO: 6561 - DNA, 3375 bp, Oryza sativa
tttatgattgacctagttaattccaagatgatggtcatatctacagacaggtgacctgataggtatcttatggacttgaacgtgctgattttaaaatcctttctgttagaatacccaaggaaaatgctttccccagatcacattcaagttttgaagtttggtgttagtgtagtttagagttgtctctgaatatatgcactgcgttagtatgatctataacagcgaactttacatgctgaaggccttgaaggaaggtgatgagctgatgaatactggaagacttaaacaagcattgccttattatgaaaaagtgatgcaggctgtggacttcaaggtattccattacgtaattggtaatctatcacatgagaaacaccatgataggatattttgtcatattgtcctgttagatgcattaattcggatacattttatttctcaagtatatgcagttctaaattttttgcattgctgcttcactgttatgtcctttcttatttttataccatgtttttttactcatgttgcgcaaaataaattgcgcagactgaacttcatggaatggctgctttgcagtggtccatctgtctagattcactctgcaggtattttcctttgtttttctatgtccttcccctgcattgatgtttttcaccacatatacacctgttttgacttaaatgcacagcaacatactgaatttcataatccctatttttactaaaactaggatttttccactctataaaattaatggcttctatggtttgtaattgtacgtgtgtgcgtgcacatgttcacatgtagctatgcaatggaatgggttaatttgcatattttcacatgcatagttggacttaagttgcatattttgatggaaacatcggtgccatcagtctgcttcactgcattttttaaatttgtgaagcatcttgtgttcataaactctctattttctggacatgtattccatgaaatatcttgttttgataggtccaaggaagccatgagcatgtacagcaaactcaaaaatcatccaaattctgaaatcagtaagaaagcaaacatgttcatgttcagctttcaggtaagcatctcaaatgcttatgcattccctctattgactaaagcactcaactaggctgaggacaatgcagaagttagatatatcatcttgacccatccttgaaaggcactgactatgagctaatcgtttttgctgtcatctgaaggcgatggacttcatgaaggtgaacagctcccctttgccccgtaacacgggctacgagaagtacttcgacaagtttgggggccagaagaactactacgctgccctagacgaacctgagatgggcatcgatcagatcatcccgtacatgctcttccttgtttccccaatattcttggttgcttttgttgctttgagaaaatccttccagttataaaagtcaggaagcatatgcttgaatgcttcaatctttgctccactgacgaattgattagtatgttcctcgaaacaaaaggctgaagaattgatatttgactagtatgcagatatattgacttgattagtatgtagataaaaatcaaaacttatttaatagtattgtcttttgggccggcgtaagccagctgttaggcaggctagtctgagagcctgtcttcagctgggctaggcccatgtcaaagataaaaccgtttaccaaatttctaaagtatttggaggtacggatacatatggcattctcattaagtataaagggttgtctgaatttcattttttaaaaaatcgaaatatctgaaataatctcgaatttatgtttaattctttaacttctaaattgttgtttcctttttttttaatgtcgattttaccactgctttatatatatatatatatatatatatatatatatatatatatatatatatatatatatatatatatatatatatatatatatatatatgcttgcacagtaatgcctccctccctgtggaaaactctagtagtactagcacatttgcattcttactgcactgcaaaactgaattctagcattccacgatgctgaactaatgatctctccacgccggttttcagactgcttcttcgaattctatggctgcgacgggcggcgcactggcgcccctcgtgtctggccgagtcgccgggcatgacgatgatgacgggtgcaacgacgccgccgccgcggaggacatcgagttggcgcaggcggtgggactcggggacgcacgatgagcatgccggtggtggcggcaacgagacaggaaaaatcatgctcttgtagggcggtggtaacagcgaactcgttatcgactcgttggtggagggagtgtggtggtcatccaagagctcaccggtaggagtgaaaatgggtcacggaaatttcaaatcgagcgagcatcgttttcgtataaggggtaccgtttccgaccattatttttttttggagtagctatatttatggcgccatatttttcaccaaaaaatagtcagtatgtatttacattgtaatttcctaaattacatatgtaattttagtatatttacgatgtaagtctcgaaattacatatgtaagtatctaaattacatatgtaattttagaatatttacaatgtaaatactaaaattatatgtgtaagtccctaaattacacatgtgtaattactgtgtaaatagagtaattacattcgttgatgaccaacacgtgtcatgcaaagcaaaaaggagtcgccaacttaggagcaagttgttcgattagcttatcagatgtacttgcacgaatagtgagaagattagatggcagatcgacaaactgactgtatttagcccagaaatatgtcgacataattttagcaaagccgttttttgttatacataaattttattttttaatttctttctacatagtagtaatgtcgacactgattaatttaaatgataaatatgatcaattaccgatcgatcgagcatcgtttccgaagatatggtaccaattccctattcatccttcctcccatcggcctctccatgttgccaccgcagatagaaaaagagaggaggaagaggaacggagactaacatgtgggtcccgcataaaattgactcaaccacttagactagtcaacaagctaagtcagtaaaaaacgctcttgaaactgttaagggagtcaaattgcattatttttaatagttagatggtcaagatatttaatattatggttgagggatccatacgaatcagattaaaactatatttgagggagtataagtcgacttattcatttgcattacggtgtgtatttcggattgggccaatctcataggttgtgcgatcacatcgaggcct

SEQ ID NO: 6562 - DNA, 4181 bp, Oryza sativa
agatgcatatgcttctgaaattgacttaggaagtgtcatccacgaggtacacagtgaaatcatcaccaaaggacttagccgtcctttgtcttttactccttcgaggagcttcactgtcatcctcctcagtgacatgttcatgtgtatgttcagtttgttctggtggtgtgattgaactgggaattatttcagagggttgactagaactactatgtgtatccttcattgggaaaaagctctcaaagaaggtagcatcacgagactccataattgtaccaacatgcatgtccggtacctcggatttaactattaaaaatctataggcaatgctatgatgagcatatcccagaaaaacacagtccacagtcttaggtccaagtttgcgcttcttcgttattggtacattgactttcgccaagcacccccatgtgcgcaaataagaaagtgatggttttctaccaatccatatctcatatggtgttttgtccttatttctgttaggaactctgtttaacacatgatttgaggtcaacaatgcctccccccaccatgccttaggtagtcccgcggtgtccaacatggcattcaccaagtcagtcagtgtgcagttcttcctttcagcaatcccattagactcgggagaatagggaggcgtcctctcatgtataatgccatattcctcacagaataagtcaaactcttttgagaaaaactctccaccacgatcagacctaagtctttttatctttctgtcaagttgattttcaacttctgccttataaattttaaaatagtctagagcctcgtctttcgttttcaacaagtacacatagcaaaatctaatagcatcatcaatcaatgtcatgaaatatcgttttccacccttcgtcaacaccccattcatttcacaaagatctgaatgtaggagttctagaggtgccaagtttctctcctcagcagccttgtgaggcttacaaggttgctttgattgcacacaactatggcacttagaacctttgacaatggaaaacttaggaattaaacacatgctggaaagccgagacatcaagccaaaattaatatgacataaacgtgagtgccagacattagcctcatcatccacactgccacaaatatggttcacagacttattgcagaaatcagaaagggaaaagcggaacaagcctccgcactcataacctttaccaataaaatatccatgtttagacacgactactttattagactcaaaaaccaacttaaatccgtctctagtcagacgggagccactaacaagattcctgtcgatagaagggacatgctgcacgttcttcagctgcacgatctttcccgaagtaaacttcagatctaccgtgccaacaccatgaacagaagcatgtgacccattccccattaggacggtggaaccccgtgcgacctgataagaagaaaacaatgagatgtcagcacaaacatgtacattggccccagtatcaacccaccaattagtagattgattaactgaaaaaacagtaggtaaattaccatacccgcttccatctccagtgttgccaatggtcacattagcagacttagaagtctgccctgcaggtgccttcatccccttgcgttgtggacacttcctagccagatgaccaacttggccacacacaaagcaagtcatctcatcctgattaggattgttgttgttcttcttctgcttcttgaagttggtggtctgctgagctttgtatttccccttgctcttgttctgggccttgtgcacaacattggcactagactgcccaccatcgcccttagacgcatcatcttttttccgagctttctcctcaacatcaagagacgctatcaacccctcaacagagtattcctgtctcttgtgtttgagtgcagtaccgaaacttctccaagatggaggaagtttcgcaataatgcacccggccacaaatttgtcgggtaagacacacttaagaagttcgagttccttagccatggtttatatctcatgagcctgttcgactacagaacggttgtcagccatcttgtagtcatgaaattgctccatgatatacagatcatagctagcatcagtagcaccgaatttagtattcagtgcatcccacaactccttagcgtcggtcatatgcatatacacctcgaccagacgatcgccaagaacgctaagaatgcatcccacaaagagagtattggcttcctcgaattgcttctgctgttcagccagtaagaactccttcaggtttgccagtactcacccagaagcatttcatagctgtcagccacagagtgaccctgatctgccatctcttaaaatgcacaccggtgaatttatccggcctcagtgcatcggcaaaaccagccatagtaaaatcacagtgcctataataaggtttttggattgttgagattatgggcatataaggatttaatttattccataaataaatcatgacattacagatgaaaactagcatgaacgcatcattagatctacacatgtaaactacgcagaataacatgaacagatcaaatatgcgcaacatattgaacacgtaccgaggtgacgaaaagaccggctgcttggtcgaaacttttcgcaggtgtctacgaaggcacgaaacacgcgagcgaagaggaaggcgagccgtcgcgaacgaacagggagcagtcgcgcgaagcgcttcccaaaaaccttattgccgccttctcccggtgcaggacgtcaaaggcagaggttccggagacctgctctcccgatcgctggtgcacgccggcgagcgggatggagtagtctacgagcgacggcgcagtacagagtaggaggcaaaccctagattgattttcgcatatattgcgtgaagacggcgggtcggtttatatagagaagggtcgcttgatcagggcgcccgcacgatctctactgcgcgtaaccgaaccggataagtcgcgcgtaacttatccggactccacgccgtttgcacgcaccggatttttcggaacgtttccaaaacaaaacgaatccgaatttgcagcaaaacaaactgcaaaaggaggctgcatctgcgcaagggtgaggagccaatttttcggaccattcgacgcgtacgtcgtgcacgcgcgccgcctgccttgccaggagccaggcgagcgagcgcgcgcgtttcccctcttctctccaccacacatgcttcaagtggctaggagggcatcctcccttttaaggaggtccccctctcctagaataagcaaggtggtactaaactccacatgcatgccatcccatgaggtgggcttttgtgattttccaaagaattaatcttcgagtgggctaaggcccattcattaattccaacaaagatcatataacattgtaatctcacctttgaacgaagcaagtgagacaacactttgggatgtatttaaagcaacctttttactcagtttgcaccatgtatcttcagcaaattcctcttcaaaagtatttttcaagcgcataccccctggttaaaaaaacataaaactacagttgagtttgctagaaaataccgtcaaaatgtgcaacaaaagtaaccagcaaaagtgaaagcaatgactcaccccaaaacctgattggcatgggataattacgagactttagatcctttttcaaaagctgcgtgaattctggtgcaacaaggtgaagagtaaataatgatcatgtgatactaatagctagcaaaactgaaagcaatgactgaccatcatctggcaagggcttaataagttcaggaaacaattcctcctcccagaaatctggtgcaacaaggtgaagcgattaatttacatgttctggtagtgatcaataagcagcattataacatgctgagagcttgcatgataatttggtaacaatcagttagaaataacctagctcgattcaccttctgaatcacttgtagaatattcaggaagcttctgagtctcactttcattctcttcatctgaagtacctaaaataaaatttaaaaaataagcaagaaaaacgaacaaaactcaaaacaagcaatgagagattaatgaccctgcattagaaatgactaataagtaataacattataatacgaggacagtttgcatgatcatttaataacagttagaacttg

SEQ ID NO: 6563 - DNA, 4752 bp, Oryza sativa
agcccgaaaggccgaaccatttaagcagctcggctgttccaaagcccattacaggttccagacccgaattttagtaacaaggaataagtctacggctctcatcggatggcctaatcagccaaagaaaaaaccaaaatttaaattttcaaacttaattttgagattgattttgagatattttcaacgtaatttcttttacaacattagcttttaagtcaccaagaacacatttataaaagtttcatctacaaatttatttttatttcctaagaagcaataggaaataagccaaacaatgaggacctagtagccaactggcaaggaataagacgacaaccgttgccgcgccttcacccgtccaccgccggcctccggtggtcgtccccctccgcaagccttcgccatggccaccactcggcctttatcataatcgttgcttagcttcctcgtaccgacagtaagggcctatgaagaggttttcactgacacatgggcactgaatttatcatttttttattttttgcaaatataataccacttcaacttaccacgtcaacaaaactacttcccaaaccatcgaaatagtcgatttgcacagaattttaataatagaaaatgtgttataccaggtttaacggttgcgattcaaccgagaacaaaacatgagagaggtcaaatagacttattccaattggcaagcggtgattcggcccagtaacaagggccatcttctcttgcacggtaggagtttgctccgtattctatttctgcaagcgcagactagggctctgtttggaatattagctcagggctaattttgagagctaatgtttagtcatgaattggtaggctaaacattagcctagggtggtatgtttggatccatgggctaattcaagactaaagggtgaagagagtagaaagagaggagagagaaggagagagagagctgctttttatggttctcacataaaattagccccattaacatctcttggaggggctaatgttttgaggggagctaattcacattagctcaaaattagcccatattttagattcttaagagttaatttgagactaagaggtgagagctaaatattagcccatgaaaccaaacaaagtgtttaggtggagagcacgaggccacccactccaaacaaaaaaacgttatcctgccgtcccacgcaggccaagtcaaaccgttgaatcgccagccttggaaaagttgaaatactccgccacgtcccacgtacgcgtggtgaccgacgcgacgctgcgttgctcgccgagacgccgaccacccgccgaagttgcaccaccaccaccgtcgccggcacgcgcagatgggagagcccgacgacgagatcacgttcgagttcctgccgctgatccggtgctacaggagcggccgcgtcgaccgcctcctcccggacacccgcgtcccgccctccgtcgacgccgccaccggcgtcgcctcccgcgacgtcaccatcgacccggccaccggcctgtgggcgcgcctctacctccccgacctcgacggcggcgagaggaagctgctgcccgtcgtcgtgtacctccacggcggtggcctcgtcgtcggctccgccgcggacgcgctcgagcacgggttcgccaaccgtctctgcgcgcgggcgcgcgccctcgtggtgtccgtcgactaccgcctcgcgcccgagcaccccgtccccgcctgctacgacgacgcgtggtccgcgctgcagtgggccgtcgccgccgcgagcgccgacccgtggctccgcgaccacggcgacagggagcgcgtcttcgtgctcgggtacagctccggcggcaacatcgcccacaacgtcaccctccgcgccggggccgaggagctccccggcggcgcgagcgtcaaggggatggcgctgctgcacccgtacttcatggcggccaagaaggccgacggcgaggtgaagaacgcgtggctgaggggcaagctggaggagatgtgggcgttggcgtgcggcggcggccggaccacggcggggctggacgacccgcggatcaacccggtggccgacggcgcgccgagcctgcgccggctcggctgcgaccgcgtcctggtctgcctcgccgacgacgagctggaggtccggggcaaggcgtactacgacgggttgctggagagcgggtgggcagaggacgccgccgagctgcttgtctccggcgaggatcacgagtacgtccaccgcgatcccgacagcgccaaggccgtggttgtgatggaccggctagccgcgctctttggcgggaaaaattagaacagcaattaatcacattctagtgacctgcaatgttgttgatgaatgctggagttttgttgcattctgagctgtttgagctcacaaaaaataagaagaaatgaagagagaaaaacatgttgtgctgtgcacgttccaccttcagtaatcagcggtattatggagttgaataaaatggaacaagttgtttcttgtttgacttattatgagctttatttgctcatggagcagagccaagggaatcttgcacatgagctccctctattctatttgctgcattctcaagaaacagcgactcctcactgctaaccatgttagtatattctttggatcaagcttcggaatgaaggaaacgttgagaaaagaaaagatttaagaatggaaaaaaagtcacccttgtacgaatgaatctcatctgaccaaatttaccccccaaaccgataaaatttctgggcgaattggtcagaatttcacagctcttccaagttgtaatcattttaaaatggtttttagtagcagtaatcccattaattggaagatttgaacagcgacttggcaactactggtagatttggtatatacacttgacgaaacccaaagtctaacacgcgcccctcctcttgcgttctcgcctcggtctccaactctgcaaccaccgccgtctcttctccagatctccaccgcgccatggacgccgcacccaccgcgccgccggcggcgtcggccgacgacgagatcgtgtacgagtcgatgccctgcatccgcatctacaagaaccgcgtggagcgctacttcggctccgagttcgtcgccgcgtccaccgacgccgccaccggcgtcgcctcccacgaccgcgtcatctcctccaacgtctccgcgcgcctctacctcccccgcctcgacgactccgccgccgccaaggccaagctccccgtgctcgtctactaccacggcggcgggttctgcctcggctcggccttcaaccccacgttccacgcctacttcaacaccttcgccgcgctcgccaacgccctcgtcgtctccgtcgagtaccgcctcgcgccggagcaccccgtcccggcggcctacgcggactcgtgggaggcgctcgcgtgggtcgccggacacgccgcgggggatggcgacgaggcgtggctcgtcgaccacgccgacttctcccgcctctacctcggcggcgagagcgccggctccaacatcgcgcaccacatagcgatgcgggtggccgaggaggggctcccccacggcgccaagatccggggcctcgtcatgatccacccctacttcctcggcactaacagggtggcctccgacgacctggaccccgccgtgcgcgagagcctcgggagcctgtggcgcgtcatgtgcccggccaccacgggcgaggacgacccgctcatcaacccgctcgtggacggcgcgccggcgctcgacgcgctggcgtgcgaccgcgtgctcgtgtgcatcggcgagggcgacgtgctccgcgaccgcggccgcgcctactacgaccggctcacgtcgagcgggtggcgcggcgaggcggagatatggcaggcgccggagaaggggcacacgttccacctcctcgagccgcactgcgacgcggccatcgcgcaggacaaggtcatcagtggcttcctcaaccgttgactcgccgtcgccggcgatgacaccgtcgtcgtcggaatcggagattaccaagattagcatcggttcatacccagaataactgcagctacgtcgccgacggatgccgctgccgcgccatacttactactccactactacattttacattttggattcaggattgtgttgcatcttttgcaattgggtgtatggatggaaggaaatcgccattgatttaggtgagggtattgtagtatcaggaagttgggggagataaatgataatactacagtcatagacttcatacagatgaaattattctgctttgtttgacacattgattcattttctttggaactccagtgaaagcattgttcttaactctttgcatcaaagaattacttgcttatactcttccaaaagaatgattgcgcgattctgtatttccgctgatcatatatttgtcaactgatgacctcacatggagtgatgccctccatcaaattctttccctaccttccatcaattccttttcctatcatcatcctttgatgatactaataggcagttctttgaaattaaaatacttgctggacgcatgaattctttgattttttttaatcattttggcagattattgccgttcatcaaagaattgattgttaactcttacataaaaaaggctctattcatgcatttgtcaaggacggtgcacacacattgattcattttctttggaactccaatcaagcattgttcttaactatttgcatcaaagaattacttgcttact

SEQ ID NO: 6564 - DNA, 9559 bp, Oryza sativa
  unsure (1)..(9559): unsure at all n locations
ttgtggtcactgtatgacggtggcgctgactacctctgggcatgtatatacaatgggaagtcctgtctatggccagcttggaaatccacaagcagatggcatgcttcctgtgcgtgttgaagggaagctacataaaaactttgtggaggagatctcatgtggtgcttatcatgtcgctgtcttgacttcaaggactgaggtgtacacatggggtaaaggtgcgaatggtcggttaggacatggagatacggacgataggagttctcctactttggttgaagctctgaaagataagcaagtcagaactgttgtttgcgggattaacttcactgcagcaatatgcattcacaagtgggtttctggagttgatcagtccatgtgttctgggtgtcggttgccatttaatctaaggagaaaacgtcataattgctacaattgtgcacttgtattttgtcatgcctgcagcagtaagaaatctctgaaagcttcattagcaccaaacccaaacaagccttatcgcgtatgtgatagctgctacagcaagctgaataagggtcctgagacagatagatattcttcagcaaagcggggatctgttatacaggggttcaatgattctgttgacgaggagttggagacaaaatcaaatgcccagttgtcgagattgtcatcattggaatccttcaagcacatggatagcagaacttcgaagaaaaacaagaagtttgagttcaatagcagtcgtgtttcccctattccaaatggcagttctcattggagtgggctcaacatctcaaaatcctttggttcatcaaagaaatttttttcagcatcagttcctggatctagaattgtttcaagggcaacatcacctgtttcaagaagagcaagccctcctcgatccacaactccaacacctactttgggtggtctaacctctcctagagtggtggatggtgtgaagccaaatgatagcataagccaagaggttctaagtttgaggtctcaggtacatatcttactatattctttatccagttacctttctaatttgtattctccttcagtaaattgtaggcatgtaacttaattgaatattgagcatcatttgttaatctttggacacctgaatggaaatcaaaatatcttgtgcgaacatggcaaatttgctggtttttgtatgcagtcctgtttttcttctgattttattaatcttattaccttgtgagttgtgactattcatggacgcgaaccatctatctttttgggacccactagttgtttttcacctacttaatattttgactgccttattcaagcattggaaagatagatcattaaactccccatttgtttaaggtgagatcatgctcaacaatgcattctctaacaatcttaatatctcaggtggaaaatcttactcgcaagtctcagctactggaagctgatttggagagaacaactaaacagttgaaggaagctatttcaattgcaggggaggaaactgcgaagtgcaaagctgcaaaggaagttatcaaatcattaactgcacaggtaagattgctatacttcaagtaggatgtctactgtacagacattagtaaactaacaaagtaaaaaactgcaagtatgtgtaaacggatccccttgattaaaactgaatggctcaaaagtcaaaaccaagggaactgtggattggtcaaaggcagcatggtgccttctaactggccctgatgagtacaacttttctaggtttcgagtctatgactactaaatgtgcatgcattacttttgatagaagacagtctgctgctttagtggagttggaaagtggaaaactaaaaatgacattatttggatcttaactttgtatttaagaaactaagaatgcatgatcatcttcaaattcaaataatgattttgtacaatatgttgaatattttcactaacaattctttgttcgtgtaatagttgaagggcatggcagagaagctacctgaaggagcaggactggtgaagaacagcagactgccaccgctgccaggaatttctattccaactgatatatcagttgcatctgagagtttgggtagcccaagaagttctggagaaccctgttcaaacggttctaatggtttgcttgtttccaatggaccaacttcagttagaaataagttgagtcaccctgaaattcccaagaatggaacaaggctacccgattcagattctaagcatgaatctgaatgggtagagcaagatgaaccaggggtgtatatcactcttactgccctacctggagggactcgagatctcaagagggtccggttcaggtacacaccaaccacacagaggcaaaatatatagtcattagtcagcaaaaatcttgtctatcaatcttgaacatagtacattattcgtttggcgagtagtctatgagactagatctaacaagcaatgacagcaattgagtgattgacacttttgggcattccatttatttggcttactatatagtataatcaacttattttttgcttgtcctatatagatatttggggttttaagtgtttactctttttttatggagagaacaacatgaagtgggcagtagcctctagttgagaggatcttgatacacaaaaccactattaacttactctatatatgtgcagatcaagaatgcaatgaatattacaataatttgataataactattgacaacagacctgtctaaatagaaccttcaacttgcaaaaccagatcatgtgaccgcctcaaatcaatcctgtcctgtttgagttgatgtagcaccctgtccacgacacagagccatccaactcgatttgacttgatttagcatctagcattgagtagatataggtaacagcattcagtgaggtttaggtaaataaaatgccttgcctgatttttctgccctccttggcattattgtgttctcccacttccacaagccatgtcatggatgcagtagagacctcgtcccatctgctccttgatgatagtccaggatgtagagttgtggggacgattttgggggtgaagatgttggaatgggatgctagtgggtgccttgcagggatgtgagaagggcacaccagcatttcagatccttcgggggcaagtaggtgattgttggagatggtggaggagattgttggtggtgatggtgcaggaatttgagattatgcccaccatttctggagacaggtaaaaggtaggctggagtggctgtccagatcatgctgggcttgggtatgtaagcgagagagttggaaaaggagaggacacatgggctcactgaggtatacttaaaattggtgccacaccaagtgataaccaggttggatattcctgggggtcaaaaatgttctggctatatgagttgaagatttctactttagactgttatggagctgtgttcgacttttcacactcactaattctgttatggcgcatactcactaattctatgttctgaatgcagccggaagcgtttcagcgagacacaagcagaacaatggtggcaagagaatcgggcacgggtatacgagcagtataatgttcgagtagtcgacaaatcggttggcagtattgataatgatgtacatcattgacataagaaatttgacttggtcagtcactacaaagctctcaaagctctcaccgttgagcatgggtgctgacgcggctatgatattttggttaggcccagaagaggaggggcctgctgtttgaaaaatgtgggcttgcattctttttacacgattctttcctcttccatttcccttgtgtggaatgtagagtgttcaagcagaagttatgtaaatggttagtggcagctggctaatctgtcctgtaaatgcataagcaagtgcatcaattttagactatgatcttcctgattttcctttaattggcaaatataggtgcaaaatctaagtgatgatgatgaagaatatttggtgctaattgtagattgagatgcaaagtagctttgaaagatttaagctttgttctggctgacttgagtgcctgttttggcgaaaatttcatgccaattactctgctcccccagattgaacgtcatttgtcgaacttacatggtctggatgaggtatgttttctccgtttatgcaaaattctgtactaatcattattaccccgggattcttaatagtgcgtattttatttagcaaaagttttcagatcacgctttgaacatttatctcgtaaactatacaaccaatatttttgagtacattaaaatatgaatatattagtgtaaattttatatattaattgtaacttatactagttcaaagttgaaaaaggtgaattcaagatacacctaatgaaaatgtataggggaagttatccttctgaggctaaattgcatgaatggtaaacaaacttacatagtaggtgcaaataggcacaataacttgtaacttactttttttttttgctggaatgattgaaggaggtcatccaatgtaattaagatagggagaaaatgttacgagaaaagttttacatcaacagatagctgtcgaggaaggatgtgcaccagagcacacgcctcgaaccatgtgccaactgcccaaacacacgctatagagagggaagccgagtaccgaaccggccgtcatcaggccaacaacaccaccacggagcgaagactctaaaaaacgacaccctcatgagggtcgccacgccaaatgacgccgtcgtcatccatccaaagactgaacaaggttttcacccagagctccttgctaagggaggaggggtacctcaacagtaccctcaggagagttatcatgctcaaaatagtagtcactgttggcccaaagaaaccttgggctaagatttcgctcggaacccctacaaccctaccgtcgtggtccgtcgcccaatccgaaaccaccatccaaacatcggtggcacatggcctccaacacacccgaccgacgcccctccgccagccggcttccagtcctgccaacgacaagactgccacaacaccagtcaccttggccagcgcgctgacccaggccgctttcaccacgctgcctgccggcttccccgttgaatccgacctatgggagcccgcacaaggaacaacattgcctcggcaatctgagttttccttgttgaccgaccaccgcctccagcctgccaagaagctctccacaaagaaggggaggagttccctagcagggttagcctggccaaccacaaggaagacgacctgccaccactccctagcgcgctgacccaggccgcctctgccacgctgctcgccggcctccacgttgaatccgatctatgggaccggatcgggaacctagccttggcaacctgagtcttccctgtaggccggccatcgcctccatcgtgcctaaaagctccccacaaagaaggggaggagcttcccaaacacagtggtagcctggccaaccacaaggaagacgaccccgtcgccaagctcaccggcggcctcgctgatgcctccgcaccgctgccacctcgaagctcaccaacagccacccgggccacccagcatcaccggtcgggccaccgctgctctggctttcgcgccaccagcccgagcagtgccggcctccgcgccacccgccgcgcctccaccacgccagccgctcctgcgtcggcctctacaccgccggccgcgcctccacaccacactagcagctgtcaccgccgcccacggcgccctattgcgccggccgccggatctggtggctccgctcgaggccgttgcggccgaagccgcccactccacgccgacgcaacctcagccccgccgccggtcggccgcttcgtccagccccgccgccaatgccaccacctacacgcagtcgtcgtcgccaatctccacgcagccgtcgccgaccctgctctccgccgcccagagcaacagatccgagcatggggagactagatccgtgcatgccagcgccggatttggacaccgccggtggcttttccacagtgagcgtcggcgccttgccctgagctccgtctcgccggcgccctgaccaccttgacgtgagcgagagagagaaagccctgtaaattacttatttcgaaaacaacttgtttattatgtgcaaactaggctaaatagtccaatcaaaatgatgtgccctgtaaattactcatttcgaaccaacttgtttattatgtgcaaacttggctaaatggtccatacaatcaaatgatatgacgttgacatggatgccatggaaagccagtatagtttggccacaattttcttcatttttcaaaacagaaaaaccatttggcattgagagctaactcgatgctgaactcatcatcattatcaggacttaaatgttatgtaggttacatggtagatattttagcataaatattttttttaccacaaataagaccaagaaactactgagatcacaccatgagaaccaaattacatttttttaaagagaaaaacctaaacttaagagtgatggaacatcgaattctcaatatataaatcacaacaccaatataattcgtggcatgaagcaatcactaaattagagtctacgagctttagaggtctcaaactcaagccattcgactggcagcaagatttaccacgataaacgtagcactgcagtactgctccaatcattttgatgctgattcgtacgagcaagcacacagtagatgtatacactcatatatacacgactagctaggtgaaactcccacgtggccatgtgttgctacgggcactttaggtaacaatcaggatgaaatgttttttttatagaaactagcatggtgggcccgcgcagattgcgtgtctacatcattatctttttttcctcacatactaaaatatatattttcacattttattattaaaatatattaaaagtgacaataaattttgtactaacttgaccaaactgatcaatattcatattgtagtgtatatatatgtgatagttatttaataatttttaaatttttaaatttcgttatttctaaattgtattcttatatgtactctagacttcttttttcagtattctttatttttgtcgagctaactagttgggtggcccgcgcaattgcacggctagcacctaaacaaaatcatatatttttttaagtatggttttacttaaaatttattaaatagctatctcaatgtcttaaaactttgaaagaacaaaacttatcatccccgtgtttctaattatataattttttaaaagtcgcaccagttgctaccccttgtgtcatctctttcattatttgcttgctcgatctaccactatttctatttattctccttgtaacctttaaaaattggaccttatagtttttagagtttattgtcacgttgggtttcgtttttataatttctaggcgtcccgtcaaacgttgccattatactcctctatggcccgtccactgtctcttctctttattgtcattgagattttaaaaatcgaacataattatcgtttggattcatttttactttttagaagtcccgccaaaccgtcagcggttttgccattgtacttctctatggctcgcccgctgtctcccttctttattgtcattgagattttaaaatcgaacatgattatcattgttttatttttactttttagaagttccgaacctttaaaaattggaccttctagtttttagagtttattatctcgtcaaatgatgccactatgctcctctacggctcgtccgccgcctactctttattgtcattgtgattctaaaaatcaaacataactatcgttggaattatttttttattttctaaaagtctcgtcaaccgtcggcggctctgcaactacactcctatacaccacgcccactgcttctcctttttattgttattgagattttaaaaatcgaatatgattatcaatgggatttatttttttttgctcatttgcttcatggcctgcctgccgtccctcttttaatcgtcattacgattctattatgtgttttattaacagtttttatatgtcgtatcaactatcatcgggcatgttacttaatttatctcgtcatgtgttttagatggtcttttctttcaatatttttttatcacaaattttagctatttataaattgtattcctaattgaaatcttatttttctttttctaatttcagaatttagttttttttaaaaaaaattaattcatatcttattgtgttctttaaatatttttattttttattttcaatttcagttgtttcaaaactgtattcctacttgaactctcttttagtttttctaattttggacattattttattttttattctgagttttaattaatctcgtattgggttcttatatggattattctttcaatattgcttatttttaattccgaatttcagctaattttaaattgtatttctagttgaactcttatttcagttgtttcaaaattttatttctacttgaactctcttttatttttttctaattttggatattattttatttttattctgaattttaattaatctcatattgggttgttatatggattcttctttcaatattgcttatttttaattccgaatttcagctatttttagattgtatttctatttggactctccttttctttttctccgattaatgtgggaatttctaacccccacagcgaatgtgatgccttctttcaaagctgttttaataatataactagctgggtggcccacgcaattgcgcggctagcacccatatanaattatatatttttaatatgattttacttcaaatttattaaatagttatctcgttgtcttaagatttttaaatactaaaccttattatcctcatgtttctaatttctttagtttctaaagttacaacagttgctaccccttacttctgtcatattattatttatttgcttgctcgatctaccactgttttctattcattctccttggaatctttaaaaattggatctaaaaactataagttttagagtttattatcctgttggacatcttttttataatttctagaagtcccgtcaaacactgtcattatactcatccagaccgtccactgcatcttctcttttttgtcattgctattttaaaaatcgaacataattgtcatttaggtttatttttttttactttctagaagttccgccaaaacgtcagcgactttgtcactgtactcctctacggctcacctgctgtcgcccttctttattgtcattgagattttaaaatcaaacaggattatcattgcggtttattttttttactttttagaagcccaaacctttaaaaattggagtttattgtcttgttgggttttattttctttataatttttagaaatcccgtcaaacgctgccactatactcctctatgacccgtccgccgcatactttttgttgtcattaggattgtaaaagtcaaacataactatcattggaattcatttttttttttactttctagaagaccca

SEQ ID NO: 6565 - DNA, 13989 bp, Oryza sativa
atatgaattgggaggggacttataagagggagaaatggaagattgtacagagattgaatgagatagacattctgagtgaaacaaatggtatggatgatgtcttaagggaagagaaaaggtgtttggaagaacaactgaaatttacaatgagagaagaaaagttaaaatggtttcaaaggagttaagagaaagacattttagaatgggataataataaaaagtactatcatgcaaaagctaatgggagaaagagaaaagagagaatttactctttaaacaaagatggggaagtgattgcagggcaacaagagttggttaaattcatagcaaatttttataaaaacttgtttgggccacctgaagaaacagaagttagattacataacttggagatgagtcaattgagtgaacaacaaaaggacgatttgatgagacctttttctatggaagaactgaaagaagttgtttttgaaatggaaaacaataaagctcctgggccagatggcttttctgtggacttttataaggctttttgggaaattattaagatggacttgaaggatcttctatatgattttcatagagggcttttggaagtgaggaggttgaattatggggttattactcttataccaaaatgtaaagatgctttgcagatagagaaatttagaccgatttgttattgaatgtaagctttaagataataaccagagttttgatgaagagattgtctaaagtaataggacttttgattgagaaatcacaaactggttttatcaaaggaaggtatatcatggaggggtagtggttatgcatgaaattcttaatacaatgcatcaaaagaaacatgctgggttgctctttaaagttgatttcgaaaaagcttacgataaagttaaatggccctttgtgtaccagatgatgagagcgaaaggttttcctgaatcttggtgtgattgggtgatgagatgtgtaattggtggtaaagtggctgttaaggttaatgatgaaatagggggtttttttcagacttacaaaggactgagacaaggggatccgttatctcccttactgtttgatattgctgcagatgcattgcctttgttgatgcatagagcagtagatcaggggctggtgaggtgtttgggtcaggagtttctagaggagggggttgctattttacaatatgctgatgacactattttcttattaaaagacaatgtggaatatgctaaaaatctgaaatatattttgtgtctttttgaacaaatgtctgggcttaaggtgaactttcataagagtgaagtttaccgtcttggggaggctgcagagaagaaagaaatttatagtcaaattttgacttgtaaaatgggagatttgcccatgagatatttaggagttcctattgataaaaaaaggattcataatatagattggaaaccagtggaaaacaaattagaggggaagttaagctgttggtagggtaagtagttggctattggaggtagactcaccttgatcaatgctagtctgagtagtgtgcctctttatatgttatccttttatgagttaccaaaaggagtacaaaaaagactagattttttcagagccaggtttctctggcaggatgatcaaggtgtaaaaaaatatcatttggtcaattggcctactgtttgtttgcctaaagatcagggtggtctgggggttttggatctaaggaaaatgaatatggctttgttggggaaatggctgtggagattagaaactgagcaggggatttggcaagatgtgttaagggcaaagtatctgtcacaaaaaacattagtgcaaaggaagagcaaacctggagattctcagttttggaaaggggttatgggggtcaaagacgctttttatcagttttgtgagaaaaaagtgggggatgggaaaaatactctttttttggaagatagttggattggagggcgtcctttagcagatcaattcccattgttatataacatcagtctgaataagatggtcctggttgctaaggttttgagtgaaggtttggacaacttgaggtttagaagaaccttgactgataagaaattggaggagtggattagcttgaattttttgtgcaaaaatgttaagttgtcaaatgttaaagataccttatcttggaaactgaataagtcaagagttttttctgtgaagtctttctataaggctttaatgattcaaggtagtggcttcccctttaaaaagatttggaaatttaaaatccctccaagagtaaaagtttttctttggctggttctgaagaacagtattttgaccaaagacaatttgcttaaaagaggttggaaagggaaggattcaaattgtcaattttgctctgggcaggagacaatagaacacttgtttctcaattttcctgttgctagatttctttggagagtggttggtagtgtttttaacctgaaaatagcaaataatatccatcatctttttggtggatggctttgtggcttcaataaaggagataagggtttgatcgtggtgggggtggcagctctcatttgggctctttggaaggctagaaatgctgcatgtttttttaaaaaaactgtatgatcctgtggaactgatacattctatgtgttcttggatcgaatcttggtctattctgcagatatcggaggacgtgcgaggaaatctgcaaatgggggcagctctgctaaggagggtagccggtgatctctacaatgcaagtcatggatggaatccataagtcaggcgtttggggtgttgaatgctggctgtgttgctgaatgtcttcggttttttttcatctttgagctgccgtagttaacatggctgtcatgttttgggtcaggccccatgggcttgtgtgatgtttagtctttttacttgctctgaaccttttgtaagaatcttatcatttcgttaatgaaatgggagggtctccgccctctgtctcaaaaaaaaatgtgcaccaacttcttgttgcctggcccatgcatccgtcaaatcgctatgccaatgatgagcacgtactgagcacacgtctttgttgatgtttagctaacctaattggaggaccagctcaaggacggcatgtccaaactggattgagatccagtacagttactattgcaactgcacaatagcaactcaacacaatttgagccctctatttctagattcaatgatccaaatcgcttgctacagtgaattcgaaaatatattatttttcagtaaatcgctatagtactttgctacaatattctgatgcatctagatcttccattttgaatccagtggtgcttgtgtggctgcctaacttgcagtcacactagctactgcacctagacgaccgaatccgtccaaaccatatatatactcactatctgttctaaaataaataaacatagtacaagactctgctactataaaacttctaatagagaatacctattagttcatctaaatctggtacaaaggtttttctcatccttctaaacctttagatggttcaaaattaaaaaccaacacatataacacctaataaataccggacccttttattaaaaacccagtactagtatgccaattattaaaaaaccagtactagtactattacatgccggtttattatatagaaagaccggcacaaataagaaaaccatatcggcacattatcgttccaagccaaagtccggctctcccttgaccactcctttatcttatcctcctgggctcctttctctcacacaatcttcctcactggctcgtcctctctgtcctgctcaatctctccccacatccccacatttggtggtagcggagcaaacgggagaaggcggcatacacctcatctcccctcggcggcacctcctttcaacagtgcctcccctaagtgacagggcgagcgggaggaggcggcatccaccttgcctctcctcggcgacgcctccccacggccttcccttctccttgtgcggtggcagtagcagcctctccttttcccatgtgtggagagatctttcccatttgaagccttgttcttccccctccttttccggcgacgtgtggcagcttgcggcaacctcgtccctcctggctcagaggtggcttgctcgatggcggcaagcgacgacactttcccagtgagcaacagcagcgggggaagttctccactataattaattggtgtattttttttatctagttttgaaattctgtgatgtgaacttttaatgaatgtttgattctatggtgtgaacttgtcgatgaatatttgtttagctatctgtgaatttgtcttctatttgttatattttttattttcttttggtggtttatttgaagattggctcgaattgatgtagctgttttttttttaaaaaaaaactgtatatttctcctcaatcctcctcagtgtcgcatctgagtgctggttgggaagtctgacatgtaggcaaatagcagggtgctggtagatggtctcgctgcctaaataatacggctcccatggcgttctggctctgccacaatatatatgttctgctaaatcggtagagaaaagtggttataggaaaaggcgatagtgactaactacagtgtttaaatcggcacctactgcgctcatgggttggacgtaagtactgcacgtcgctggctagctagctcgtcagctgcccgttcatgtgtgctggctgaccagccggatatatagcatcctcggtgtaaagtggggaaagtgatttcgggcttgttttgaagactactccaacttgccaagccacaagctagctcgtgccacaagtttggcgaacaatttgagagccacaacttaggctaagaaacttgtggcaaagtagttcatgagcacctaatttcttgtggcaggctaatatgtggtaagcaaacaaacatatgctaactacctgtggcacgccgaacttgaggcgcggtaaactgcggcacctatccaaacatgcccgaattcatcccctcgtttcgtgtataatacctaaaaagttataaaaaatataaaaaaaatttggcaacatagattaatatgaaatatatcactctacaaacatgcaagtttaaattcaacttctacaagttgttacaaaaataataaatatagttgtgaatgtgcgataactattttcagtttaatttgttatttttgctaaaacttgtagaagttgaatttggtcttgcatgtttgtggagtgatatatttttgtattaatctatgttgttaattgtttttaaattttttgataactatttagatgacatacaaacaacgaggggatatccactatagggatgaaaatcctcatccaagtgaatatgcttatatgatagtatatccgaaatatctagtacaagaaaagattcagagacaagaaagataaaccacatgaaaaaaaatcaccttcatatcggtaaaagaaataaaaggcatgaggcttcttgaaattcgaaactctcataccaccctaaaatagaagaaataagttgagcggctcctacaatttaatttgtattttcaccgctatgaatgagtctccaccaaataaataaatagttgtaaaatattgctatgcgtctagtcaattcaggacttagattttttacatcaatgacattagaagtttttggccatgcctgatactcacttggtttcaacatactatatgattaaactaattctttaaaatcctacaacattatatattatgtcccaaaatgctagcaaataacaatatcgccagactgaaaattagctcgctcctgtccattttctagcatacataagttacgaagaggtgtctaaataatacgctttatgactgagtatacatatttcaatctgttgctgagagaataacctccttccatagccaaaccccatccagccatcctaccctatgacatgagaccttatccacaattctatggacctcctaattaagccggagagagagagagagagagagaggaggctctctggaacgctaatcttagagaaaaaataaaaatcagtaattcacaagagaccaattgttattaagtatatacttgaatacttcgattattgccaccgttcacaaacagagacatatattttttttttagaaatagacatcctttttggaagcatgcatttagtcaaattaacctcgaaatataagatcaccaatatataattgtttaaagatgatatataaaaatggtattagcatacttgtaaataaacattcttttagttatatttttagtgcttattacaaacgtatgattagaaaggacaatatgataatatatacacttgtattagagactgttaatatccatttaatggctagcacagcatgcataactaggtacttgatggccaccgagagaccacaagatgcacgatatcaacatcaaaggagaatccggcaatatgttcgatacagttcatctggcccagattaggttccaggagataaatcatttcaccttaattaggtgcatagtgggggctgttccattgatccatccacatatatggtccttgcagccaggtcaccatgccacatgggccagcacaatgatagtccgattgatcagatcggagttaacatcagataattcgctaactgaactttttctaacaggacatatctactgatgcgtctgttatgaaaatagatgcacaacggagacacgaatttttacgtggaaaacccttgcggaaaaaaaccacgagcgccgaccggcaataatcactatagaggaattggatagcaggggatacattgggctgtcgcaccctccccgtgcggcttacaagggatatatataggagaaatctaggagtcctaataggaaactaatcctataaagtagagtcctattagataactaatccgaatatattgtgggcccaaaattcggatcacatatttaacaatctccaccttgagacgaatttcccttgtagcataaaaatcttcaacctctgaacaacctcatgatgataaaatcaatgtgcgccaaataatcacttggactataatccataacacccttaatccagaagaggtagaccatacttcaaactcgccattgggaacaattcctgaatctgctggtataacattgtggaacccagcagatacgcaaaactgatgcacaaacttcaatctcgccatgggaataaaatcctaaatctgctggcattaatttctagaattcaaacagaaacgcgaaaatttcttgtgcacaaaatgaagtacttagatcccctgataacctcctggtatgttgggtataatggtagcaaaattcgccggacaatttgatcaccttgtaatctagacaggagcgaggctccctcttgacgacttgaatgtacttttttttaatctcaggtgcacgacttatcctccttgaaacatgcgccaacttgcatcttcacttgccataacgagattgcatctcaatccaggagcggtagatcaaacttctaactcgccttgggaataaaatcctgaatctgctggtataatttgtcaaaccctaacagaaacgcgaaacactctaggtgcataaaacgaagttgatctccgtgcagaacctcctggtagactggcttgtgaatatagcacaaaattgaacctgaatctgattcacccaaacagaaccgaagcaccgcaattgaattgaatccctggtacgaaggggcatgtgcacgtagcacaaaaccaacgtgaaattcaattcacatgaacaataacaaggctgagtgcatctgctgatttttctttccttgatcaacgtgctggagtagatggattgctgctttttctccaacacgctgcacggcggcaccaaatcctgatcggagtcaacggctgactccgcttcgtaccggttaatcttatctcggcaaacaaatcaatctgacagcagtgatagatagaacaacgcgacgacacacgcctgctactgccgatcaaatcttgcgacgagcgtaccggcagcgtaccggcggctaaaacttgcagatgggatctccaagcagacgaactcgtcggcagccgagatgttagtagatcgatctccaatgctctggtaccacttgttataaaaatagatgcacaatggagacacaaatttttatgtgaaaaactcttgcgggaaaaaaccatgagcgctgaccggcaatgattactatagaggaattggatacaaacgcaggggatacttgggctgtcgcgccctctccgtgcggcttataagggatatatatgagaaatctaggagttctaataggatactaatcctataaagtagagtcctattagataactaatccgaatatattgtgggcccaaaattcagatcacatatttaacagcgtctttaattagttaacaatctgacgatcagtcatggtttgcttccttgatatggctggttttatgcggatccggttccgttgcggttggtggtgtgactgtaacttaagctgtcatactgtcgctatttgatctgactttaagagataggatcatctaaacactgttatctagagaaaaatatttagttttactatgtaggagttaagtagctgtaaatctgaactcttcgtaaagaaatggacggagatgagattagtgcaggtctagggatgactgcacctgatatcaatcggttctatgccgtgactgccgtcgcctgcggtcgtctctgcggcttcctgcttgcatgctttcagactgcagtaccgatcaatcgttgtgcaacagtctatccatctgtatagaatcaaaacacaattcagagccctataagagagaacggtgggcttgctattagtagagggaataagttaatttaaggtcccttaacttgacagcgagtttgattttcgttcttgaaccgcaataccaaatactacaggtccctcaactatcaaaaccgttcagatgagatccctcggtagtttagatgtcggttttggctgacgtggcgctttcctacatggcagtgacgtggcactgaaagcaaaattttaaaatttaaaagattttaaaagaatgtgggaccacataccagtcggaaaaaacagtgggactcttctctatctccacggcgagtcagcgcctcctctctccctcatgtcagcggcggacggcggggctagggcggcgctcggccctccgcttctccggccagggcggcgctcgccccttcgcttctcgcgcgcgacggggccagggacggcgatgttgtggcggtcagtagggccaagagcggcgccatcctctttagcctcctacctcaatgacctcgcggcggcagccgttggggaaccgagaagacggcaggcaccgtcgcgttccagtgggatggccggcgaggagggggccgcggcggtccgtagcggcgagtggcggttgcggtggaagttgccaatgaggacatgacgacagtggcttgggatggaagaaagcggcggtttcttagcagcgatgacgagatagcagtggcggcgtgcaaagtcgcggccgtcagcaggcaaaaccacaatgtcggtgcgtagtccatttagtcgtatgatgccggcaagtcgacgccatcagtgacgatgaccttagccgcatcaaggctgtggacgtaaccgtgccaggcagcgccgcgctcaccggcggatcccttcccagcggctgcagggaccacggctacacgccccgcctcggccgtcatctactccggccgccctgtgccgcctaggtgagagagagaggatagagagaagagggatgacatgttattttgtgtgtgactgacatgtgggccccacaggttttattatatttccggatagcattgccacgtaagagccacgtgggacaaagacctagtcaaaaggatccacagaggcgtcatgtcagccaaaaccatcatctaaaccaccgagggatctcgtctgaactggttttgatagttgagggacctgttgtatctggtattgcggtttagggacgaaaatcgaactcgctgtcaagttaagggacctcaaatgaacttattccttagtagagatacctgcatatgggccgaaagggtcataattcataaatccactacaacaatgtgtctgtacggttttcaattgctatttctcttctatcgtcatgtggtcaaactgtatgaaaattgcaaaatatggtccaaaatatgccgtttggggcatctgaacatggtattctctttccttcacttgactttgatagtaaaaagctttttttcattactactcacatagatatcttctcgagagtttagaatcatttccttacatagatgtacatgaatttacgaagatacaacaaacatccaatatgaacggataaattttacatccaatcacttgacaccaatagtagttgtagacctgtagtattgatccgaagatctgctacaatttgccaatatgtactagatcttcatgctcccctgctttttctgaagcctggccttccgttctcgcgacagcatctcggcgaaaagcaccagctcctcctcgttacttttccggttcatgtccggctcgttcttgccggtctcgaggtcgaccttgcacgcctgcttcttgagcagcgccttgccgacgccgacgagcctctggaggttctccggcgtggagacgtcgacggacgccgcgtcgccggtgagctcgtcgtcctggatgcggaggtagcgcttctcgcagtgcagcgcctggaagagcacggatgcgtggatgtcgacgaggtcggcgctggcctggctgaagctgtcgatcagcggcgtcgcgcccttgttgaacagccagccgaggacgccccaccggccgctctcgacggcgtcgaacttcttctcgatcttggccgagccggtgcccagcgacaggatcatgaacttgccgtagtccgccggcttgatcgggaagaagtcctggcagcccagcaggatctgcttggttacgtgtgtcatcgccagcagcgtctgcatgtgttgttggtcaggtgtcaaacatcgcacagtgtacatgagagcaacacaagtcatttccgtgccatatttaaggaagtttaggtcgacaagtttcacaagctaatttgatatgacggggctgttcagattgtagctaaaataaaccttagcaaattttggtatgctaaaattttggcaaaatgacaatattgccaaaattttggcaggatttcttatgtatttaccaaatttgacaacaaactaaacgtgaatatttttttgtcaactttactcaaaaaatggtatggttgaaaatggcatcaaagtgaatagacccgacgatttctgtttttcttaatttgacaagtaattaaattcagtagggatgtggattttcatccctcgagggacattctctcgttatttgaatgttatctaaatagttataaaaaaataaaaaaaaatttgtcaacatagattaatatgaaatatatcactccacaaacatgcaagaccaaatttaatttctacaagttgcaacaaaaataacaaattaaactgaaaatagttatcggacattcgtaactatatttgttatttttgttacaacttataaaagttgaatttaaaattacatgtttgtggagtgatatattttatatttgaatttaaacgtgtgtcgatgtgtcatcgccagcagcgtctgcacgtgttggtccagtgtcaaacgtcgcaaagtgtacatgagagcaacacaagtcatttctgtgccatatttaaggaagtttaggttgacaagtttcacaaagctaacttggtatgacgatttctgttttcttaatttgataggtactgtattaattaaattcagtagtagtccaccaagtctggacgactggattgtgtattccacaagcacggctactcaccggattgttcgcggcgaagccgccgtcgacgaggttaaattcccggggcttgccgtccttgtccgtcgtctcgaagcggtggccggggaggtacgtcggcgccgccgacgtgctgatgcacacgtccgacagaagcgcgttcttggacacgtccttgcgagcctgcacatgcgtgcaaagacacgaaacaattttaggacatgtacaattgcaacaagtttgtcagagttatatacatagagatcttcgtgacatacgttgtaggtcgagaagattgttggctggaggagcttgatgtcgaaggtcgggacgacgatgttggtgatggtgctgtcgacgcgcttgtcgccgagcagctgctgcacgacggagtggaggtgccggccgtcgtacttgggccccgtcatgctcttgaacagaccgagaggccccttgctgacgggagggaagatcctggggcagtgctcgaggtagaagtcgttgatgtccctggcggcgaacagcgggtcgccgttgtcgttaggcgcggtgagcatggcggtcaccagcccgccggtgctcgtcccggcgatcacgtcgaagtagttggcgagccgagcctcggggccgtccagctcctgcagtttctcctccaggaacgcgaggatggtgcccgggatgatgccgcgcacgccgccgccgtcgatgctcagcacggtgacgatgctcccgtacgacggcggcggcgaccgcggcgtggacggcgacagcagcgacttgccgcggctcagcacgcgctgcaccaccgggttcaacgtcagtgacccgttgctctgctccggtgtctgcacgggcgccatgggaaacactagactgtgctaaacaaaacaccgggagattttgtgtgtgtgtgtgtgtgtttctgcttcgctgatagcgtcgtctagctcgtgtttgtgcttggctctatcgttgatctcgatgtgagttcgctgcagtgcacgggcgatgaatttatacgcgaggacgccatcgtttccaacatgagaaggtctcgcggtctcgcctttgctggctgcttcgatcatcggaagcatcgcgcgtgcgttcgttcgtgcaggtgattgcattttggacgagtcagtggtgcgatggagttttgaaccagttggtcgcaccagcccagacacgagacagtcacaggttacccgtgcatgcacgggttcgatcgatcgcgtaccggcaaagagagatatgatcgatgttggacatatcatactactataggagtatgtcggagtacatcttggacgcagtctagctagctggtctttcatctttggcacgtgagaccgtgacccggttggtccactggacaggcgagacaatgttgccccagtcagctgtaggagcgtgtactatagtagcgtgccgtacactatggttgtatggtctctggataaaaataaataaatatataggaagatatataatgtaggaagatgatatggtttcagctgtttacccgttcatgatagattcttgttgaagctgcgcgcccgcgtacgtgtaccaagatatataatatttttttgttggaaaaagaccatacgattagtttggttcaatcttgacggcaatagcgccttcatcatcttcaaagttcgtcattgagaaaattcctttagttctcatcagttttcgctcaaatttttatgcgtttgaatttcctatcatttccatcacgcccttgagttttgtcatatttcactactggagaagtgatctgtagcgcccgttccgtcgtggcgcatagcgggaaaattatctcttaaaaaccctaattgcgaaatttgtttctttgcttgttgtctagtgtccatgccatctcaagatctcaatccccgatctatcgtcgagttcaaatccgaatccaaatccttccaaatcaaattcctccgcaaaagtctattttgcctcccccgggggtcgatgggccgatctcccccggcccatctcc

SEQ ID NO: 6566 - DNA, 4213 bp, Oryza sativa
gggggggcggcgatgtcggacgcgtcgtcggatctcggcggcgcgcggcccggggccgtggagcgcgacatcgagcaggtgagccgcttcccgatcctccgcttagctcggcttgggaatgccgaggaaatcccggctgtcggtgtgttcctcgtctcggggccgcgcgtggcggggaaggcgtctctggatggtagatgcatttgctttgcgtttgtgcgttttcgtgcggctgctgaattctgctaccgcagcagtagctctgcgtgtcccccgcggagaaaccaaaattttggggagtctggagcctcggctttgctgctgcctgcaagtagggttctgtggtggaagccgatttaattactgttatttggcctcttgggttggataattccagagacattgatttggctacagtgattgtgtttgctaactttttttttggggaaggccaatcgaattgggctgtttgctggttgttactactttgctctcgtgcaggttgtatgattgagttgggagtggtatgctataacggtttcccaaccttcttttgctgttggttaatgctgcgtgcggtaattgattgagttgagctatactgctatattagttatgtcctattgctttgaggggaagtgccagtgtgttaattggatcaatacacgtcttctctgcagtaatttctgacagatactttctccttgaatgaacttgtaaaattctttgcccatttttttgagtttccattttgttctctctgtgctcacatggcacaatgaataattttaatgaagttctgagttatggtttacctcaaagagaatagcctatatgtgctacccttctaggagaatcccttatttcgaaagatgataattgtttcagagattattgatgagacctttgcatttgctgtaacatgtagcatttcatctcttgtgcattagggagtttgctttagtaattcacttctccatgtaatagctggaacgctattttcatcatctccagtattaaccgattagtttatagtgctatacataatataatgttcatttccagctctgaagtagtttcaaattgtctgaaagaacatgtcgatggccaattagaatgcatgtgattgttccattgtatttaatgcctctcctttgtggcatctaaaatcagagttatttcttgacctagttttattattttactaggatagtagtgtgatactaactactgatgctcgatacaacattccactgtttctcaggccatcactgctctcaagaaaggagcatacttgctgaagtacgggcgcagagggaagccaaaattttgcccatttaggctttccaatgtgagttttgtttgcattttctctcactgagttgtaaagccctctttgtttacccttcagatttatggacattcatggtgtttttgttcattcaggatgaatctatattgatatggttttccgggaaagaggaaaaacagctgaggttgagtcatgtgtccagaataattcctggacaacgaacggtgagttaccatttctggaaaacttcaaatttcaggaatatagatttctctaagtctaattggccattgtgatcaaatctcatatcatatctggtaaaacaacagtgtatttcttttgcttgtttgttttggcgttaactccttatgaatacatctgtgggtgtctcttcagcttttaccctaacataattctccctccttaagaggagtttcgttgcattcttactgacaactgacaagaacttttacagttcaaatttctgatatctactactgatacaacttatgccattaggagatagctgtaatcattagtcttgcccccataacaacaaattacataccacttcaaactgatgcaacttctgatggttcatttatgattctcttttgccactgcctccagaaaaggagctacatatggcagttacaaattgatctgtcccatcatgttgtttttttttttttacattcgctttctgatggaaaacgattcacaagggagtattcaactatatttaaggtctgtaactctcccctaacaatgtctgtttctcttttgccaatgcaggcaatttttcagaggtatccacgaccagaaaaggaatgccagtcattttctctcatatctcatgatagatcattggacattgtaagttatatactgttcattttatatgtgctgtttatcttcttggttcgatttccatttttgatgcacactaaacccctttcctcggtagcaaattgattttgtttggtgatgtggttttatcatgatatcagatatgcaaggataaagatgaagccgaagtgtggtttgctgggctaaaaaccctcataacacgtagtcatcaaaggaaatggagaacagaatcgagaagtgatatgctttcctctggtacaactagtcccagaacttacacaagacgaagctccccattgagttctcctttcagcagcaatgacagtgtccacaaggtatttcccactacccacccagctcatcccactatgccactatattgtgtgttcgtcacctatacagaactacccaatctcttcctgttttgtatgttccatcttttttcttttccattttttggttttggcctgctgctttaagatctgaacaacatggcaaaagtcttatgtcgtacctaggctgttctctttgttctgtatggtctgtacaatctcattacatagatatttatcgctttgcagcaccacaataagaattgtatcttactgaccatgttttattttattcttctgtctacttcaattaatataacaaacatcttgataattgtcctgcaacaggatggtgttgaaaattaccgacttcgtagtccatttgggagcccaccaaaggtcggtctggagaaggcattttctgacattgtgtcatatgcagccccacccaagcccttcttcccatcggattctaatgccggttctgtccattccgtgtcttctgggcagtcagataacacaaatttacactcaaggggcatcccaatggatgctttccgtgttagtttatccagtgctgttagttcatcaagtcatggttctggtcatgatgatggtgatgccctaggtgatgttttcatatggggagaggggactggggaggggattcttggtggtggcaattcgagagttgggaactcctcaggtgtaaacatggattgtcttataccaaagccattggaatttgctgtaaaacttgatgtacagaacatttcttgtgggggaaggcatgccacacttgttaccaagcagggagagatctactcttggggtgaggaatcaggcggacgtcttggtcatggtgtagattgtgatgtgccccagccaaagcttattgatgctcttgctaatatgaacattgagctagtagcatgtggtgagtaccacacttgtgcagttacgctctctggggatctgtacacttggggaaatggtacttccaattctgggcttttaggccacgggaatgaagtcagtcactgggtacccaaaagggtcaatggaccattagagggcatacatgtttcagcaatttcatgtggcccctggcacacggctatagtaacttctgcaggacagctattcacatttggagatggatcttttggagttctaggtcatggagatcgacagagtctttcagtccctagagaagtggaatcccttaaagggctacggactgttcgagcagcttgtggtgtttggcacactgctgctgttgttgaagttatggtcggcaattctagttctagcaactgttcttctggtaagatttttacatggggtgatggtgataaaggccgtttaggacatggtgacaaagatacaagacttgtcccaacatgtgtagctgctttggtcgagcctaacttttgtcaaatagcttgtggtcactgtatgacggtggcgctgactacctctgggcatgtatatacaatgggaagtcctgtctatggccagcttggaaatccacaagcagatggcatgcttcctgtgcgtgttgaagggaagctacataaaaactttgtggaggagatctcatgtggtgcttatcatgtcgctgtcttgacttcaaggactgaggtgtacacatggggtaaaggtgcgaatggtcggttaggacatggagatacggacg

SEQ ID NO: 6567 - DNA, 8359 bp, Oryza sativa
tactttaactctctttttaatttatttaattttttatttccaattatagttaatctactattgggttcttatatggactcttattttaatattgcttatatttaattccgagttttagttaattttaaattatattcctacttgaactcttcttttcttttcttttttctaatttcgattttttttgtttttttatttcgaattttaattaatctcgtattggattcttatatggactcttctttcaatattttttatttttaattccgaatttctgctatttttaaattgtaatcctacttggactcttttttttgggtaatttcagattttattttatttttattccgaattttgattaatctcgtattgggttcctatatggactcttctttcaatatttcttatttttaattccgagtttcagctatttttagattatatttctacttagactcttttttttgctaatttcggattttattttatttttattccgaattttgattaatctcgtattgcgttcctatatgatctcttctttcaatattgcttacttttaattcggaatttcagctattcttatattgtatttctacttagactcttctttttttttctccaattaatgaggggaatttttagcccccacagcgaacgtaaaaatcaaatatgattatcgctgggttttttttttttactttctagaagtcctgctaaacgccttgaccgattgcttcacgacttgcccgtttgtaattctttttagtcgtcattaggattctattttgtgttttattaatagtttttagatgtctttattaatagtttttagatgtcccatcaaccaccaccaatatactcctttataggcatgttacttaattaatctcgtcatgtgtttcagatggtcttttttttagtaatcattattttttatctttgacaaaatatctggtgttggatgaccttgggaggttgacggtgataggatatgcaaaataacatctctatacacatgggtttatcttggaggggggggggggggggagggggatatcaaaccatggtcatattaatgtagcgtggaagcctataagatatatatgctggtgctaagtcactcgatatggattagacgtaaatgaaaccctagtttgtattaatagtatatatgaacattttttgtaagttgttacaactatttgcacctatcatatataacatatatgcaatttactctacctttgaccttgatattttgcactgaatttaacagagttgcgtgatgtcaaattgttcactaatttacgcgcatccaacataataaaaaacaaaaaataataataataaacgaattaactgcccaccagatgtttttgaacacatcacgagatagtcacccttccaaaatacacacggcagcagacgaacaagaccccaacaacacgccacgaaacgcaagcaatagatttgtccgatggttaggtccaaccgccgcgacacacacaacgttcagttaggttccagtagctcacaggtcgcaacgcccctcacccaaacaacgattttgcccttactcttagcttaactcttacacccaatactgatgactagctacttgctccaatcttattagcagctaatggttttttctccggcccccaatttcatcatcaccaattcaccaagtaattaatcttcacactaaaccgagtcttctttttctctctctctctctcacaatctcagtagtaagagccagcctctgttctagaaaccgtgcgtgcatcacagacaaagctgtgcatggtgtgtcgtgacgagcatgcgtgagtgcgttacacgctcaagaaaagtgtgttagcttagcttagctagccaaccatgcatatattcgtcacgttcgtttcgagttgatcgatcttgtgtttaattccaagctcctcttgagcggccgtaattcttgatcgtcgttcccatttgctatagctagctagccatggaggacctgtcgctgtcgtcggagctcgacccggcgctcctctcgacgtcgacgtcgtcgtcgtcgccgccggactccgcctcgccgtccttctccttctaccacccttcgcctcccaactacaccctcgccgtgtccaacctctcatgccgggaccctcgccgcggctccggcggcgccgggttgctctcgtggttgttgggttctttctcgaccagctcgccgccggccaccggcggcgcgggcctcctgaacaacgtgtcgttcacggcctccagctcgcagatcctggccgtcgtcggccccagcggcgccggcaagtcgacgctgctccgcatcctctccggccgcggcaccggcggcgagatcgccgccaggccgcacgcggtggtgtccgtcaacgggcgcgcggtgacctcccgcgcgcggctccgccggatgtgcgggttcgtgacgcaggacgacaacctcctcccgctgctcaccgtgcgggagacgatcctgttcgcggcgcggttcaggctccggtccgccgtgacggcgcgggagcgcggcgagcgggtggaggcgctgatgcaggagctgcgtctgtcggaggtggcggacagctacgtcggcgggtgcggcggcgccggcggcgcgccgcgcggggtgtccggcggcgagcggaagcgggtgtccatcgcggtggacatcgtgcacgacccgccggtgctgctgctcgacgagccgacgtccgggctggacagccggtccgccatggacgtgctgtcgctgctccgcgacgtggcgcgcgcgcggcggcaggtggtggtgctcagcatccaccagcccagctaccgcatgctcgcctacatctcctcgatgctgctcctctcccgcggcgccgtcgcgcacttcggcacgctcaagtcgctggagcactccctgtcccgcctcggccacgagatccccatgcagctcaacccgctcgagctcgccatggaggtcaccgagcagctcgaggccgaccacgccaggttcggcgccgcgctcgccaccaccatccatcaacaccaacacaacaaggtcatcgacgacgaggacgaaagcagcggcgctggcgagcacgagcacgagcacggctactactgcagccgcgcggtggaggtgggggcgctggcggtgcgctgctggcgcacgatgcaccgcaccaaggagctcttcgcggcgcgcgcggcgcaggcggtgatcgccgggctggggctcggcagcgtctacttccgcatccgcccggacccggagggcgtcgcgctccgcctgggcctcttcgccttcagcctcagcttcctcctctcctccaccgtggaggccctcccgatcctcctccacgagcggcgcgtcctgatgcgcgaggcgtcccgccgcgcctaccgcctctcctcctacgtggtggccaacgccctcgtcttcgcgccgtgcctcctcgccgtgtccctcctcttctcggcgcccgtctacttcctcgcggggctccgcgccacgacccaggccttcgcctgcttcgcgctcgccgtgtggctcatcgtgctcatggcgagctccctggtgctcttcctcagcgccgtctcccccgacttcgtgctggggaactcgctgatctgcatgtcgctgggcgtgttcttcctcttctccggctacttcatcccgagggagagcatcccgaggtactgggcgttcatgtactacgtgtccatgtacaggtacccgctggacctgctgctgatcaacgagtacggcggcagcagcagcggcaggtgcgtggcgtgggcgggaggcgtgtgcttgaggaaggggggtgatgtgctgagggggagagggatcgacgaggggatgaggtgggtcaatgtcggggtcatgctagggttcttcgtcttgtacagggtcatgtgctgggctgtgctggtcaggagggcagccaagaccacgctgtgatttttcacataagtgtgtgttgtaagtagtactcgtatatgggaaatgggacgtgactacgcgtcggacgtccgatccactagagagctgagatatactgttcctagcagtcttgtttgttgaaatccaaagatgtgtagctcccctattttctgttcacgtgtccttaacatttttaaaaaaggcaaaatttgctataggacatttaaaatttgtggcttttactatgagacacctaaagaacatatatcttctcataaacactgcaaaaatatggtggttaacggctggaaacccgtttcattattttattatttccggtgaaaacagatcaagaaacttcaatgaaagacaagtttgcccttgcagccgccgtgggtggaggtggaacggcagtggccatgtggatgacggttgctgtggggggaagtcggagatggcacggtggtgcgagaggcactggagctcggcgtgtcggtcggcggccatgcgcatgacaagctcgaggtgcgcttagtggcagcggatctagaggcgggcgtggtcagggggcaggtcatcattgtggtcgaggtcccgtgcggccatgtggacctagtcgtgcaagatctaggcgtggtcgttgggccagcagcgggcaacgtagcagacgatagaggcagagatggggtcgaggagcccttgcggctggatccatcccagtcctagtcgctgtcgctttggcggcgggctaggcggggtcgtcgggccaacagagtggcagccgcgggaggtcgcccattgccggccgaggagatgaggcacgggctcaggttcatggttggatccatcccagtcctagtcgctgtcgctttggcggtgggctgggcaaggacgatgacgacggcaacgatgggattgggttggaagaatttgataaaagaagagccaatgccctccgatgacgacaagaaggaggattgtgatcaatggagttcctcagcttgccactcactagaagggtggattgtgaatttgtgatgtatggatagtgccagattcttacttttgttgttgtttctctctctgttttcaccagatataataaaataatgcggcgggtgtccaacaactaattactatatttttatagtatccacgagaagatacacgttttttgagtgtctcacagcaaagatcacaaactttgagtgttatgtagcaaattttgccttacagaaatgaggtgaagatcaaagaattggtcgcttaaattgtttgataataaaagtgtgaaacacatatattgtactattccatctattatacattactataagatacctttgaaagaaggcaccataatcattgtgaagtctagaaattcacacattaataaaaaaagaagaaaaaaacttaaccattagatcatagtggactcatattataatggtatagaaaaaagaaggcaccatgacatggttgttttcagagagacggtgaacaatgctgaccatttccctcacccaccaccatgtaagtgtagtttaaggatctatcatgcataacatttaggcttagcattctaaattactcgatatgactttacttattttgtaggtaactattatctggtggattctggttaccctctacgtgaaggctatatgtccccatatcgcaagacaagatatcatttgaagcagcttgataccaaaggtcctgaaaatttgcacgagatttttaactaccagcattcttgtctacggaatgtagttgaacgctcatttggggttctgaaagagtaagtggtggattctgaagggcatactgttttatcgtatggagaagcaatcaaagattatcgtagcatgcttcgtgttgcacaattttgcaatggacaacaaagaacctgacatggatgtgcacaatgtgtttggtgagaacaagtacctttgcaggtcaggtcaacaaattggctctgcccacgattggttagcggcgacagccaagctggactatatggtttggcatgaattggtaagtgttttgttaaatggtagagcgttgttccggtccatcagctcgtacctcacggtacttgtacctcgcggtacagaaatgcatctaaccgttcgctatcaaggggcacgatggggaaaacggcggaagcgcagcccgcaacgcgcctcaggcattaggagccgctgcccacacgtcgtcacgtcgacatgcagcgccgcaagctcatctcgtagaagccggcgtcgaagccggcgaccgctccaattcattgacgcgcggtgacgcaagggaggaggaggaggccccgactccgattcactgacacgcggcgacgaatcatcccgtcgaggacgtcgtcaccgtcatccgcgccgacgaggcgcaccactgcgacctcgacgtcttcattttttcaagttgatgtacatgaccatccatgacgagctgtctatgttgaccacgataacattcacaggtggtcgtggtgcgaggcagcgatgtggttgtagagtggtcgtggtgcctgttccgacaactccacgaccacctcgctgcctcggccacctcgacgtcatggccggcaatgctcctaatgccaccgccgccgcatagcttggtgtctgatctctccacgaccacctcgtgtctcaccccgctgctcgcaatggctatgcctagaccagacctcgcagagtcgtgggccacacatgccgcatgctgccgtggaccccgcagcccgtgccgtcgacgctgggattggatctcgccgcacgtcgccgtcaaacgctggccctgcaacgcaccgcgctgctcgccgccgccgtcgaagccggggccgaacaacgcaggccgcatgccaccccgaacccttgaaccccgcagctcgccgccgccaccatcaacaccggccctgaacctcgtcgtccgctaatgccgccgtcaacaatggcctcaccgcccaccccagagcccttacatgcgaaaagtctatactacccttccacctctcttcaaaagacggtaccaccatatgggctaaaatggtaccgcatggtatcgagaaatctcaatcgtttgatttgtcccaattgatggctaggatttagtaccgcctcccttggctggatgggagtaaatctcatgcagaggaggcaccttcgggttagtggatcgggaggaggaagagcttcagccctcatgcctcagcgcaaatagatgtatgatgcgaagtttcttatttgcccttccacaacgcggacccaggggaggtaccgccaaacgggattacggtaccttgcggtaccaacgtttatcagccgtcggatcatgctcaatggacaaataggatttggtacctcctcctgttggactgtaaaattcctcttaatgagttggtatgtaacatcagctgcatggtgggaagtagtagaatgtaacaatataaattattttgatcttctcgttccaattgaatatactgaagctatgtttgtgtttgattgattttgcagtgcacaatatcgttcgtgatgtaggagtcagcagttattgttctgtgatagccctagttaatttgaaagtcttgttctgtagtgtagtatacacactccactaacagggttaaaattttcaccaaatttgtgttacagggcatattagtgctccagtgaatccatggttcctcacaattggaaggttgttatgcctacttacgttttggtgtcagctgattggttcgcttggcccattgtaatcacttggtttattaaggctgacatattatggattaggtgaccgtatggttccgtgactgaaagatggttatgaatgtgaaattttgctatgcttgtgacttgcaaaatatggctaatctttgtgttgcctgcatactaatggaaaatggttccattaggttttggccctactattatgttttatgtgtgctactgctgcagcagattgcagggatctggtgtgctacatgcaaaaatagatggtgattactatcaggtacgtactacttacaaaatttaggtgtaaaagtagcacatttgctgtgaaaattacttatggctctcaataagaggggtttgctagagtaaatccatctaagctttgttgaactttcaattttaagatgcctgtatccgagcgctaattgcttttagtttctttctgtgctgctctaactatgaaggaccaagctaagttcactgtacaatggcatattaagggcccctttgaatcgcagggtagaaaaaacggaggaataggaaaaacataggattctgacaggaattgaagtgtaaaacagaggattgcaaaacacaggaaaaacacaggaatggtcgtttgattggagcgcaggaaaaacgc

SEQ ID NO: 6568 - DNA, 7876 bp, Oryza sativa
  unsure (1)..(7876): unsure at all n locations
agcttctaaacctagtagttggtctatttgtgtttttttacctgtaaaagtattttttttattttctcattaaatagaaaataacacatgaatgaaaatatggaaagacaagagggaagtacgtacagtacatacgcacgtacgttcgacattacgtacgttggttccgtatatgatggttccggatgttcttttttctttataaaatagatctaagtaaatccaaccatccaaaataatgggtgcactaatataagtaaaaatagatggtcagatttttcttattattatggtgccacttggcgatttgagagtggttccgtatatgatggttccggatgttcttttttctttataaaatagatctaagtaaatccaaccatccaaaataatgggtgcactaatataagtaaaaatagatggtcagatttttcttattattatggtgccacttggcgatttgagagtgtttagagggtgccacttggcggtttggaagcgtttataggaagtttaatggacttttagtatataatagatagatagatagattggcgatttgggagtgtttatagggtgccactttgcggtttgggagcgtttatgggaagtttaatggacttttagtatataatagatttaaagacaaatatagtaatatttagagtcacagagcgagagctgctagacctaataggtggaggtctctttgtgattttttaatgtaaaaataattttgattataatttctcaagaacatagcttgttggtatgtatgtgatgggaggttcggaatgtgtgcttttttaaaaaaaaatctaaccttctagtataaaaataatagatcactgatttaaataaaaatcaatggttggattagagtgccacttggcgacctaggagcgtttgtaatgtaccacttggcgaattaaaagtatttgtaagatatttaatgaaattttatatataattgtctttttttaaaaatttctaagattttctttaatttaagtatgtgatatagtagcttagaggtgtttataaaatgtttaatggattttaacaccacacaggggtggggagggagggagagaggtttggttttttttattaaaaaactaacaaatcgatagccaaatgttttgttcttttttaagattttctagcattttatttaatttaatagcaccacgtagtagtttagaggtatttgtagaatatttagagtcacagagtaagagttgctagacctaataggtggaggtctctttgtgatttttttaatgtaaaaataattttgattatgatttctcatgaacatagctcgttggtacgtacgtgacgggaggttcggaatgtgtgcttttttaaaaaaaaaatctaaccttctaatataaaaataatagatcaccgatttaaataaaaatcgatggttggattagagtgcacttgatgacctaggagcatttgtaaggtaccacttggcgaattagaagtatttgtaagatgtttaatgaacttttattatataattgtctttttttgaaatttgtaagattttatttaatttaagtatgtgacatagtagcttagagatgtttacaaaatgtttaatggattttaacactgcaaggggtggggagggagggagagaggtttgggatttttttattaaaaaatctaacaacttaaatacatcagtttaagtagaaatcgatggtacgttgctttgtattatttaagattttctaatactttctctaatttaatagtacacgtagcgatttagaaatagggagagcttctaaacctagtagttggtctatttgtgtttttttacctgtaaaagtattttttttattttctcattaaatagaaaataacacatgaatgaaaatatggaaagacaagagggaagtacgtacagtacatacgcacgtacgttcgacattacgtacgttggttccgtatatgatggttccggatgttcttttttctttataaaatagatctaagtaaatccaaccatccaaaaaataatgggtgcactaatataagtaaaaatagatggtcagatttttcttattattatggtgccacttggcgatttgagagtgtttagagggtgccacttggcggtttgggagcgtttataggaagtttaatggacttttagtatataatagatagatagatagatagatagatagattggcgatttgggagtgtttatagggtgccactttgcagtttgggagcgtttatgggaagtataatggacttttagtatataatagatttaaagacaaatatagtaatatttgcattaccaaattagttgtattaaattaataattaaatatatttttctaataaatttatattgggtcaaaaatattactattttttttctaaaaacttagttaaatttaaagcagtctgactttgatctgaaacggagggagtactagtatcttacttcaattgcgataggaaaaactaatagaaaaaaatatagaaattaaaatagtatacttatcaaatcctataagaataaaaaaaatacagtaaagagaacaggagtcctcctttgataatgcccagagagaaacaaaggaaagttcaaaaaaaaaaaagtcacacctcttgttatttatagtatgcaacattttctacagaaaataaattatctttaatgatgttctaaattacttatttgtagatgaaagaggtggtactttatagccgtatcaacatcatgagataaataatattgaccatccgctagtctgaaattgtcatatagtactacaagtacaatgacaaaatgttcacagctgtgaactacgctggttacaggtttacttcgatcaaatctaagaacgtgtcacggaaccaccgatggcgacactattgcgtaaactctagatcatcactcaacattaagcaatcaatcaaatctacccctttttacgtatacaaattccctccattagtgcatgacaaagtgataaagttgtacttatatttcatactcatttatttttgacgaggcagtttctctctctgtcgctgtaaattaaacgaggcttccacttgtaacgaaagcgagagggagagggaggaaggcccaaggcgacaacgtattcgagctggtgcccccccaataataccactccaattcgcaatttggaatcgaattagaatttttcggattagccgcatcgcatcgctcccctcgcctctccccttcaatccccccacgccaccacgtcgtcgctgatcggaaaccgatcggcgattcaccaaccgcctccgcgtcggcggtggccgccgccgctgccgtgcgggagcgggggattcccgtggcggttgcatgtatgcgggaggggagaagagaaccaatgggggattggatggtgagggagcgggagcgggaggggaaggaagaggggcgcttcgccggcggaggcagccgcccacctccggctcggccgcgtcgtcctcctacccgtccacctccggctcggccgggtcgtcttcatccggcaggagggtggaggaggaggagcaagggggcggcggcggcggaaggaaacaggggaggcggaggaaggcggtcgcgagggcgatccgggagaggctgcccgcggcggtggcctgctggggcaacggcgcggtggttgaggggatcgggggcaggagcgggaggaggagcccgagggagagaccgggcgatgacggtggcggcgaggacaacccgggcgccgccgcgagggctcccgcggcggcgtggtgcctgcgtgtgccccgacgaaaagtgcccgctggagggaaaccccagcgcccacggcaaggaggacccgggcctccgcgccctcctcgagaacaacgacttcttctccgacgactgcaacccgcacgccgccgccgccttccccgagcccggcgaccgctccaattaggtgccattgatcccattccatccaattacccatcatcatcaccacacacatttctgtacacagttttacagaaaaagaagaagaggatttttcttttgttttattccattcggagctgtgatgaggtgtctgattgcgtttcttgattcctttcccctgattcttcctgtactttctctgtcactggttgtatgtgtactactgtgatggcaggcgtggtcatgaagtggaatgaaatcaatggatcggcatggattttcttggttttgttctgtagccatttgtgcgttactgtgttccatgtcagaggttagtgtgctgcaggctgcagcactgatgactctgcattgattatctatgataacaagtgtcacaggcaatacttatcccaaaataaatttagtatagaatgaaacgatattagtccgatgaatttttatgggcacttatctaaatttgttataggtaatgtttcatcctattttaattggtttatattggaatagaagaagtacacatcatttttccactcttctgtgtttaaagctctagtccaattgtgatgcactgagccactgatgcctgtcattagaggggctcacaggtcagagcttggaatcaaggactgctactattcaaaaaaacccaaccaattttgaaataaaccaacttttatatataaatttaaacataaaccatgtcacgctggctgtataaagattaacatatttttttgggatagtaaagagtagtgagtgtatctgcgtatgtttcgtccgtgtgccgagaaagttggcaggtgtagtacaacacttgaaagagaggggcaccacaaagtgtggcaggtgactttggtagaggtgaaatgtggtggccttgtgcttgtcctctactagctagtaccaccaatctaccacgaaggattggaatgaagagtgcaacaaccgattgctttttctcctgaaggcgattgcagaccatccggtccggctgctcattttatcattttcctgacaaatcggcccctcactctctttctcgttgtcaggatttttgaccatatctttcctactacaggttgtcaagttcacttcttattagttcttccaaagtttgcttttggatcaccttgcgatggaaatagccaaagaggtctcttgtcgccacgagaagctcatgctgttgagactttttgatggggggtgcaagcgccacatcagcagaagaacaccacatattgctcatgaaaaaatcatgactatcagtcacgctttgtattattatacgtgtggtaaatcaaaattgtcgtccgagtatggctccaacaaaatacatctttggatcagtctgatttaatctgatagcgtagcttagctagatagaaagggaaggcatggaaaggtctttccatcacaagctgtagctcatgttgctgaaatggatggtgcaagcgccagatcagcaaagaagcagcaccacatagtcacgatcgaaatcgggcgtaaacataaaattggtactattcgctatatgtcattgtctggaaatatgaccactagtattaaaggctaaatgcgaggacgatgcggaaagctgtctcgatttttttccccatcacataaacaggacgtatcatgcatgaaatgcctttatcaaatgatatcagccagcgcaaatattgtgaattgtgtttgatggttaaatggcggcacctatcgacataataccagcacggtataaacctagaatatcgatcttatttcttctttcaaggaaagaaaatatatgtacttgtgtggattctacaactgaagtctcaaaattaattcaatggccttatatttaattagccaagagctttggcatataccatagcagattagcagatgcacatacaactgacgaggttaaactactccctcattaggtcttctgtaccaactataccaaacacaaattttgttgaccaacttctagcacaaacaagctataacctaagtaaatcaaagttaagtttttttttcaagaccgtagaccaaagttactcaatcctagatcatatattatttggtacaatcttaacattaattgttagacgcctaagagtactactccccccgtcccaaaatataagtatttttttatctcgacgcagttttcgagatgctactttgaccaataatatctataaaaataagatgttttgaataaaaagagcaataaatctagtaacatcaatgttacatgattgatttttttttatttttttgctattaataatcaaagtttaaaatgtttgacttgacactatggtaaaattgtttatattttgagacggagggagtaaaatatatttgctaagatagctggtaatgctaattatctagtgatggatgccttgagccctacaagttagtagtaagatgtttcttagttgaggactactattgtttaaccatactgtctaacgacgaaaagtgagcatcgactagttagatttcttatgatagaatcagacgtatcgatcaatagtgaggcgctccacagtgacttctttaatattaaaatatgttgtcgcagtcttttggagctgctcaaaaggtagagtatgctcgtgtgcgtttataggggtaaatgtatgcgtgttgtggtttcttaagaaaaaccattttttttaatttatgtaataaaatatttaaaaaatattttttggtttcaaagttttacaaatctacacttttaacgctctctgggagagctttattttttatgacatgacacatgcccattggtgtgttgtaacggccgcgtgaatattttacacatgaacccctttgcagccctctaagagggcgagaaggaggctgcctgtaaaaatagcgacctacgacattttgcaagtggctcccttacaaccagccctctaagaggatgataaggggctgcctattagaaaactagttttgaaggacgacaaatggtcagccccagttgttttgcaagcggtcccctttagccctttgggaatgcagcaaggggctgattgcaaaatggctagctggcctttatgtggatgttagaaaacgcacatgtgccatgtcaaaaaaaatgtcctttggaaaagcacattttgcaagtggccaccttacagtcagccctataggaggacgataagggacctacttattagaaaactaggtttgaaaggcaacaaatggccaaccccagttgttttgcaagcggtctcctttagccctttgggaatatggcaaagggttgactgcaaaatggctagctgatcttgatgtggatgttagaaaacgcacatgtgccatgtcaaaaaaaaagtcctttggaaaagcgtttttaaaaaacacccttttagaggatattaggggtaagatttgtaaaactttgaaaaaatattttttaaatatcttaataaataaaattataaattaagaaaaatttaaaaaaaaaacgtcgccatctaattacggtacaattttgctatatatttgtcgacaaattttcccacaaaaatttgacagatgtaattacagtacaatctagtataattacactgtaacttgcatgtaattacactgtaactataatgtaacttgtacgtaactttaaaaaatctctccataacatgttattttggtaaaatggaggtcgtgggaacaaattctttcacataggtgtgtgctatgattttttttcttcctcaccgaaataaatcttgtaatagatctaacgattcaaaactacgtgaaacttacatataagttacactgtagttacatgcaagttacagtgtaattacatactccctctgtttttaatagatgacgccgntgactttttctctcatgtttgaccattcgtcttattcaaaaattttatgc

SEQ ID NO: 6569 - DNA, 27347 bp, Oryza sativa
ggaaaaaaaaagcatcgatcgaagacatcgcatgcagttcatctggcgaccgcttctcaagattcagtcagcagagagctcgatgcgtagtaaacaatggaccagaacaaaaaccaaactaatcaaatatctcaaaataaaagtggtggctgttcacatatgaccccgagtagagtgtccgtcatgtggaatagtggaagcattgaaggagggccgggggatggcgaccctgtctggcagatcaggtagagagcggtgcctgctcggcaagcaagcaatcaacgagagacaatagtctgcataggagtaacgaggcagagttcgaccattgtgtgattggatccaaagtccaatcttagtccggtgaattggacggctctttggggtcttcaactgcagcattatggacgcccttgtaagaagcgtccccatctggacattgtctacaacagcgtccacacctggacgccctatgcaatagcgtccttcctattttcgtaaaaattgactttgctttattatatatttaatttctgcattattaattattatgaataaaaaattcggagcaatatttaatcccaggaaaattcatttccttctttttctttttctttttcccctttttctttttcgaatgggccgccgccgtgcatcccgcaaccgccgccgccaaatcgcgcctgcgcctcccgggccacgttgcccacgtcgccgcccgcgcctgctttccccgcgaccccgtgcccactccctctctctctcccgcccgcgcccgcgccgaaacggccgatattcaattttgaatcccgccggccacgccctctctcccccttcccactactccggtgaaatcgggccgctcctggccacgtccgagccctctttcccctatttaagcatccccgctctcccctctctctttttctccatttcgccgagctctcccgtgacctctatcgccctagcgtcgtcgccctcctctccgccgccaccgccgccgctccggtagccgctagccgccgcgccgagccgcgccgagctgctgtcgggttcgcaagcccgagggccacgccgtccgcctctccgccgccgctttccgccacgggaaccccgttcgcaccgcgcgccggtgagctccgccatggccgccgccttcagctggcgtcctcgccctcttccatcttcctctctctctaacccctttcttcgtgttcgctaggtggttccgaagctcgtcccgccgtcgccatcgccctccgtcgctcaccgtcgtcaatcatcgttggtgaggcccctcctcctcttcctctctctctctctctctctctctctctctctcgccgcttagccgccacgctgccgcctagccgcttagccaccgctgtcgccgtccgcgtcgccgcgacgccgccaccctccgccgccggccggtcgccgccttgcgccaccgctacgtcgagccgcgctgccgtgcgccatggccgccaggccggtttgagccgcccgtgcgcgccggccacgcgcttccgccgccattcgatctaccctcgggtagatcggggccgtccaaccccgccgcccgcgtggctgccacgtggccgccatgtgtgcgccgcatcggcgccacgtgtgcaccacgtggtgcgccgctcctccccggtccgtggacccggtccaccgtggattttaattattgcggaataaatcaattaaggatttttctggttatagtaaaaacacagcgaatcttctaaaattcatatctaattcatccgagcttcatttaagcccattcaagtctcagtaaatcaagaaaaatgcatagaatccattaaaaatggttttgttctctgtttcagtagtcttatagcttgtttgtattgtttgctttgtatgtcgcttagattccggctctcccgacgctccggtgtactttgaaatagttgccgaggttcccccagcagcagagcaaggcaagtcatgcttgtcacttgaacatgttgatcctatattgcaaatgctctaccattttcctttaaatactgcattgttttataataatactatgagatgtttacctgctgttacagccatactacttttgtaccatgctcctttgttagcttgggatataacatgactagagattggactagggattgcttagccatgcttagtttaactagcacaccgtgggggaaatcacattaattcatagacttcaggttctagtgttggtgttggattaaagccaccgtcctggtgttagtcaattaaaatataccttatggtgggctgtgggtgcatggttttgatggtcgcgcccatggcacttaaggaccggttcgcgggaaaccctggaaaaattcctcgtacttaccacaagccagcgtgggcaacggctgggcttgtagtgtagctttcctctagttgacgcattcaggcaagggtgggcatgatggagcggggcgggcactacgacggcctctgtcgcttccgaatttacctaggcacgagaggggactgctcattgcccgctggggacgggagtgaaacctgaggtgtggtgtgcttggctagagggggttatgcgaagggtcctgtcacggcctctttttggtatgtcgtggtggtatgtcggtgcacggaaacgtgtcatggggctgtgtcttgtgggtacaattgtacacctctgatcagagtgaagctattcgaatagccgtgcccgcggttatgggcagtcaaccagattcaccgtgattagtctcaccctagtctagtctaatggaattgattaattcaggtggatggttgggcctgtcgcaatgtggtgtagcgttggacagttgatggttaatattgagtaattattacaactgttttactgctttcaactaccgtctttaaatgctcgctttatgcaaatgaaccgctcaagctgtccttcgattatatcctgcatcataccctctattccgatatgactcgctgagtacgggggttgtactcagtcttgctctattttccccaaaaccccagagttttagtacgcgtcagatggcggcttctccgaggaataggcttcgtccgtgccgtcgaggatgcctgtggagtggtgttccaactgcggtccaagtcaaggcttagctccagttatcttttaattttccgctgcatttatgtaagacttttataatgtttgtaagacgtggatctgtatgtcaactttgttgtttgtgtaccccggccggtcctggacgggggttttaatgcacattctgcttggaattctattcgggaatttctgggcgtgacactgagaaggcaagatttcacacggtcattaccactgggaacgtcagacgaaggtgggaagtcacatgtcgcactaaggggggttttggatcttctaatggggtcatcacgcatgaagttactctagggcacgaatctgataacacatgttcgtgcttttgcaataagccgaagcttcttcataagccatgtagccatgtcctggccgcgtgcgctaaaattaagcttgattcaacatcatacgtgtcgacgttctacctaaaggatagagttctgaatgcatggagtgctgagatcctcgggtggaggtccctccaacacttagtcgaaactgggggtgataaaaggatctatgtgccagacttggttttgttgaaggctggtaagggtagaagactgttaacagtgaaatttggtaatcggcaaagacgtcatcagcttagaatcattatcggctgcagcatctcggaatcagccgatgggagttatcaagtcgccaatagtcggattcctgctatattcggttaaggaaatcaatctactaaaggaagcttatctctaagtgaccgagtttaaagaggatgcggcatggcagtttatctattaattaggaatagtttgttagtttccttttatctttaggaaagtgtgtttagtgtccgataaggactttatattttccttttatctttaggttagtttctttcttgtctgacaaggacttgtatcaacccatgggtataaatatgtatacccggagtctatgtaatctatcgctacgatcaatacaattcggcgcatcgccacccttttaccttttctacttttgttttttacgttctggcggaacttggcacccgacgcggggctgcatcgtcttcgatctccggcgaagggataagtccaatgttccgtcggcccgggcaattgtctcatctacgtcggcgtcgttcaaggctgcatcagtacattcgacctcttggattgctctggtttggataatatatttgcctacctatttatcatatgtctctgttaatctagtcttagcatatcaatttagctctatcggctgcttctcgttttagggtttctgccggtatcggctaaatcgcgttgctagattagattagcttagacatctacctccctgaaaactcagtcaacagcttgattgtctagatattatgtttcctttcatacttagtgctgcatcagttaagtttgatctactaagtcgtgcttagaaccataatctctagcctgctttttgattgccaataagggtttcatcggggtttcagccgatgagttatctggacgttgcatcggctcataaggattgcatatacatataagttggatttagccgatgacaacaaaggtttcactgtttaatctaatcttgtggatttcatgacatcgggcctccagccgatgtatgctttaacctttagatcaatgcttactctatcatatcaatgctagccgattggttcatactagactatattattggtatattttattatcagtagccgattgcctatatatcattatttactaaagtgttagaatctacattggacgtatagccgattgcttaaaccctatcgctatcggctggtatcggcattggctattatcggctattggctggaactactctatcgccttgtcagccgatcggctgttttgatctactatttgcatatcttgtcagttgcaggatcaaactgactggcacgcccgcatctcaccaatctttggacctgcacaggagttaagcagatctcccaggccggcgtgttgatttttttcatcaacaaagacaaacacggcttaagaaatgatatggatgcatccaaagcgggagggcttgtgaggcgatgtgaggattgtcttcagtacgggcaccgcactagagattcctttggcaacaacgtgcgagaaggaatagaaggggctctcggggtgctcatgatagggaggaaggaaacctgcagtagttataacctacactgttcagttatttatgttcggtcatgatatgtttgctgcatgacattgtatttcaataagtttgtaatatgttagtcaataagtatgtgtaatatttatttcaataagtttgtaatatgttagtcaataagtatgtttaatatttatttgattatggtaatgttgtaagattttatcgtaaggtgttaccaagtttgtaacatttgtaaacctactgttgtactatttatttcaatgatacgtgtcgagtttgtacttgtactatgagaaaaatttattccttaatttaatgcattatatactttttcgtatgtgcacttgatgaaatttctaatttacccttcatgatgcacatgcagatatggaagaggaatggccttacccgttgcttagcaaagagatcgatgcacgacatcatgcaaagaagatatctgatggaaattcatgctctagtctagttgtcctgattccacgtacagccggatggtgggggattgatccacgatggaagccgaggtgcataaatggttaaagtttgcaacatcatgatatcgtactatagcattgcctaatgtgactaataaatttcctcataggttgtcagctgcaggtcttcttacctgcgtttagatgacgcgggcaaggatgcattacgatgctagagaacctaaacaaaaacaaatgggggcacatagcaaacgacgacaaaatatcgacaagtccctacttatggcactggttgataggtggaggccagagacacatacattccatctaccgtgcggagaaatgaccataactttgcaggatgtgtccatgctcacggggctgccactagccggccaggcaattgtacgtccggaccctccggaagattggagagatgatattgtatcatgatatgcctgtattttgccacggtacgctaccggtgatacagacgacgatgaggacaaaatatttttctctgaaaaagaaactcatggccccacattgaagtggttgtcacagtttgaggtaatttaatatttgtaattaaggcatattccgttcacattcacatatctgacaacacattgtttttttgttaggtgcgatatatgccccgacgatgtccaggagtaccaactgacgttataccttgaggcttatctactttggctatttggttgggtcatgttcaccggctcgcacgggaacactgtggacgccaggctaatcccccttgctcgccaaattgctgaaggtaatatagcgccttctgcatagtttagctggggatcagccgtccttgcagccacataccatggattctgcgacgcatgtattaagaccggacaaagggaggcgattttcacggggtgtccacttttggtcatgttgtggtcgtacgagcgcttctcgttcagacgtccatacatgagcgtggccgtggcccacaaggacgattacactgacgcagttgatgatcgtcctaccttcggtactcgctggtgctacggaccagtacgtatgcttgcattaaaggaatatttatgtcatttgaatgatattgcataactaaatctacaatctcttatcgtgcagccacagtgggcgagaatccaggtgcacaatgtgtacgagtacttcaccgaggcgttcgaaagccttagggaaaacgaagttcggtggactccgtacacgaacgaagaggctattttgcgtgcaccacatggagtaagcatcttatgttaccacgatgaagcgtactggatgacacgaaaaatgctggtgtacgacatattcgtcgaggggtataatgttcaaagggtaatgcgtcatatgggactgtaccaacaagtcccagttcctattggacttcaccttccaccagatgtaaacacgtatgttgttatttcaatcctgtctaatttctgtgcagtaaaaattttcagatataactaacagctaattgttgtatttttgttgcaggcaaaagaggcaagctgacaacaggtttcatcgatctatgcactcaaggatgaccccatggatagaggcgtggtcacaggccttgaatgatgccgtccaggagaccagggcatacgaccacaacacttacgaacaatacatggcctggtactcatcgcagactcgcatccggctacttgcacccgaggaccccgacgagcgaggtccaccaacaattgatcaaatatatgatatgcagctagcaccccccgctcacttgacggtactactagcatttaaatatttcgttgcatcggtgtgtccttatacatggggttcaactttctaacattgttgctacgctccatgcagaccgacattgcaagggagttagtaagggatgcgaagacattgtgggagaagctcagagatggaatggcgggtaccaaccaggaagttatggccccggtcgactccctgcgtagaaaaggaaagcgaatcatgcggctcgcatcgtgctgacattcctcggacgtctatactccggtaacatcaagaaggacgatcgagccaatgccggagcgtccctctacctcttcccggccgtccacctctgcccgcccttcagcctccgcgcgacgatccagtgatggttgtgcaggagtaaggtcaacttcgtttcgtgagccacccactattccgactatcccagaaatcactgacatttcggaacgtctaggaggatttggttcaactcaaggtaaaatacgttattgcagaatgctaaaataaatgccatttatattaaagactaatttattcgttcgcagcacaaccggaacgggtacccccgcatagttctacgcccatcacctctcaatggcagggtgggtttgcgtcgtttgctggtacgggatagctcatcaatatgctaattttttcccaattgtttatgtgaaatgactaaatgatgttttccaattgatgacagagggaacgcgaatggtctgtcccgtgcctcatatgcctcatgcaatgccacaaatgatttctcaaatggctcccgatgtgccaacctcacactggcaaggaggatttgcaccatttgcaggtccgtgtacattcagtaccatattggcatgcatatgtccactcgtaattttactttttgcttatattaattgcatatacagggactagccaaggtatccctaccataccccaaatgcctgctgattttatcagacaaagagggtttacgtcgttaggcggtcagtctccccttacatctaatttcatattttttttattatttcaatttattaatttttcatgtatatgaatcttattgactatttacttcctgatattaacagggcctactcagtcagttccactgcatgcacctacatatgtcaccaacccatggcaaggacaatccatggattacggtggtacgcacagccatcattctccatacacatatatcgatggcacattcatgccatacatgactcccacttcaacttaagacaataactccgtgacactttatatggatgcaaggcacgtcgtttggtggtggagtacagggttatatggacttgttgcaacaaggtgattggctatttggtcaatattcctcgcatcctcatgaaattccatatatgcaagcaccgtcaacaggtttggattttttttttttgtgttattgttgtttcctccagctttgataatttcattgatatctacattgcttctgtagggtcatttcgccctgaactaatgtcagggtttaggccttacactgcatcgtacggcgacatgtccagcttcggtggagggtcgtcatcggtacccaatgagcttcggacttcacaaactgatgatgcgccccaagtgacacagcccacacaaccagaggttggggaaggaaacgacaatgacccgcgcagatctaaccgtgagcgccatgagccaaaccgtctgtccctctcaggccctcgacatgccgcaggacaaaggaaaaaaactacaaaaaagcaaggtggaccatctaggactacgactgaccatgacgatgatgacgaaaagaagtgaacattatgtctttcagttcactggcaaccctatctgaaccttgctatgattttggcttattcttcatgttatttgtactgcaatgaacattatttattcgtactgcttattcttcatgttatgtatgatgtttcgtagttcataaatatctcatatttatatgccctattttgtagccagttaacacatatgatttttggttaactattaattttttgtacgagagctaacaaaaataatagtcccacaaactaaattaatagtgcagtgtcgatgttactcgtgcggttaaaattgcatattactttaactttttactactatgacttaaattgcccactaatttcttttcacagagatgcaacgatacgcacctaaaatggcatcctctctttccaatcacgggacatgcgccagagcatcaaatcattcacaattaaactttcaagatttcgctgcgctgcgccgaaagtgacttcgtcgctttgtaattaataaagcaaatagttatgcagcatgtgccgctgaaagtgacggtgtcgctttgcaattattgtcatcacgagtgaaacagtctcacgctattgaattgattagtgaagcattcagacgcaccgtcgtctctttccaataattgaaactgcgcagcttcttgccatcccctataaacaacaacaaaacctagcacacaactacatctcctcttcataaacgttctgctggttctaacttcgtcttgcgtattcttaggcccgatcttgaggcaggaactgagtagttgttgaacttgctctatgttgttcgttcacccactattcggttcctgtcccaagatcgagtctatgaatatacaaatgtgatttttttttactacattcttacacccactatttttttcaagttccaacatccgtttgtgaatatgacctactcctgcaaattcataaactcggtgttgcatattcttaggcccagtcttgtggcaagaactgagtagttcgttaactcgctacgtggttcttgtcacaagatcgagcctgtgaatatgcaaagttggttttctctatgaatatggcatattctaaattcctattctttgtcaactttgtaaaaattgttcccaaatgatctctctacttgtttatatatttttaataaatatatattcaatttctatttttctataggtaatatattgtttctttctctgatatcattattttcaaattccatgatatttatttttcttctcgtatccgcgtacacaatctttgcctattttcaatataaacatgtttctcatgttcatttacgtatacatatgttgcacacataataaaaaaatatgaaaaaaaatcctttctactccctccgtcctgaaaaaacgaatctagtactatgttggctttttttgggatggaggtaaaaaattatactttttactctctcagtcccgaaaaaacaaatttagtactagtttggttttttatgggatggagggagtacgtaccaacggtgacatgaactattagcgatttgcaaaacgtaattagctaatcactctggcgcgcggggagagcgatatcgctcgcggtctccctctttcaaagagcgagaccgaagccgtcactgtcgctccaggattagtagatggattaggggccgtgggccacgcagcaacggtatcgtgctttggaagagcgataccgctggcgccctcgtgcgcgggtaccgcgagaccgatcgctctcgctgatcgcaaccgcgagaccgctcgaggaccccacatgcgtcagtcgctacggtctcgcgcaacccgaccgcgagaccgcacgcgctgtcgcgcactcgaagcgcaagaccgcttcgagttccgcgtgcgtcaggcggcatcagctggaccacgctatcgctttgcgaaagcgcgacatctcctcgctctcgcgctttaggaccgcgacaccgatgagcgccaccgctttcgtgcgcacattacgcgatatcgcactatcgctgtttcaaaccgcgacgccggtatatttccgctaatccgcccctaagcagcttattcttgcaatttcggtgaagaacacgattactatcaaaattttttccaaagttgattgaaaacttggatcatcatgcccaggaattcgccttgatgaagtcagatcctccaattgctcaacaccgctcaccccgtcggcaaactggtcaagctggcggaggaccaaaaatccggtctgacactcaacccaacacctcttagtgttccgcaagaggaaactggttctgagtgacgatgaaaacgacgatgctgaaaaggctggcagcaaaggggtgactggaaaaccaaggcaagctcaccttaagaagaaaacatccggtcgtcccatgccgaaaatcaggaagtcctccaggtacaaatcatttgaccattttccttgtattgctgctcactcactattgaaatagcactgatagtataactcaaatttgtaggaagccatctgacatagatccttctggaaaaggccctaagccgactgacatggagacgggtccttcaaaagaaactgggccgactgccgaaaatcgcacgagtgacaatcaaccagcaaccgacaatgtagagaccagcaacgagcccctgactggaaatcagtcggccgaagctggagttggtgctaatcaggagcccccgactggaaatcagtcgggtacagaacaaaataatgacatctcggaagtagagacccaggctgatagccctcccaagacgagtgttggcgccaactctagaactaattcccctgttagggtgcaaggacctgcttgtccccgaccggaaatcataacaggtaagcaaatcctccaaatctgttttgatccaacagactttcttcaattgtttcaccattattcatgaatgcctaaggcccgatgatcggcgacgaagaagaggtcctccggatacaatcggctgaagattctcgcccaaccatattagtcaagtggtgagatgacgaaatgcaaccacaggggatcgtaataaataaacaaaaagaggatgaggaagtatgtctgctgaaaaggacactcggccaagctactcgtcttgtaaatgtaagtatccctatacacggcttcaatcatcctgtcagccactttgcttagatacagataaatttgtggtacagagaatccatctcaggaatgaggcgaagaccgcaacccttgaaaagctagttccccaccttggaacccttgaagcaaccagaaaccagctgcgtgaagccaaagagcttgctaggaaaactgaacatgaccttagagatcggatcgtggagcttcaagactctaactttgagctgagcggttcatcaaaaggtaaacatcgtctctgtctgacctgtttcatgttgctatccatgtgcatctgaccaatgaaaagcaatacagtgcaagcttccaagatatccgagctagagaagcgaatccaagctctagagaaagacaaggccgaattggcaaaacagagggactcggctctgaaagatgtcgaaggtactggtagctaatacttcaaaaaccactctcatcttcatgcctaatcattgatgtaaacttattcatgtagaccgcaagatcaaatcccaggcccaattcgacgtcttagttaataaaatcaagaagcttgaaggagctagagatgaagtcgccaatgccgctacgccactcgtccaggccatgtttttcaataacaacggtccgagttcacttgatgctgtcgaaatcttcgacaagctgagagctgctccggatacatattttaagaacatcaaagaagctgggagtatgggggcagacctagcgttggcaatgaccaagtccttgtacccgaaaattgatattgatgctgttgacggctttgcagacgggacaagtgaagaggccgcccttgaccttatcagtgatgcgcaaaaggccgctgacaagataaccgctgatgtggttgagagattccaggacaacaatcttaagccgactgggtctgataattctgatgatgaaagaactgaatctaattgtttgtgtattctgatgataatgatgatgatggtggaggcacaatttgtacaatactgataaatttatgatgtgcttgatgatttaaacttagctctagatttcttaagtttttgtcaaaccttattgagcctagaacccgcaaaagtttttaaaaaaactctcagtcctcattggctaagccaaaaaatcaatcaaggcaatgataaatcaagtaaacaaattgaattgataaaaatcacactccattattattatagtagcccccgactgataactcaatggacaacttgatgttaacagtcaaagaggaagatacaaaagtaatgcctaagcataaaaacaacgaagatgttcaatattccaagagttgtcgatatgagtaccgtcttcacgcttgagtcggtaagaacctggccgagtgactttagaaattatgaacgttccttcccacaagggagataacttgtgtcgatcccgtgtagtttgaatttttctcagaactaggtcgccgactaaaaaagctcgagatcaacattgcgattgtgataacggcgcatcccttgtaagtaccgagccgacttcttccagtcggttgagatcatctactcggtcttctccgtagcgctcctcgctaaagttacgaagttacttggcaacatcgcttccgctccatagactaggaaaaatggcgactggcccgtagctcgactgggagtggtgcgcaaggaccatagtacggatggcaactgttctaaccacttgctggcatagggatgcagtcggtcgaaaactcgcgcttttattccttgaagtaccatgccattggcgcgttcgacttgtccattgttcatggggtgcgctacagaggcataacaaattttgatgccgaagtcctcatagaaatctttaaatactctgcccgtgaattgagtgccgttatcagtaatgatcctattagataccccaaaccggtgcacaatgttgatgaagaaatctctagccttgtctgccgtgattgtgataaccggtttggcttcaatccacttggaaaacttgtcaacagctacaaagagatgagtataaccaccgactacctttttaaatgggccgaccatgtcgagcccccaaaccgcgaacgaccaagacaacgggatggtttgcaactcctgagccggtagatgagtttgtcgggcgaaaaattgacaaccctcacatattcgcacaattttgtcagcgtcggacacggctgtggaccagaaaaaaccttgccggtaagccttgccaacgatggttcgtgcggcagcgtgattgccacagatgcctgaatgtatatcctttagcaattgtcttccctcctccaaagacacacagcgttgcaggattcccgatggacttttcttgtacagctcggtctcatgtatgacataaagtctactgcgcctggagatctgctcggcttcatctttatcttgagggagttcttgttttgtcaaaaatcttataaggggctctctccagtcggcttcaatcatgcttacgtcttgagtatccgtggcctcgattgtttctttccttggtacggttggctcatagagatgttcaacaaacacgtcggaaggagctgcttctcgttttgaaccaaaattagccagtctgtcggctgcctcattattgcgtcgaagaacatgggtgagctcaagtccatcaaatttgtcttccaacttgcataccccctgtcggtaagcggtcatgttatcatcaaggcaggaccacactttcataacttgattaacgaccaactgagaatctccacgaactatcagatgccgaattcccaaggagattgaaatctttaatccatgaagaagcgcctcatattctgccacgctgtgagatccagaaaaatgtatccacaatacgtagctcagcctctctccagtcagggaaattaggacaacccccactccagtgcctgaaagcctcttcgacacatcaaaatgcaagtccaatactccatcttttccacgggcatgtcttcttggcactcagtccactcggcgacgaagtcggctaaagtttaggacttgatcgaagttcgcggcttgaaggatatatccaaagacatcaattccaaggcccattttgcgatccgcccgtttgcttcgcgattgtgaagtatgtccccgagtgggaacgacgtaaccaccgtaaccgagtgaccttggaactagtgagataatttcctaatggtaattaaaacaccatataatagcttttgaacctgagggtatcttgtcttggagtcagccaaaacctcgctaaagaagtagattagtcgttggactttttgaacatggtcttcttcttcacgctcgacaaccaggactatgcttacaacctgggaagttgccgacacgtataacaatagcggctcttgcggatgtggtgaagctaagactgatggagtagtgagatgtttttttgaagtcttcaaaggctttttgtgcttcgggtccccactggaaattgtcggttttcttcagcaacttgaaaaaaagcatcccctgctcgccgagtcgtgagacgaaccggctgagcaccgccatgcagccagttaattttttaacatctttctgggagctcagcgatttcatgttgaggatggcgttgattttctccaggttggcttgtatgcctctatgggacaccataaatccaagcaacatccctgacggtactccgaagatgcacttttcagggtttaatttcatcctgaaagcacggatactcgcgaaggtctcttctagatccgtaatcaaatcatccttctgcttgatcttgacgaccacgtcatccacataagcttcaacgttgcggccaatttgggttgaaacatctctggatcatgcgttgataagttgttcctgcgttctttaatccaaaaggcatggtgatgtagcagtaggccccgaagggcgtgatgaatgaagtcttcaagcagtcggattcctttagtcggatctgatgatatcctgagtagcaatccaaaaaactgagtagctcgcagccggccgttgagtcaactacctggtcaatgcgaggtaacccaaagggatctttgggacaagacttgttgaggtcggtgaaatcgacacacatgcgccattgccccgtcttcttccgaaacagaactgggttggccagccagtcgggatgaaggacttccttgatgaaacctactgctaacagcttggtcaattcctccttgatcgcatccttcctatcctgtgcgaaatagcggagtcgttgctttatgggtttagcgtcttccttaacatgtaaagagtgctcaatcacctctctaggaataccaggcatatcagatggtttccacgcaaagatatatttattattttgaagaaaggtgatgagtgcgctttcctatttacaatctaacacagcgcctattacagcagtcttagtaggatcagagggatctagaggaatcttcttggtcttagcgtcactttctccgctcttgggcatcttggtcacaggcacttctccttcgcttgctgtggacgcagccagtcggatttcttctcgggcgagcgtgatctcgcgggtctgggccatcttgcagctttccttgtcacacgtgacggcttgcttgatgtcgctccgcagggatatgactcctcgaggactaggcatcttcatcatcatgtaggtatagtgcgggacagccatgaacttggctaacgctgggcgtccgagtatggcatgatacgttgtctcgaaatcagcaacttcgaagcaaacgttttctgtgcggaagttctcccgagtgccgaaagtaactggaagagtgatctggccgagtggtgtagcagatagccctgggatgattccgtgaaagggcgcattactcagctttaattctgtgcgagggatctacatgtcgtctagagtcttggcaaaaaggatgttgagtgcactgccaccatcgatgagggatctgcgaagcttgacgttgcgaaccactgggcctagtaccaggggataccgccccgggtggaccactctgtcaggatgatccgagcggtcaaacttaattatcgtctctgaccaccgaagatattggtgcgtgtcgggctgaacagcgttgatctccagttcggttagcttttgctttctcttggattcataagccaggggtccgccaaagatgtggttgagttccttgcgatggtcttgaaaaccagacggggcatcgtcttcatcatccttcttctttcatgtgctttgatctccatcagaggtcttgcgtgcgttcttggcgtattgttctatgaactgtttgtagacgaagcaatctttggccgcgtgattggagtttggatgatgcggacattgggagttcatgatcttgtcaaaagtgttgacgagtgaacgttgtcgggaggatggtgtagtagttgccataagttcctcgggcttacgcttgcgatccttgtgattggtacttccactcccccctgtagtcatatctttcttcggcttccaagtagtgcccgactgcttggacgcggtaatggcatcttcggctttggcgtactcattggctttttcgaacatctgcttgaccgtcctgggaggcttgcgcccgaacttgccgactaggtcatcgtggcgaatgcccttggtgaaggcggcgatgatgacgtcgtcggtgatgtcagagatcttgttgcgttgctcggaaaagcgtcggatgtaatctcgaagggattctccacacttctgaacaacgttgtaaagatcaaactgtgtaccagggcgttcaaaggtaccctagaagttggcgatgaagtggtcgcgaagttccacccaagatccgattgtgccacagggtaacccgtgaagccaggaccgggcagaatccgctaggaccacaggcaaatagtttgccatggctttgctatctcctcctgctgcgcaaattgcgagaccgtagatggtgagccaagactccgggttagtggtgccgtcatacttctcgattccagtcggcttgaagccggctggccaatccactcgacgcaggtcgcttgtgaaggcagcaactccatccacgtcatcgtcgtagcgatctggtgaatggtggggagcgtagcctcttgccgcgcggcgctggttgatagtatcgcgaagatcgacggggcgcctgcgatgtggggagcgagattgttcaactcgacgctccctatgtcgtttgggaggcgagtggatagatcgctcatcgtgacccttgctcctgcgactggatcccgcgccgacgacgctgaggcttggttggtgataatcttgagatcgaagagggggaactcggctgccagtcggcgtgcggacgcttgaggagttaaccgggaccgaggcggcgatcatggtcttggtctggttcaagatgttgacggcgatcatggtcttggtctgattcaagatgttgacgacgtgattggcttgattgagtgcgtcttccttgaggagggtgtcgaggagggtgatcgctgcaaccgcgttctgttgaggggtgcgaaaaaccaccgttccctcgacgtcttgctgcccgataagttctcgtgctcgtcgcccgacatccaagtcatgctgtcgccagtcctcagcctcttttgtagcccgttcgcgctcctgttgctcacgctgtagccgttctcgctcttgtgcttggtgctcctcttctagtcggcgtcgttcggcttcctgttgcacgcgttgttcttctgcttctcgggctttatgctgttcttccgtctcgttgtcagccatgaagatgccgaagtagagaggcatgtagttatattcaaagtctttgtcgaagtcgtcgaggtggcggtagtcgtagcggtagccaaagttgtcgtactcaatgatctccgttggccgtgagtcaacgccaggggagctgaggtagccatccagttgttccgtcgaaaccgtgctgagaggctggagtatgacgctgacttccctagagctaggctggatcggggcagaggccggatccagcctagacctacggggagaagatgcccttgtggtgaagacagcagccaaatcatcggggagtttcatcaggattggcggataggccccatcatcttgatcgggtcgtgttggagtaaatgggatctcgtccgagtggtttgaagccaactcgatggaaatgatcttggggtagatctcggccgagttcgggataccgaacggggcggagatctggcctcttcccgactggttcgatccgagtcgaggagagaaatcttgccgaagtcgttggtgatgaagtcgaggctgccgaaccggaacgcctgcccgggagggaagacgaagtcgtcgatgctagaaacgaaacccatcacactagtcggcgaagaacttgacgctacccctacctagcgcgccaactgtcgaaacaagattttggcaatactaaaagggggtggctatcaagctggaaaagtggatgagttaaaagacaatgaattttatacaggttcaggccttcttaatcaagaagtaataccctactcctgtccagagattgatccgccgagtatattattgattgtatgatctgggtgaaaatcgtgcccctaaaggcacccggacctctcctaatataggggaaggggcccgtattacaaagcacagcccatattcctaacggaataggtagttacagataaaatacaatcgtaaccgactaggatctcggatatttccttgacatacaagtttagaattgaacccgagtccttttaaagatattctatctatacatgacaccccatacccagttggactatacatgctgtgtaggtatggggtatccataatctccacagtgaatactatgaaataactctgaataaccaaaacgtgattaatagaaaacaaagaaaaacacctatcttacttttggccaaacaaatacatcaccaccatcacaataagaggtggcattgttgttgaaactgaagatggtgttgaaatccacctaccaccactgggacgtcgatatgagcagtgcatggagagattttgggtcgaaagcaaaaccatggataaaactacaatgtgtaagtgggagctacgaatgtggattttgtgatgaagttatttttgttgttacagaacattggaagagtaaggggaccaattgtcctagggtgaatgtttattagacagtttctttaagcattaaaaaggtgtccggccctatcgtttggcttattcggggaataagccaaatgacatatttacaaattaaaaataatttgtgaacaaaaattttatatacgtgttattagcaatctaaaagcaaaggctgaaaaataaacttcgatgaaaaaacccgaaaattagctccaaatttaaggttgaaaatttaaattttagctaataagtataagcataaaagaattttcgtttaaggctggtcattacttgataatatacataccaattaacaccattcatcgtgtttttattgcggcaatggttaatgtgaagaatgagcctaacattagtggccttccaattgtatgtgatggcagatatctaatacgcactacgattcaacagttgtgatatttttaggatatggcccatgtaatcacaggggctacttacataggaatagtagataatatactcccttcgtttcaaaatatttgacaccgttgactttttagtacgtgtttgaccattcgtcttattcaaaaaatttaagtaattatttattcttttcatatcatttgatttattgttaaatatactttcatgtacacatatagttttacatattttacaaatttttttaataagacgaacggtcaaacatgtgctaaaaagtcaacggtgtcaaacattttaaaacggagggagtacaaaacaattaacacagttcattttgtatttattgtggcaatggttaatgtgaggaatgggccttacatactagccttccaattgaatctgatggcagatatataataggcactatgatctaacggttgtgatatttttacgatgtggcttctgtaatcataactaatatataggaatattatcgataatatatagagtaattaacaccattcattttgtttttattgcggcaatagttaatgtgaggaatgggccccacattagtagccttccaattgtgggaatatatcttatgcaaataagcttttagtgcacactccgtacacaataactagcaaatatcacagaaaattctaaaataaattggacacatactttcaataatattacacttacatatgaaatcttattttcaaatccattatattttagccataacaaaaaaaaagataaaattatgacatatttttactcttaaaattgtcagatttttcacctttttttacagctaaaatatactgaatttaaatatgagactttgtagatatgtataatactattaggagtaaatgttcaattttttatagaatttttcgtgacatttgctaattattgtgcacagagtatgtaagcaagcagcaagcttgtgtgtataggaaatgttccttccaattgtatctaatagctaatactccatctgtcccaaaatataagcatttttagacactaacatggtccaataatatcaataaaagtaagatgttttaactaaaaaaagttgcatattatagtagtttgtttaacaataaatctaagtaacatcaattttatatgattattcttttgaattttttttgctattaataatagttaaagttaaaaatgtttaacttgttactataataaaaatgtttatattttagaatggagggagtatcttatatgcatatttttgatgacgtggctatatgaaatcgcagctaatggatagatattgttcacccacgcgtaaatcgtaattaacccatttttatatacactcttttttttttctcgcccggtcgcggcggccataccgcaacaagttctcctccgccgtcgcttccacggcctccccccatcccaaacgcggtcgatcgccggcgaatccccaccggacgccgaggcgactgccccgccgctcgccaccctccatccccggcgtccccgaagtaacccaccgcctccttcttcttccctccatctctcctgcacccgagtgagggcgaccgcgatctctcagatccaccgaatccggagaccccgctcgcgatcgagtcaaacgcctccgaacccttaatcctcgccgccgccgccgccgccgacgacgacgacgaggacctccccactaggatgagcgggaggaagaatgccggcaaggcctcgccgtttctgctcctcctcatctcggtgggctgcttcttcgcgacctacaacttcctgacgatggtgggccacggccggagccgggacgccgggccgcggaagattctcggcggcgtcggcggcgtcggcggcggcggctcggacccgtcgaagaggttccacgtcgcgctcacggcgacggacgcgctctacagccagtggcagtcgcgggtgatgtactactggtacagggagatgagggatcggcctggctccgacatgggcggcttcacgcggatcctgcactccgggaagcccgacggattgatggatgagatacctaccttggtggttgatcccctccccgaaggcgcggatcgagtaagaaccccgagtttgttcatgttttgcaaacgccattagatggcaaaatcatttcgtgaagttaaaacgagctcttgctgatatgacgttcctacgcagggttacattgtcctaaacaggccttgggcatttgttcaatggctgaagaaatcaaacatcaaagaagagtaagtagatgtattttgtttcttgtaagtttgttatgctaaatgatcttgtaccggcggtttcctaatggaagcatttgcagctatgtacttatggctgagccagatcacatctttgtgaggccattgccaaacttagctcatggcgacgaacctgctgcgtttcccttcttctacatcaaaccaactgaaaatgaaataatactgaggaagttctttcctgaagaaaatggaccagtctcaaaaattgatcctattggtaattccccagtgattatcaagaaggtatctctcatctcgacgcatgattaataggatgcttaggtccggctataggagctgtcaagaactcaagatagcactgtctgcccaaactagttcttttcagttccgcataaaaaacatacatttaagaacattgtgcaatgccatagttcaatactgtttcaatgcattcgtgatgccttcaaaacatctccaggcccagcttgagaagattgctccaacttggatgaatatttcgttgaaaatgaaagaggatgtggagacagacaaagcttttggatgggtcttggaaatgtcggtactattatgtgtacagtatttcttcttgacttaaacatgcacaccccttattaatttgatctttcatattcatgtttataggtatgcatatgctgtcgctagtgcattgcatggtgtgcactacagccttcgtaaggattttatgattcaggtgcttagaaactgtcactagataaatcatctcacgcttcgtcacgatgtcttatatcatataagatgtgcttgatactaattgcagcctccttgggacgcgaaatcggacaacacattcatcatccattacacttatgggtgtgattatacattaaaggtgactactgtttgactttaagtatatgtcatcatatcagttatgtcaattactttgtaaaatctatttatgcattgtcatcaaaattaactttataagcttctcatgaaagagcttttttgtgtcttgtccaaactcagggtgagctaacttatgggaaaataggggaatggcggtttgacaaaagatcttatcttcgttcaccaccgccaagaaatcttacattacctcctccaggagttcccgaaagtgtggtatgtgcttaatatttagtattatttcagtatgactgatgccacttctcttaaacatgattgacctttacatttacaaaattctaaatcaccttgttgagagtacactattttgtcccactgaaatttgccatatattatattgcccacttttagcctgcctatttatcccctgcatttttagctttaggtgggttctatgtcaaacactaccacaatcacaaagagttgactgaatgaaaagtgatattatctactactacctctgtctcagaatataagctctagagttggacacagtgattaagaaagtaagtagaattaaatagggagaggttgggattggttgagaagtggaagtaggtgggaaaagtgaatggtggagggttgtgattggttagaaagggaatgttggtagagaagtagttatatttttggacatatcctgagtgctaaaagttgttacattttgggacggagggagcatctttctaacataattaatgtttatttagtgtaaccctatgtctcatatgctatgtttcctgataatattattgtttctgtgactaacaatggatttcttatcaaatacaagagcatatcacctagtaagtatatagttactgaaaacaagcagatctgagactttaaaaacgtaaaatggtaactgtactaaggtttagatgtggatcaggcgtgcatgttgaatgaacatccatgttgcaccagttaggtacagtaggactgtgttgcaagttacattgttgagcatgattttgaaagcaaagaaagatgaataagaaaagcaaagtccaaccttgatctcccttccccttgatatggtggattcctaatataggctttctttgttcatatgattttccatatgatactataataagcctctcctgaaaatgggtggctactcgaaccgattgaagttgctctttggcataggtagacttcagtacctggataggtcaaccttgctaccatttatttgtcttgtccttcattcctgctattcctcatcatagaagtactccccttccattatattgtagtatggggaaatccaattgcaattgggcatgccaatggttgagtcattgtggtgtgtttctatttgtcaaataattgtaaatcattgtatttttaaactttggttatttgttctctttttgactgattgctagggtgttaagaaaaacaatcatggacttcattcaaaacaagacactatttgacttgaactataaaacaattcacttttcaaccttggtcctgatcttctgctcccaaggtgccactgtagtgtgatgggtctttcaaggatcgaattgggcatgatctggcctcatcctcggggagaccttcaaataaacacattcaatcaagtaatacctactgttttttggtaacctgttttggttctaacacttgatgcaaaccagaattgcttcccttgatcaatattgctgagaataacagccactggtgaaccaatagacacttgttctctcatcaaaaagtttgtttgggccattacataagaggattggtcaactggaaaatcaggacccactaatttaagactttccaaagactcttggccatttcagcttttacaccatacgttccctgcacatctgctccacagcaaactgaatttgttttaacttgcagtgttccctccatttcttgttatatgcagctatagagctttaggggtacagattcaaactttactgcataataatgtctgattattgattcagttcttctacttcttgctgcatcttcagcaagtattggagaaattcttggttccactataaagtattataataacctatggtctggtttcaaagttcaagttgtaaaatggacaattgtgccattattttgtcacctgctgctattttttaaggcaattgaaacagcaaatgacaattatgagagtttcagcagtatcgcaaatacaaagctgagatcagtccatctaattcctaatcttgtgtaccaatctgaattgccttttcaggccacccttgtgaaaatggtcaatgaagccactgcaaacattccagggtgggacgaagaaaggtgattaaatggttttgcctcgctgatactcaattcagctgatagtgtttacattagaagccatcgaaggatctccgtggtcaataaaacaagtgaatcaacgcatgttcttcttaggcggcagacacgattggctaattcctacaaattaacctagaattagtttttggcaagtaaaacacggtagttatttggtcaagtgaggtggtccatttttggtgttgtaaagctgaaacgtgagcttttggtaatactcctagatcattcgattgtattgtaaagcagaaatattagtcaagtttgttgcacgggaatgttactcgataattgaggcttgggatccttcgcgcttgtgccattacatgaaatctttcaaaaagtagtgtttgtcatgagaggattgagagagatggtttgagagggaagcatggaattcacatgacgatcaggtgttcctagttaagttgcatacttacagtccaagtccgaagtccattgatgagcatcttgtttgtgttcttatttccttttttacatgtaaatctctcttcgtttatctagttgtcgtgtcaactttcaagaatgtgtaagaggataagtatggtgcaagaacattatccatctcggtcttcctacaacagttacactagtttgctcagattgaagtctgctttg

SEQ ID NO: 6570 - DNA, 57505 bp, Oryza sativa
  unsure (1)..(57505): unsure at all n locations
ctttacatgtcactgtcaaactcactctcttcagttttcaccaagcgactcttgcagcgctgagatggccactcatggtcactgttcagttctgatgagttttttcaagacgaaattttcatttctttagatgttatttattgagtgaaacttttcttttctgcaactttaagggatatgtcccctgccaaaaaaaaaatgtattggtacagtctgaatctgcaatttttcattcaaagcaattgctctgttaacctctcattcgtcagacacactaagaattcttagttcaatgtagaaaaactaaagtttattgcgatgatttgtaaagccttccttagtgagcccaaccatgaagattgatcctacacttttccccgacaagaaacggacacatctaaatctgccaccaaacaaatttgcagcaaatgatcaccactgagtaggtgtacttgttggttttagaatacaattattctttctttcaacaaatacgtgtattttaaaattgaggagacaaaggcaattggccaaggaatcaaagtaccttttcttgatggtaggaaacttatgtatctatcaggcaggagcttacacaaggtactgccgttgatagccaatgatcgtttcaacagtgtcttttaaaaagatttttttggcagatttgtgcaatgattaaaagatgatatatactaaaccatgtaaggctaatttccttggccagtcaaaaaatgattattttgatggacggagcagaatggaagtaaaacttggataaaaattaaccatttttacgtgacatagagattaactcaaattaagggaccacctatggcacaaccaaggagatatattccttcattctaccgtactactctttctattttctgcgaagatgtgaatcatgttattctcgaatgcattgcaattttaacgagtattttctgtcaagttgcaaaacagaaaaagcactagctcagtaatctatagtatctacacaagaatcatcgttgccactgggtcacggaacatctgtaaattaaaaataacagtgtatctaccgtattattaaatcaagggaatcaccacgttcattaggattataaatttactaggttacttaagaaagagagaaagatcagccacattaatctgatgagtctaaattgtaagggtgttgattggccaaacattgttaaagtattgctatgattgtataaaaatgcaattgtattttcaaagacatatgattagtatataaaatataattgtaatcctgattaaactataaaccttgcataattagttgggtggaaaattcaactagtttcactgaaatatttgctcaaagtatacaattaggtggcctctagcgcatattagaattttgtggagcacaatgtgagcatggggaacactttcttattgaggcacccattgtgggcatacaatgatttaaaacttgttagagagtgctaatgtggtttctgattatttggaaatacatatatcttaaagaacctttttatggtacaagttacacacaattttatatgttttgttttcttctcttaggctccatgtgctatcacggtggattatgataatcccgtttggagcatttgcttttggatgtatcgatgcttggaaaaataattttatataagggataaattgttattacacgtccacgaactactagctaggtttgtcttaaaaaacaactattaccgatgaaattggacattttacacccacaactatcaaactagccaaaaatagcccccttaagtgcaatataacctggttttacagttttgacatccaaaatataaatttacttacatttagctattctttttacatctcttactttctataggtgtcatacaagtaagatgataaattatttagaatataaaatcattaaattaagaaacgcactacggtactctctactggtagtagaaaataatttgaaccgttgatctcatttgatcaaagggtttagatatatttatattactatcctagttagcaatagtagaaatgttgaggggcattattgtaaaaaaaaacaagtgtggaggggtataatcgtcatttaactgtgactaaacccttttttacttcttttttggcttttttgatggaatatgagcgataccagtgtaatagatgaccacataccgatctagccgggaaaaaacataaatgacaaagttaccctttatcattgtattattgtattagtaaatcactgatttacccttaatactaatggtagtactatactaccatactaccagtagagagtactgaagcatcactaattataataaatcatccttagaaccggtttgtactgccttgggcagtactttgccttgttctgatagttaagggctataaaatgttcggtttcgggtgttctgtagataaacctgatagttgtaatggtcagagggtgtaacaaatgtcaaacaattacgagtgatattatagtcatataaagccttttatctaactataattaaattaatagaacaagttacaatgattataaatgttcattttcatttacacacaaattaaaaaaaatcgacacgaggtagcacaagtgcacaacacaacaacccaaactaaaaggccgtctaacataaggtacaagtacaactgtttctcatatctttctatactccctccgtaccattaccaaaaaggatacaattgtagcatttaaaagataaattaatagggaattaaatgacctagatgtcctttattaaatgagggagtagcattgaggtaaaaaaaatccacgaattgatacatggagttacaatagcctcgctcaatcgggagatttgcaataatgacactacaaacattaacctttgctataatgacattggacccacatttcatagacacagatgggcccatttttcatccactcgtagtgccaaaacagcaaagccccaatgtttgcagccccaatattgcaattttctccgctcaatattgcttacaatattgcccatttgtcatccgctcaatattgcttacaagaaaaggccaaaaatgcatttgatatcaattactctgtccatcccaaaatacaacaaaccagcaccaggggcaaagccaggtgtggggtagcttgggcttgagccccatacctggcagaaaaaatatatacaaggaatatgctaattttcttattaaaatttattcaagaagttcgtaatctagtgattaagccctactcttggcataatcctggctccgcctctgcccagtactacattagacaccgcataataatacgaatctagatatgctgatttgtgatactcaacttcatggacgtgctgatgaacggagatagtttctgaccatgccactaccacatacccatagtggtagtaccccatgtgaaaaactggggctctgattggcacttcgtcgtacactgcggcatataaaccacagcacctctctcgatctccctctataaatagtggtgagcactgaggatgcacttcacagcaaaccccgggaaacttcagaaaaacaccaggagtagagccttcagtttcatagctagctagctagctagtgatccctttagctaagatagctagatactaagctctctcttcgtctcactctccattaacattctgacatggctggacacaaggtggtattctgcacttgcattctgatcttcatcgtcgtcgtcatctcaggccaggccgaagcccggaggctggcggcggtggccaacggcaatgaggatgccgtcgccgtggaaggtgacgggagcttcagagcagtgcaagaaactgcttcttctgcgtcgactgatcatgcagctgcaggtcgaggcggcggcggcgccgccaccgccgtacaaggaagcatgccaatgacgacgacggactcccgccctactgctcccgggaacagccccggcataggcaacaaggggaagatcaacaactagcagctctcgatcgtatgcgttcctgtttaattaaggcttttaattaagcatttaagctctatagctggtgatcgatcgattgtgtgttgccgatcagctagctccttaacatctacgtatacttgggttctacttctgaatttgcctctagtttttcgcgtcattttgatttgatttgctccaagcatcgaactaagctcgatgttgtgtgaacttctgtcgatcagtatgtgtactgtgttgactgtttgtactgttaagcacttaagcaatgttgattattcaataaagttgtgagcggttgcagcttctatgccactgcatatcggtatatatatctatatatctctacagttttaattcttggatgacatttgcttttaccactcaagcagataggagtaaaggatcgaaaatactatacttgcacaggaagagcagtctataacggttcaaattaaacgacaatttctctaacgatttgttagttataaactgatagagaataagggttaagctagtgattactgcggggaatcttactgatagacatggttaaaatttaagcagacaaattaattgtaaggatcaaaagttggggtcattcttggcttcttgcgacatatatatgtatgtaaaacatgttcatatatagtactatggtttatgtggagagttcttggcaaagtgggctttggagatgagagaaaatgggaggaccaaccaatgacgtcgcgtctagcactctgctttccagttctctttataaaactgcattgaataataaaacaatactgaatataacaagacgtacactgatatccctagagataacttatttgtatttccccattttgatcagttcaagcaaagaaaaaagttcaggaatctgtacacaacaaaagttaaggtttcctgtgggtcctcgacaaaaaaaataacaaaatcaaggacggtacatttcccttgaaaatttgagggaatataacggttggctacgtgcccactcaaaagatgtcacgttgcttaaattattctgcatgcatgcaatggtcgtctaaaattaaggctatgcttgagagttgagacaaacacgaaagaaaagtgtcattcgttttctgcacgcacattttttttgaatggttaaacaatgtacatttttgtgaaaaattctatagaatagttgctttaaaaatcatgcatattaatatattttcaggtttaaaataattaatacccaattcgttatgttttaatagttcatctcgatttgtatatctttttaagagtaattctacagttcttaaggaagtatcatgaggtactaaagatttagtgtaaaatttggtacctcttggtatctaggtactataaggtactaaatttacagtagaaaaagtggtacctcatagtacctcctcaagtactgtaaaattactctctttttaatcttctcattttcccttctctcaaaactgtttaaacaaagattcggctaaacctgagacacctatccacgaactgactccgttaaccgttgcgttggatttttttttttaacgattcggcacgtagatgtgcccatacattgaatatagcagggaaaaaaactttataaagctatagctttacagctttacacagaaaaaaaaaggaaagctaattaagggatatgatgtggtgttgatatagttttgtgctacggttgatagcgtcatgctcctattttgcgtcacctgcagatagtggaagtgatcagtgatgggcttacgttttggttcactcggctaggataaggatcggacctaattaaccaattgcaattttgacctacgttaagctacgcttagcttgcagagttgcagccttgcactgtccgggcgaagacccatatttgacatttgacagctcgttgacatctgcctacctctgcaattccctctcaatcactaaaaatttgtttctgaggcattagaaatctaccgctttcgctatcatgactacttcgacgatgcattgaagatgcagtgctctctgagctgagagattggaaagatggaaaggagtggccgctaatagtagattagatggaaagcaattctctgtttctcttggccggtttgtatcaaatgtaacttgaaatgcaaaattcaggtggggaagcacctctcctgcctcgatgacatattaaaaataactaatggattgatcatgcatgataaaattatatccaacctttttaagtttttgcctcaagcctcggctatggtttaggctgtcctggtcttgatccacagctggttgggaagtccatcgaaggtttggaatctatattacaaggatagaaaataaatgtggttacttaacaacagtattggccctaattgcttggcaaacaacataagttggttttaaccgatgatagcatgaatctagctatttatcttattatttgaatctacattgaacctatagccgattgatcaaaaccctattaacattagctggcctcgctacatcacatcagcctatggccgatcgactccttgatcttatacgatctgtctatctatcttgttagttgcaggatcaaactaactgacacgcccagaacctgattgatagaacctgcattggagctaagtagatctctcaggcctttgtgtgcgacggatttcacgtcaacatcgggtcaaggagctatctgctggagcttagccatcccacgtttggttccagttggacacttgttttcttgccaatttttctctcttaataatagatgttaagcgtgcgtttggttgacggtcaagattggatgggatatggcgaaccatattttgctggatatgacgatccatttttttatttggttgagtagatatggtgattcggttttttgtttggttatagggaggaatgtggatttggtgatctatttttttttgtttgattagagggggtaggatggatgaatggttgtaattacccctttattagaggtggcaagtactccttcaattcaccaaaaccacaaaattataaatctaatacaaacaaaaaaatctaaagagaaatgaaaaatcacaaagaaataaaaagaggaaaggggaaaaaatgagaaaaaggaaaagaaagaggtcatcctccctcttctcgtcggccgtcggcttgctcctcttgccagccgctggaccgtctcctcactcggccggcacgtctcctcgcttgccagccgctatcacgctcggcagccaccacctcgtcttctcgaggccttgttcgggcggcagaacccccagtgctgcctcaccggatctaccacctccagatcccgacgaggaggagcccgggaagcggcgttggtccagatccgccatgtcctcttcccgctgccgccgtcccctcttccccctcgctatcaccttcggcctccgggctcgccgccacactcgcatctagtgccgcctgccgagctcgtcgccatgttcgcatcccgtgcagccgtcatcgtcgtgctcgtcgttcgaactggccaccgcctcgctcacttgcgtggtgaggggtgacgtgacccacctcggtcgctcgcccaggcgctcgagcagctacgtctgggcaaaacggtcggattcctccatccaacatctaagggagaatattcccctcccgaccgccctatgccaccccgcccaccaaccaaacacccataaaaaaagaggccaccatgtcctatccaccccctcccccatccaaacacactctagtccctcgttataggggtgggtagaaaaagactgaaccaaaagaccgaaccgaaaagatagagaccgagaccgaaaagatagagaccgaggaactcggtcatcaatttagtcctaggtagtgaaagaccgaattttgttcggtcaattcggttagtcttatcggttaaccgaatataccgaaaagaccgaattaacaaaaaaatatctaaatgcaacctacaatccattaagttcaataggattaaactctaattttcacatccctacttcttctaggcatgaaactaataagtgtctttactcatacgtgcttacgaatttttttttgtgatttttgtgttgaaaattttccatgttatttctttgcatatatgaaaatgctgttgaatttcggtcaggaccgagaccgagaccgaatttttcggtcctgatatttttgcattgaaattcggtcttcacttttcaaagactgaaatgaccgaaagaccgaagaccgagaccgaaattttcggtcagaccgaatgcccacccctacctccttaatacctcacgttttatataaaagccagtggaaacatgggaaaattaatattatttggttcacattgtctcaaagttataaggtccaaagattgtttcacaaagattgaggttcaagaaaaaaatttacaacacgtcttattaaataaaatgtagttaggagtgggaggttgattttaggataggaataaatttgactgggaataaatttaaaagtataattgaattatatatacaacctgataaggttctatttccataaatacaattgcaatttgtatatataaaacagatttcaaaagaatataatttgtatacagcccatcaatttgtatatatactagcaaaaacccgtgcgttgcaacagattattcaaaatagccaaaaaaatattcttggttgaaacaaaattctttgtcttaaaagacaaaaagaaaaaaaatgctatagttggtctttagttcagattgatgagtccatctgtgttatcaaaatgcatttatcatataattgtaaaatatgaaatcatcaataaattgtgttgtccgtctcattttaaactacaataaaaacctaaaaagtttgtaagtttttgtaatcaagattgcaagaagcaaatcaatagaaaattaagaactgtcttgtagagaagagtaacttaaaaaactactcctacacaactactcgtaagtcataactatattaataatccacatgtcagcagcagtggtggtggtggtggttggcagctgccatcatcactgtcttttattagtagtatagaaacaacagatttttatccatttataccgttatatcctcaatatttcatgatgcaaatctttttgagtgctgatttataggtcgtagaatgaacgtgaaagttccttctcgatctcggttaacaatgtatacatacatagagtcatagatagaggcatgggatggtatacaggggcagagcgggagaacttaggcttgagccttagacttgctccaaaactccatataaatcttttagaaatcgtatagaaattttgaaaatatgtaatttttaactaaaattatcaaattcggttgtaggcttaacaatttttttggggctctgtcactgaaaatacatacatacatagactaattaacaatttttctggggctctgtcacgttgttgttttttcccctgaaaccaagagattcatgttaatcagggtaagacttgaaagagtgaaacctaggtacgacgtgccgatggccggatcatcagcacatggccgatcttacacactctgcaagcaggcacatgtacagaataatgcgtgtacgtccctctgacacgctcgatcgatcgatctaccgatgatcctgattcccgataagattcggtgcacttccgcatccagaaccgatccgtgtacgtgagatccccgatcccgagttccccaactgcgaacttggctagccgctagctctctgctccaccgctatctcccccccggcttgatcacctttttccccatgcgccaccattccactgaactacactgaagattcctgccaacttccgctgtataattcctcaggatattctctgttgcgccggggtcctggccgtcctcctctccatcggcgtacgtcctcgcgatccagcacacattcggtggtggccaccgtttcggcgtcgtgggcggcgccggccactgggttgtccttcctcggccatcgattgattgggcgtttgggcgtgcaagcgtgcatgccgccaccgccacctcccgtcggtcccgtatcttggagctgcgccgactgacgcgctatcacggttccaacacatgaaaaacgtatatttttctagagaactgctagaccacggtatcccgttaaaacgggatagattatgatgggttaataacgagtcattgcccccaccaactgcgtccatgtgtccccacgcgtctgcatcgttcaccaatacccctcacgtgtctgctactcccccacgtgtccatgcactggcgtcaggtccctgtctagtaccaatctggtaccaatatctgatacgataccaagtatcctgaggtaccagatctagtactatgatatcagacttgatatttggggtaccaaacctcaaacctggtacgcactgtcaggtaccaaatctggtatcagtgtttgatccgataattgatacctgaggtgggtaccaaacctggtacgcactgtcatgtaccaaatctggtaccagtgtttgatccgatacttgatacatgaggtatcagatctggttgatacgtgaggtatcagatctagtaccataggtatcagatcaaatgttggggtaccgtttgatccgatacttgatacatgaggtattatatctggttgatacttaaggtaccagatctagtaccatatgtatcagatcagatgcttggggtaccgtttgatccgatacttgatacctgaggtatcatatctggttgatacctaaggtaccagatctagtaccataggtatcagatcagatgcttggggtaccaaatctggtacccatggtactaaggttagtggtaactgggtctgatacccatgacgtatcaagaccagtagttatatattaggcctggtactaaaaaaagtatcaaaccatggtacctagcggtatcatctggtaccaaacaagtcatcttcttcttcctctccctaatacgttgtgtcccaattagccgttgatccctagccatgaaataaaagcaacaatcaaaaaagaaagattgtgaataggtgcaggcaacaaactagtagaaaatccatacactcatcttcctcctccttgtggacattagccccatgcagcctctgctgctgctgcactcctgtcggcttctcgaggacggtgctgatggccagctcaaatagggtgttacgatcgacgtggcaggcgaacagctccggatggctggtggctcgtgggtgcacagagggggacacggaggaatcagcgtgcgcgtaataggtggtggatgacgttgcgttgatctttagtctatcccattaggacggtattccgttttatagattttctgatttttctataaatattttcgaaaaacttctggccgggagcgatgggagaagagaggcataattgggcgcacaagtgtcaagtgactgagtgatcagccaggcggtagctgcatgatagaacgcacgcaggtagtggtacaaacacgaggtcactagctcacgaggggcatcgtggatgtactgggccgccttatccgacctgcaggagctgtgtgtctgctctggcttgttgggttctgagtgattggaggagccaagttgccaacgcggtcaaaacctgtagggtccaaaacgtcaaaaatcttttctttttctggaatttttatgacccgtatatcaactaaaataaatcttaccaaattttagcaggatttcttatgtatttaataaagtttgacaaaaaaaattaaatgtatatatattttgtcaactttataaaaaaatgatatgatttaaaatggcatcaatctgaaccgccctttaaagcaaaactattttgattatttgcaactgaatatatattttaaatccgtacaatagcattagaattctattgattaattatttaccgatgagcttgagcaaccatccatggttgacggaccaccattgggtcatatattcccacactccacaagttgtatgaaactctattatctatcctctccgtttcatgttacaagacgttttgactttggttaaagtcaaactacttcaagtttgactaagtttatagacaaatatagtaatattaataatacaaattagtttcattaaatcaataattgaatatattttcataaaaaattgtcctgggttgaaaatgttattattttcttcttcaaacttagtcaaattaagttaaacgtcttgtaacctgaaacagagggagtagattatcggctagattattactatatattatctactttattatagagataaattaattatttttagaaataaacatcacaatagcttagaacaaatgttctaggtaatacagaagaagaatgattttttttctagaaaacatatttctaagaacatgggggaagtaattccatttactctcgttttcaattcatttaatccaaatggcttatacctttgtttatttgtactcctacacaatttttataagacgattggtcatgttcaaaacttaatgacattaaacattaaaaaccgaatagagtatcatttgataaatatttaaagcaaaagaaagtaatacgtatggtcaaaaaaagtccataagtcaacatttcaacaatcattattcccttggctagctaaactattattgtttttgaaaggtgactagttagattataaactaaggtagcgtaaacgtaggcgccgccgtgcaaagtctgcccgaaatggcataaaattctaaagcatgctgtcggaagacttcttcttttccaaatctctctccagtattctagtactatatactggagtactccataatatacttcttatacatattagtcatcggcgttcttttgcaggaatcagcattctttcgtgtcaaaaggggagcaaaagttcttctcaatttgctgaacggaggaacgcaaacgtacgtaggccaagaaatgagaaaaaccaaagtgaaaaagctcctagactttaggagccgaccagcaaatatgaaaaatgttttgttctgttgatatatagccattgcgacaaagcagatgccagatgatgcacttgcttgtttacctgggcttgtagtacaagccagctgagaattagcccagttatgcccaagttgtgtccttctttacccctgagaattagcccagttatgcacgcagcagcttgaaaattccaaacggggtagtatataggccggagatcatggaatgtgttgggccgacaatgacacgaggccctttatatgtgcctattaacatgaaagtgcaatgagtttggcctgtgtttgaaatgcagaaaaatgaaacatatgaaagcaagcataaaacagaggatataaaaatagaggaaacatatatttgtataagtgtttggaaaaaaaaattgcctgctttagtacattggaaaagaaaacaaatgaatgtttgttttccggtgttttaactaaggccttgtttagttcgcgaaaagaaaatttctgggtgtcacatcagacgtttgaccggatgtcggaaggggttttcggacacgaatgaaaaactaatttcataactctcctagaaaccgcgagacgaaattattaagcctaattaatccgtcattagcacatgtgggttactgtagcatttatgactaatcatggactaattaggctcaaaagattcgtctcgtgatttccatgcaaactgtgtaattagtttttcattttatctatatttaatgctccatgcatgtgtccaaagattcgatatgatgtttttgggaagaaaattttgggaactaaacaaggcctaagaatggaggacatgtaaatttccctttgttttccttcaatccaaatggctatagtttatgaattttgagtgaattttataaaactataaatacttcaaccaaactatcgtaaaactatatatttaaaccgttgtatcataatatatttaacaataaatttatcacaaaaaatatatattttcgttttttttacagaaatggaactataaatttaagataaaatatcacacaactatttatttagtaacaaaattatataaaaaaacaagtttagaaaatctaatcataatactataacatttatagctcgaagataacattagtgctagtgctaatgatgtaaactctaaaatatgtatttttttataacattaatactaaatctatggttttattgtacttgtattagatttatagttctctaataaatttggtgctaaatttatacttttaagataacttgatcaaagtacatgtagttccgtaaaatttactcgtaatcattttttctttaggacttaaaaacctgtgcaagtcctttgaaaacccttcagccaaacattgtgtgcagcttacatgatggtactgtagcacattgatcaaaattactagcaaatatgcgaccaatcgagcctacaatctgtaccatgtggtgacacggacaccatgcatgaaatgcataatagtgatctcttgagcaagaagtactattgtcccatctaagcttaaaagtcaataacaaaataggcatgtttagttcgcgaaatttttttttgtcatatcggatgtttgaccggatgtcggaagggttttcggacacgaataaaaaaaataattttataactcgcatggaaaccacgagacgaatctgttgagcctaattaatctgtcattagcacatgtgagttactgtagcacttatggctaatcatggactaattaggcttaaaaattcgtctcgtgattttccctcttactgtgcaattagtttttgggacaatctatatttaatgcttcatgtatatacccaaatatgatgtgatgttttgggaaaaaaatttgggaactaaacggcacctaaaccacgacaaatgaatgaatccagagcaagccaactttggattctgatatcattgtcccggattccgaatatctgatgatgatctctctctccatgctaaactgccaagtgccgaccaagccggagcagtcacagtgaggatcagttcgagcaacaaagaatcggaattggagagagacagtgtaagctttactccctccgtctataaaaaagataaacctggtttcgtgtccaacgtttaaccgtccgttttatttgaaaaaattatgaaaaaaattaaaaaaaacaattcacacataaaatattaatcatgttttatcatctaacaacaatgaaaatacgaattataaaaaaaaattcatataagacggacagttaaagttggacacggaaacctaggatttgtcttttttttttttttgtgacggagggaatacggtacaatttttcaccagtcactccaggatgtcaggcaggcagaggcaaaagcagcaagctgcactgccttttggcacatgactgactcttgaatccatttgctgctaggcaattgcccggctgcagtggccactgcccactggccataccttccgtgggctgcctgcagtgacaaacagtaactttgtggctttctgcgatggaagcaggcaggcaagcatgcacaaggtaaaaaggtatctagtggaccatggccaaagaacaatctaccatgtggttgacattttagcgtgtgttcagcaagctagtgaacctaaggtagggatgacaattttggccatgggttcggatatcagcggatacccggcccgaatgtctgatgagcactagtgtgggtgtgattttgtacccgtgggcacgtccgcccaagacccaagacgttatgggcaacagccgggtttcttttttacccgtggataacctatacccgacctgatacgtttgtattagctaatttcgactcatctcttgattcttatacccctttctcttggatcatttgttatgctaactgataagaagttgtgatgtaattcaaattatcattgataactgataattttgtaaaatattgattttatttctctttgttaaattacttatctttcgagttattattcatgtgagattcattgggtacctgccgggtatgcccgtgcccgtcgggtatgggtacgggcacggagttttgctcgctaaccctagtgggtagggtttgagccggcgacattgggcatcgggtagggcatggttttgctttacctgtgcccgacccgacccattgccatccctaagctaaggccatgtataaagcagtgtctcagacctgtcgtctcaagttctagctaggtttggatgccacgctgaaggtttagggtggtctcgcagggtggcagtggagcctgcaaaggtaaatgtggtctacggtggctctaggaaagagaataggggtttgtgtggtccaggcaagaagcaagacgtgctcacgctgaggtcactgccacactccgtcgtggccactgcacctcgctgccgccgccgatgtcgttgttgcactccgccacggccactgcaccctatcgctaccgttgatatcgttgtttgctccccacccttgtcttcccgcatggatccagcgagaacgaggccgaatccaccgccttggatctcatcgcgatggccagggagtgaccaaaacataccattttgacatagatgtgttctttcaaacataacttgactataattaatattgccaaatattttaaaaacttgataagtacttcctccgtcccataaagaatttatcttttccatctattttgtcctagaaagactttatttttaaaacaataattacattggagttttagaaagtgtctgttatagatgggggttgtatcggttcgctactgggggtccaatacttacttgttatctaattatcaagtgatatattaataggcatgtcataaattaagctaggattaattcatctatccgtggttctgtgaccccgaataggaatcgccactgttggtatatgtcagataaacttctttttagaactaaggtagtatataacattataaaagtatctttcgagacaaattaatcccattatatacaagcatccaatctaaatatctagagctagatttgaggctcaaacttttttaaatcttgccttgaaatatgtccaaaacaaaatgttagacctcgtttagatcccatcccaaaattttacaccctgtcacatcaaacgtttgaacacatatattaagtattaaatatagtctaaacaaataactaattacacaaattgcgactaatttacgagacgaatattttaagcctaattactccataatttgacaatgtggtgcttcagcaaacatgctaataacggattaattaggcttaataaattcgtctcgcggtttactgacggattctgtaattagtttttttattagtgtccgaagacccccatatgcgacaccttatataatatccgatgtgacacgccaaaactttacacccctggatctaaacacccccttagctaactaatagggagtaataagtcaaagttacttgttgaaaactgtgctacaaacctgaatagggggttctgttatggacttggggggtgatgtacaatcatctctgttgaactgatgccataaatctatactaacccttttcctctgtttgatgtttaactctatgtaaaagacacatctgcttccagtttactgacgatttttaatataatacttagtagtatatgctactatagcaattgggcagcaaagcaaaagcgaggtcacatgagtacaaccaacccgtttgaaaaacgagcgccaaccacacgtttagaaatgtcattaggcacgacaggaagcagtcttaagcagctttagttacttataagattaaccaaagaaaggttttgttggggagtagtactaaaatattgtgatgcatcttcccattatgatttgcaaacaagagtaacaacaagccaggttggttactccacaacactaagttaatgaattcatatgggtgttttgctcaaaactgctggtccagtgtcactgttagttgaaagatgatttgaacttgctgatgcttttgagctttggattccaggggttaggagagggagtttgtcttcttcttggcctctgaatctctgatgcatattcacaccggcataacaaagcccccattgctgctctgtcgtgtcttggacggtcccaagtttgaatgaatctgcttaaactaatggccagcagtgaccctctatttaatcactgtttaaactaatcgacagcacttaaagcaggaccgatgaacgtcgcagtaggatatgggcactctgtttcttcttgaaaataaacctgaccgctcatgtagtcatgtgtgcaagtgtgcaacactgtcgtttcagtaatgcacttgagatcgcattgcatgcgaatttgaatttgaattcgaattcgaatgcgactgctcataatacatttcaatgctaacagttacgagaggcatacatatacatacgtgccaccgatggctcttggattgccgtttcttgcccccgcgtcgcttccagggcaggggcgacacgggaggcaacccagctgccgccgccgtgccacccccaccgccctccttctacctcgccgccgcccgagcgggccgccagaaaccgcgcggccgcaaggacggcggcggtggggcttcctccccccgaggtcgcggcgttcggagcccacgaccccgacctagcttcggggcggcgacttcggcggctgcgacgtcgagctcgacggtggcacatggcttcggcgaggtggcggtgccgacgacggttgaagagatgggcgaccgggccgacgacgagaaggcggtgctggctcctacgctctcctgcgcggatctggtgcggggggatggatcccgagccgctggcggtggtgatgcgcgtggaggcggcgggatggccggatccggaaccctcctgtccgggtccggcgcgggaggccgagctccgaccccaggcagcgaggcggcgggggcgcgcggtgctgggcggcggtggctgaaggcggcggggatggcgatggcggcggggacggagctggccgagggcgcggaggcggcggcggcggtcccgtggctgcgacggcgcggtgcctggcggctgcggcggtggtgccccccagatccgcgcctctcggccgggtctggagggtggcggcagttggcgacggcggcggtggtgtggcgatggtggtggcggcagttggccagcggcaagtggcgatggcggtctcagccggatctggacgcgggcagcagttggcgacgacagccgcggtgtggtgacggcggcggcggcggcagttggcgatggcggcggcggtcgtggatgtggtggctgctgtgtcaactggcggcggcggcgacggaagacatggagtcgggcagctagctgctcggtgttggaggacgacggcgcagcagcagtttgcggaggcggtggttggcgtcggtggcagcgacgacggcggctgcgactctggaggcggtggcgacgtcggcggcagggaaggagtcgggtgcgaggtggctgggtgttcggcagcagcggctgcggtggtggtgaccgtgtttgcggtcaccggagtcatggcggcctcggttgactagccgagggcgtgggagacggctgcatctggtcggcgcggcatcgttcggtggaggggttggagaccggcttggcgcagagaagcgcagctgatggcagcggaggccggctcggcgcgagaggcgcgggcggcagagatggaggccggcttggcgcgagaggcgcagccgatggagggaggccggattggcgcgagaggcgcgtccagtggaggaggccggcttggcgcagagaggcgcggccggtggtggaggaggcgacctaggtgagaggaggagttgtcggtgggtgtggcgcggtctttggcgcacgaaagctggccggcgggggacgctggtgcaggggtcccacatgtcggcaaagcttgtgtggtggtggagcaatcggtgcgtcagccgtggtttcgatctcgtctgtgcccctttgttggcctagtgacggtcggtcatgcttagcggtggccgatccggtgctagccttctcctaggcgtgtgtgttggcgatgtcggcgtgtgggtggtggtatatttttttcttttttctggttacgactctccagagttataatcttgtaattttttcctactctatcaataaaacttcgcaccgtctcgtacgagtcgttaaaaaaaaaagtgccaccgatggatcatggatcgtatataggaaatctgcttcattccacaccgaagattggtagggttacgcgccactgactacgtggaccacgtcacatggacagtgtcagttcgggaagaaattttgtcgagacaaactggccaatttggctatcaaaacgagaagaaacgttgttacttgccagctccgcgactctcatctcatgtgcccgggcacaaaagctttgtatacatcatcatcaccatcgccatctctccaatgtaagaatggcgagcgtgtcgaatcgaggcacattttatgtgtgaagccggtttctagtgcattgctgatagccaacccgacgtatacatgctttgatttggatttggacgacgtaaagttctattcgttcgcaggacacgttgtaatattaacaactatgtttattgagaatattttaccttccctcaatcttatgggtgtgtttagttcctaaaaaaaattggaagtttagggaaagttgaaagtttgaaaaaaaagttaaaagtttatgtgtgtagaaaaattttggatgtgatgtgatgtgatggaaagttgtaagtttagggtagttgggggtgaaccaaacacggcctataaaattagtccagacatttcttcaccaccgtcccagccagtggaggagccagaatatgctcatagtagggctgaactagtataatctaaataaatttatcttttgtcttctattttttaaattttaaagtatgatttctatggatatttgggctttttaaattttaaagtatgattctatggatatttgggcaataggagtagagctatagctctagctgtcctgcaactatatccacccctggtcgcgccgaaaaatcaccatctcttcactcccagcttcctttaatcttcttcagacactaaccaaaaaaaaataatgttattaactagttttttttaacgactcacatgagacggtgcgattattgatagagcagaaaacaattataaaattataaccctgcaagatcgtaaccagaaaaaaataaaaaatataccaccacccacacaccaacagcaccaacacacaggtccgggagaaggctagcaccggaccgatcgccgctaagcgtgaccgaccgccgctaggctaaaaacggaacacaaacgagatcgcccaaaaaacgctcttacaaccaccacaaagcccaactctatccacgtcttcaggatttagggagagagggtgagagagaagatggagcacctctccccctaggccctccgacgtagtcaacttgtagaaactaggacgccaccacaagaggatgaaaaatctagagtgtgcttgcaccaattgctcgagtggtttcagcaaggggatgcctaaatgacaactccaaggagagaagtgacgaaaaccaccgccaccgtccaccaaggtttcaaaagagagaagactaggctttcgcccggcaaccacccttgaggggtgagacggcacgacaacgcccttaggagggggaatgacactcgagctctatcgttgtcggtccggccaaggccgggttgggttttcacctgccgctcaccacttgcgagtccacggctaacgcaccgatgctccaccactgcccaacctccgccgacatgtgggacccctgcaccggcgccccccgccggctagccgtcgtgcgtcgtagaccgcgccacacccaccagcagctcctcctcgcaccgtggtcgcctcctccaccaccggccacgcctcatcacgccacgtcggccttcttcaccaccggacgtgcctcatcgagccaatccggcctcccgccaccggccgcgccaagccggcctccaccgctgccggccgcgcctccttgcgtcatgccgacctccgctgccatcggttgcgccgagccgacctccgacccctcctccaattgctgttgcgctggtcagatgtagccgtctaccacgcccctggctagctgtccgagaccgtcgtgcctcctctcgccgtaggcacggccacggtcgccacaacaaccacagccacagccgccacagccctagttctccgccccctggcctccaccaccgccgctgtcgctccaccaccaaccccgccaccatcgccaccccgccatcgtgaagaaggccgctgcgagcgcgccatcctccacctttgcagcttccttcggatccgcagcctccgacgcctgccaccgacgtccactcgctggcccgctcgcaccggcgacccgcctcgagccgccggcctgccacagcccgccggcggccacaacagtcgcgcctccatgcctgccgcggccacccatgcctccgacgctatcgtgcttgccgccgcccccgccgccacctccacaccgccgaggccgccaactctatctgccaatgccgccaactccacgccaccgacgccgccaactcgctgacctggctctccgccgcctggagcaacagatctggccatggggggaccagatccgtgcatcccggtgccaaatctggatgctgccatcggctcttcctcggcttcggcgccttgccctgagctccatcttgccggcgccccgaccgccttaaccgtgagcgagggagagagagctccaccacctccgtccttgcagccgcttggctttgccggcggtggctcgggcagcggcgaggcggggtgggggggggtttggtggggatcgccacccgcgtcgcccccggggcagaacgaccgggcgttctgaaactatttttgttattaactagttaacattgttttccaaaacaacggggtgattagcttagtgacagtccacaaatgcagaagctttttgtaaggtcgacaagaactacagctagtacagtactatactgccatttctgcgtaggaaacgaccgataaatacggatcattttgcagcaaaaaattaaaaaccccccacacgcttttcacctacctccgtgttcctgctcgcttgtaattttgcagggcgacgtgatgcccagcttctctgcatacacacacacacacacaacacttcgtcacgaccctgtctttttcgcaaagtctctgacgatgtgctgtgcgttgaatgaacaggatagcactgcaaaagatgaactcctcacatggcagagccggcctttgcgtatgcgatgcatcatggaagcagcagcacactcgtctaaaccgaccatttggatagcattacactcgtaaacttataaaccaagctgatcctttttaaaagatcagagcttttttatatacctgacgagcctgagactcctcggcttttgctctgatctagtgttaacttgttaacagctgcagcgaccaaatttgcaggggagcaaaatgagtgctgcgttttttgtgtaagcctcgcatccactaattattttacaccgtgtcaacttggaaaagttttgtagtagtagctgcattgcttcgtaagcatatgcagctaagctttttccaaacagagcagtgatcagagtcagatcagacagctacagctaacggcaagtgaagaaaagaaggggaaggaacaaaaatactggactactacttccagggagtgccaagtggggaaagtatatggtggaaagtgaaatccacattctagacgaaaacttaaaaacttttttacaggagttctcaagtaaatctaaaaaatatcacaccatgaaaaaactcaacttcgttaatgagatataaattaacaaatcataaaggaagaacgctattccttttattattttttctttttctctcatgtttcccaaaattatatctcaaacaatgatataaaagtctttatatattaaaaagccttacaaatagctaagatagtattatacaattatgcaaagttacatggataaactcaatttcatttgtgagatataaaaattagaaacactgaaaaagaaaaaaaacaggagtgttttcctctatagtttgttaatttcatacctcagcaacgaaattgagtttgctcatgcaactttataggttgttattacctactcactctatcccaaaataatccaattgtagaaataaatttgaacatatattatatatccatattcatctctaagattcggtattttgggacaaagaatacatatttgttttttcaaagatttttttaacgttttaattaaatacttcctaagtttccatttaaggttgagttcttttgaccactatcctaacttctatccctcatttttgacgcgtaaacttgtaaaaaatgttttttttaaaaaatatagaagagccattatagaaaatcgtattacaatctattttaatttttctaatcaatttttaattaattatgtgctaatccgtaatttcgttttgcgcattaggaggaaggaatccgaactaaacacatccagatatattcccaagttatactactatttcccatgcgaaggggaaaatatgtgcgatattggaaaggtggaaagcgaggccaccacgagctcatgattgaccgcgtggccccccgtcccgtcccggccaccgctgacctgaccgacccagcccgctcttcccatcacaatattccttagccgagcccggcagaaaccatcaaaccgacccggtggatcgctcgatcgcctcggccatcccaccgcccaccacctcgtcgcgtcgcaagtcggcagcacggcgagaaacaaagaaaaatgaaaataaaggagacctcacctggcgtgaccgatcgatatcaagccgcgaataaaacggaggaagccgtagtgaagcgaacaccaccaccacccacgcggaggaggagaagaaacatcacgcgagagtacgagacgaatcgaacccgcgatcaccacttcaccgccgggttctgcctcgcattctgggctcctcctcgtctcgcggcggcggcggcgtcggttggctcctccgatcctacgtcgccgatcggacgttcgtgccagtggccacccaaccttaccctggtggtgataggggatgtacacggcgccggggaggcgataagtggcagcgtggggaggaggacgtcaccggcggcggtgcggcacggcggcgtgagggctcctccgaggagcgacaaggtacgtggctctccccttgcattccttccccccactccactccctttcttgggctccggccgccggaaagtttgcgctaatgatgatattcctcgcgtttttttgtgttgtttccaatacgttttctttttttctttttgtgtgtgtctattgccgtccttgactcttgcgtgctcctcggatcgcaacaaagctgccgcctttcgcgtcccatgggagatgggcgcatgaattctttgcgtttcgaggccttttgggggtgtcttcgggagacgagttctgcgctcctttttttctttttttgtgttcttggagggagcggttgattgctacggcttcaaagctcagcagagctttctgtgttcaacaagttttgtacacctcactcctgttgctttcgcgtgccaattcggatggttttcgctctgagtttttgaaatgggctccgggggatccattccagtcgagagcagttcaaattcggtatcttgattgctccccgctcctgcagccccgcgttgtatttaattcactgtcgcttgttgcatctaaacgagtccattttgttttcttctccgccctgatcaaggtgatggagaggcccaactcgaagattccggcgatgaaggcgtcgtcctccaatgctgcggcgccccagatgatcatgaacaggagccaatccaggagagacaggaagattgcactgcagcaagacgtacattatcttttctccttgcctagaaattcagtttttgatcgaattgatcagctaaaacacaatcagttagtagcatgttcgaacgctttgccttcttgttgggttgcaggtggacaagctgaggaagaagctgcggcacgaggagaacgtccaccgagctctggagcgcgccttcacgaggccactcggcgctctccctcgccttccaccttacctgccttctcaggtaacatccagctccggccgccgccgccgccatcgccatggctgcagcttagctccagcttgtgagacggatcggatttcatctccctgatcattttgtttttttgccgaattgtgcaaatcaagacgctggagctcctcgccgaggtcgcggtcttggaggaggaggtcgtccggctcgaggagcaggtcgtcagcttccggcaagggctctacgaggaggctgtcaccatctccatggcgaagagcgcgtacttctccgacaccgaccggtgcacgccggcgcgccatggccaagttcccgaccaagctgctagtgctagctggtcgtctctgaagcgagtcaccaatgtcaagcagacgccaagaaggactattccttccatgaaccatggaggtgatcgtcctgggaaggagaaccaatcgtgtaccaccaactctttcagagatcacagccggttccctctgaaaaccgtgccaaaatgcagtaatccagaagaggagaaatgtgccgattttcaggtacaagacttagcccaatgttttgtttttgtgtgcttaaatttattttgctcgctaatgttgtttcgtttcagacagttagtgcagtgaaagatcagaaaggtactgaggacaccactgtcattgattcagaaaacatctcgacagaagcaaacaaagtgtctgaggagctattgacgtgcctactgaatatcttctcacagatgaggtcctccagtgaccaagatgaggaccgatcatcgtctccgtcggtttcaggctcctgcgagagctccgacggcgccgcctgcgccggcgacccctacggcgtcctggaattgggtagcagggacattggtccatacaagcaattcagagcagttgatgccacttcattcgatcagaatgtttttgacaacagcaactcccttcttgacaggagattgaagtgagtttccactgatctggggtaactactactactactgtactaatctgtcattacaaactagattctgctgtgtgatgagttggtttctgtttgacctatcatgttcatggaatgatcttgtctagtgtctacctggcaaaaatcagggccttgctccagaagctctcttcagttgacctagtgggcctttcccatcagcagaagttagcattctggatcaacacctacaattcctgcatgatgaatgtaagctgtccctcataattgaggcctcctttgcttttcccctcagcatgattgattgacaactttgattagctcccttttacactgatgtgaaatctccaacggttgtaagcttgtttaggtttgcttaaatacacctagatagttctggccatgtgtaattttgtgcgcatacacggcatgtctgtggactgcatgttgtcatgttattaaacgtttaaacctcagtatcaaaatgcttcctgcttccttgatcatctgcagagccataaacaactgacgaccttggctccattatcctttgacccacagctcgtcttcgctagcaaagcctgacagaattcattaatctgatcaaagtgacatgtctcctgatctaacactaatgcaggcttgtttattctgcaactccaggcatttcttgagcatggagcacctaccaccccacaaacgctggtggcaatgatgcccaaggttccatccatccatccatccacatttacttctttctctagattcattacgtgcagcatatgcatctgcaactcgagagcaaaagataaaagggtgatatggagaaaatctctgacaagagtgagttggctgtttttctttgctgccgcaggcgacaatcaacgtgggtgggcgcgtgctgagcgccatgacgatcgagcacttcatcctaaggctgccctacaatgcaaagcatgtaagagtaagatgctagcatcattgccgtgtgcctgaaaacttatctgatcgatttcatggtacaaaagattgacgccccgtcgttcgggcgtatttgcaaaagaaaaataatttgtgaataaaaaaaatcatatacatgttcttagcgatttaaaattaaaagctgaaaaataaacttcgatgaaaaaaacctcaaaatcaactctaaatttaaggttgaaaatttaaattttagctgataagcgtaaacataagcgaagagattttttttagataatggattttcattaatccggcctctatatccacaagggatatacacagccaaaaggatacaagagtactagactcacacctcaacgaagaggagaacacaaaaccaaaaagcaagaaaacctacaacctcggtaaatccctgcatcctgacatcctcaactgaaacgtcgccaccgcccctagtgcgttgtcgctgcgaatctccatagatgtcattttcatgccacggcagccgggaagcccaccctcatccatcgtcctccggtcagaactagccgaccagacactagttgaaagcaactgtatttgcttcgtcggattcttaagcctccgccgcccatagggccgccattgacttcagactcctactccgttctcggactcccagcccgctgccacctttgcgccgctgtcgccgaccaagtctgccgctgacgaaggaggggatagaggactagctccatctccatccagaacagctactcaccaagtccgcgacgccgtcggtgacaaaggaaggaacggtgggctagcccctgtcaccaccgcccattgagaccaccggtgatggagaacttgccgccatacagcaaccatgcccatcaccggagcgccccactaaccggcaacctccaccactgccaccacccccggccaaccggcgccataggcgcctgccttgccgactgccactgggcgtggccgctcccgccgtcgacatcacctccactgcgtcgctcgccggagccaggcgagacccaccgtgccgccctctctctaggaaggggactgaggaggaagccttgccgccaacccagcggacctgcactctccggtgacctgctcgaacggtggcaagttgaaaagcgacgacggcggtgaggatttacaggaccgggcaactagccagcagccgccgagcgctgagcagaaaaggtggaaaagggagaaatgggaaagggaaaaaggtgaaagggggaggtgaaaagggaggaggtgggtgggggcgccgccggcggctgcggcaccggcgccggcgccggcgaggtgggcgacgaggggaaaagcgctgggagtcctgttctcctcccgggtcgcctcagagagcgacacgggagtcaaagcgtccccacaatttccgtataatatgacgggataacaggaatcttgataagcgaagagatgaggaggatataagatgatgtttatgcctttgtggacaggtgaacccgaagggggtgaaatccggcaatggcgcggcggcggcggcgagaggggtttttggactggactggcctgagccgtcggtgacattcgcgctgtcctgcggaagctggtcttcgccggcggtaagtttctccggcgtgccggtgaattttctctctgctctcggtgtgcattctgcatgtgctagctaacttcagattgaaaaaaggaacaaaagttaacgtgtatggtactatggtgtgtatcttttcaactgctacatcatgaatttgccgggaagctctgtgtggcagctagccagctagcactctagcagcctgcgattataacaagctgcaaaggcaaaagttgaacaagctgcactttactaattgtactgaaaagtacagtaggaatatttgttagggcacaaatataagtcgtttggtgtaatcaagttggttgcagacttgcagtctagggaagagtactgaatactactaatgtgtgagaattcagcataatataaagctatcactattaggcagtaaaaatgcagaccactacaatgtgagcagggtttactatttcagactgcataaacatttaggtggtttcggaaatttaaacagattttgttaaattgatttccttttttctttttttgcaaaattcagtaaaacttgttttgttttcggaaatttcaaaatgttagtactgaaattgtgagactgaatatgatactgaactcctcactgcactggaaatgttgattttattaagagaagcgtattccagtattgattttattagagaatggtattttttacacggccaccactaggctacatttcatttggtattggaaatgctgatgacataggagtatttttctctctacgcaggtgagggtgtacacggcttgccacgtcgaggaagagctggaggcagccaagagggactacctgcaggccgccgtcggcgtctcgacggcgaccagcatctcgatccccaagctcctgcactggtaccttcttgacttcaccaaggacgtgagctccctcatggactgggtgtgcctgcagctgcccggcgagcggcggcggcacgccgtcgaggccgtcgaggccagccgccggagcccgtcgccgccgcctatccaggttgtgccgtacgagttcaggttcaggtatcttctggccacgtagacctgccacggtgtatggattggacactgtagaagggcagaatggcttgtttttttgtgtagcacaagtttgcagctaattgctggaattttttttttttgcatttgtaaagggaaatacacatgaagagttgagagtgatatatatcatgttgctttccactgaagaattggtgttccgtgttcctcctacctacagtgaccgtcagagccgacaaactaaaacttgacagagaagtattgttgctattttgatttatttaaaaaggtgacatttgaaactaacacttgaaatttcatcagttagaatcccatcgctgcctgctggtggatatgctcgaggcatcttcccccttttagatgatcagttgaacaacagcttctctctcactgagctcaatcaacagaaatccgccacaatatttttctatccatggtgtcgtagttgtaatttgtttggggatgtttaggcttcattgaggctcctccatttttcttgtggattaatgtgtatcaggttggtatccatacgtatcaggccttgtacttctgtggtattaggtctaacattcatatacgagacctgatacatataagtattagacattctgggaaatccggaaagaaaaaaatcaacggttttcgagcaaaaggaggctgtggctccttgccttatggcaaaaattgttggccaaaataaaggaagaaacacgaacttgggttcttgccggagcttaaaaaacttagcgagtttatccctccacacgtatagttatgtatagctttttttctttcttctcttaggggttgtacttttctcccgctatatttaatgaaatagcacaatctcgtgctgattccattaaaaaaaaagccttatggcaaaaataaaggaggcaaacttaggctatggcaggagcaagtggcttggagaatttctctcaaatcaaccataggcgttgtgtagccatgtacagtatttttccttacacctagaggttgtattttttatctttacattcaatgaaatagcacaatatcgtattgatttctttcaaaaaaaaattattagacctggtacctcattgctatcatatgcagggatccttagaaacctcctatcttaaaagcacactacatgtactagctattattattggagtatatttagtccaaactccaaacttaaattctgcggctatttcatgtttggcagttttgaactctaccatccaccagctagcaagcaactgcattgctagcaaactaatcgaacagcgacagaaaaaatgagttttgttttatacattgtacatatccctcttctggtccttactgaccattattagcttacagccataccagattcggtatcttctagatttcggctactattacaacccaaaattgggaattggttctgtctagtgggcctgcacagcggcacctcactggcccactaaacactagtggccgtcctgttaatgggccttactgaatcttaacactgacactgatcactcactaattccgaatttttctagaagaacttttagtcaaaaggatactcctatttttaaaaagggtatcttttgtgccatgctctatcattttgttcttttccttttctttcttctactctgaagagaaattctggagcatgcatgtatctgatacatacagatatgctcccctattaactgtcacacgtactaaagtccccctagacagaaaagaaaaggttatgtaaatggacaagcacttgaatttgaatgttgacatggcgcatcagtccagccaggacagccagaattggaatggcagcaatggagatggctcccaccagcttggcaacgccaggtgggcaagtagacaactgcagttggtatcggtggtgctacgtgtgccaatacgtgacagtcatgcgtctgactaaagctcctacgtttgtatgcttgtggactttagccaggattaagacagtcccaacattcacctaagttagtttcgtagtgttaaatatatttgacgcgtaagaaaaaactgaaatagtaaaagagttgataataagaaaaagggggaaaagggggaaaatgaaaaaaactatttcttaagtgaatgaaaaaagatggttgattggctgagaatttattttgaagaaatcattcgttgagtatataatttctatacataacttctatataatatgacaagtataaaaactactccctctgtttcatattataagactttttagcattgttaatatttatacatatgttaatgaatccagacatatattaacatatatagaaatatggataatactagaaagtcttatagcataaaacggacgtgcgctgctatcgtgcagggttgccgttgtgattgtaccgatccatggaataagacaacaaggagtggccatgccaggtcctctaggtactagtagttttttttttaagaccaagtcaccggagaggagagattcccctcctgaatttcattcaaagagaatagttttgagacacaaaggttacatcaaatttagagttctcagggaggaagaaaacaactgtttccaaaccgggattatatccctatctttgctatttagtctttcaacccagaagttagtatctccgtaagtattttgtcagggccgatcctagcgaagaccacattatggcgatgcagccaaagtatccggaaacaatctgcggaagtaggtggaacatcttgttgggtattcttccagacgattggtgtagataaaggaaattcgtttcttcaatgtgtaattttactatccttatgaaagcacatagagatactatattttctaatgtaaaatttggtatctttatatacttaagtatctctaggtattaaaaaatttagtttaaaatttaggtacctcaaattactttcttaagaagtgtaaaattcatcttcttcaatatttggttgaaagccgatagcccgccaaaaactctttgcgaaggggcaagcaaaacagagatggctcgccgtttcagtatctgtctgagtgtctgacagagtgcgcatagggcattgtccacaatcttctttttgagtaaattctggatgctagtagtattaacttttaacactggagatcaagcaacggctgagttggagaatttaccgtagatgtattgcgagaccactcctgcattatgtgcgtgtggaccttctgctctcgttgccgacgattaattgcaccacttcagcttgggggttccacatcatccctgtcagcatggaagcccgtcctactccaaagcactaccttacctggggtgtcaagttcggctcagttgattatttccttcacgttttctcaaaatgaattttaaaaatatatacatatattgaaaaaaaaactttcttttaccatattgcttacatcacttgtttttaagttaccatctatctattatattattaaaacagctttgaaaggaggcactacgttcgctgtggaggctagaaattcccacattaatcggagaaaaaaaaagttcaagtcgaaatacaatttaaaaagagcagaaattcagaattaaaaataagcaatattgaatgaagagtccatataagaactcaatacgagattaatcaaaattcggaataaaaacaaaataaaatccgaaattagaaaagaaaatgagagtccaagtaggaatacaatttaaaaataactgaaattcgaaattaaaaataaggaatattgaaagaagagttcatataagaaatcaataccagattaattaatatccgaaataaaaataaaattaaaatccaaaattagcaaaaatgaaaagaagagaacagttcaagtcggaatacaatttaaaattaactgaaattcagaattaaaaataagcaatattgaaaattaaaagagagttcaaataggaatacaattttgaagcaactagaattgaaaataaaaaataaaaatattaaaagaacacaatacgatattaattaaaaatcaaaattcggaataaaaataaaataaaatccgaaattagaaaagaaaaggagagtccaagtaggaatacaatttaaaaataattgaaattcgaaattaaaaataagggatattgaaagaaaagaccatctaaaactcgtgatgagataaaattaagtaacatgcctataaaggagtagagtggtggcggttcatacgacatattaaaactgttaataaaacaccaattataatcctaataacgattagaaggagggacgacaggcaggccgtgaagcaaacgggcaagacagttgccgaaacttctagaaagtaaaagaataaatcccattgataatcatattcgatttttaaaatctcattgacaataaaaaggagaagcagcgggcggggtggataggagtaaagttgcagagccgccgatgattggcgggacttctagaaaataaaaaatgaattccaacatagttatgttcgatttttagaatcccaatgacaataaagagtaggctgcagatgggccgtagaagagcatagtggcatcgtttgatgggccttctaaaaattataaaaaataaaacccaacaagacaataaactataaaaaatacaagctccaatttttaaaggttcggaacttctaaaaagtaaaaaaaaaacagtgataatcatattcgattttaaaatctgaatgataataaagaagggaggcaccaagcgagtcgtagaggagtacaatgacaaagccgttgacggtttggtgggacttcttgaaagtaaaaaatgaacccaaacaataattatgttcgatttttaaaattccaacgacaataaagagaagaggcagtggacggaccgtataggagtataacagcagcatttgacaggtcttccagagattataaaaacgaaacccgacaagaaaataaactctaaaaattacaagatccattttttttaaaggttccaagaaaaatgaatagaaatagtgatagatcgagcaagcaaataaaaaaaggaaatgacagaagtaaggggtagcaaccggtgtgacttttaaaaactatacaattagaaacacagggatgaaaatatttggtctttcaaagtcttaagacaataaattttaagtaaaaccatacttaaaaaaatatatgattttgtttggatactagccgctcaattgggcgggctacccagctagttaagtttatttatcaaaatatttaatttatctatataattaaatagataatgcatagtaaatttgttcaataatctgtttcaaaacaagtcgtttattgccaaacttatctatatccgtttagtgtatattagtcggccatacaaacataaaaagtaggaaaatgaacgcgatatggatgaacgcgatatggggcaagataaacgtcaaaactttattttagcatttaaccatccgcattttgtttaatcgtctgaataatcattgggcaatatatggttgcattgggctaggattttttttttttggttccgggtccaccatctagatccgcatatgactaccggttcatggcgttggagggaatcttctcgcccgagcaaccaagaaccagctgtggaagttttttcattgttgtttctcaccacaggctgacaaatatattaactatccaaaccatcttttaagttatcagacggtctacataattgacattctcgatggccctttgctaaacctgcaccgattttcatacaatttatatacggaggtacatccacggatccacccccaacccgagcatggtgctcattgtcaagctgaaggcaaggggatgtttgtctcttcagacttcagactttagacctactccctccgtccctaaatatttaacgtcgttgactttttaaacatgtttggccgttcgtcatattaaaaacttttgtaaaatatataaaactatatatatgtataaaagtatatttaataatgaatcaaatgatagaaaaataattaataattacttaaattttttgaataatacgaaaggtcaaacatgtataaaaaaatcaacagcgtcaaatatttaggaacggagagagagtataatttatcgatatttcccttttcgttcggtgcttcaaatgttagtgacgctaattttgtatgaatttttttaatcaaaaattgcttaataatcttgcattgtgggtttctttataagagccagataggacagtccaacttgaacctcccattcgaccagtccatcatcgcatcaatgatccggaccagtcgttcgttccctcatgcacagaccgtcctcgtgtgctgccggtacaatccgttttcgtgacaacggattgtggatggaccgtccgtttttgttgcaaagtccagaccatcctttagtccggcaggaccattcgtcctttgccacatgaagattgtccaaggttgtacagactgtctggtttgatagatgaccggatcatccgttccgcacatccggaccgtctgtgtagttattttatttattgttcgtacaatccggaccgtccttacacatgctaggctgatctggattgtgtgtttttttggcatggtaaattcggatccataccggttaagctaacaaatatcgcagccatgttggaaattgttagttatggccccatcactatctaatgcggtttgccggttctgaaacctgcaggattagcatttctgttgtagtggtggtacgttcacgaaatatttttattttttaactttttatttttaattttattaatagacttttccaaaaaatatttctgaaaactgagcaacgttgttttgccacgccagacacgttggcgttgcagaacaacactgccatgccagctgcgcgtaggggtgaaatcgggtcgggttcggtcggatctcatccttcccatatcctaacccacattttataatcggaatcgggtcgggcacggatattatcggatacgaatagaagcacggataatatcgggcataaatacggaacgaatacgtaccaagacggatacgaactctatcggttacgaatatttattcagatatcaagtcaaagcaacaaccaaatataccacatagacaatagccattcagccatttcctatatgtctattatgaatatattaggggcttatggcatcgtaatgcctatcagcaaaactgtaccaaagtagtagcaaaagtagacattcatagcttgatagcttcagactcaatgctgtacactatagttcaccataataagtagtaccatactagtaaatactaagagcatcaccataactccataagtaatagtactaactactaagtagtaccaaaatagttcacataaggtatacaatcaagccaaaagatacacttatatgactactgatcacatattaccaatacagtcatcccaaaggccagcatgttcagattcaatcaccaaaaactccagctctccaatcagcaacatgctcagcttcaaacactattcgttgcctgaccctaaaaagaacataacattcagttaatacaatgtggtgctccttaactctctcaaaatccaaagtggaaccaacagattgttcatttaaagattgcaggtccaaaatatatttttaaatgcaacacataaatatgtaattaacctcctcatcattgtcagttttagcaccatctttatcctctatctgtacatccagctcatcaagaattattgctatcttgtccttaaatggtcctgtaaataaaattgacaaaatataaacacagtctagaaatggcagattatataaatagcgaaatgaagataaacaagcagttaccttttctagatgctcttatccaatccttggtacaaactagaactgcgaaaaggaccaacaacaagaccaccagcactaaacgctgactctgaagcaacggtagatatttgaacagccattacatcacgcgcgagtgttgagaggataggaaaggtcatttggttgctcttccaccatgccagtatgtcaaattctacaccttcacctgttggatcaacccaacgaattggcttctctttcatgtagacatccaattcatttatatcgtcttctttatttgcagctgcatcatcatacaagaatttctcgatttcattgtgacccaaagaagtattaccatgtggctgagaattttcacttgatcctgcagcggtaggtttcgaagaccttgcaacacaactcttgtaagcccggaaaaatttatcgatagcagccaagacacgcttaaattcctcttcatacttgtcagggtaaatcttctgtaaaaaaaatcactagcttttgcttgtatctaggatcaagaaagcaagccacagcaagagctaggttggacttgtcccaatatttgtcatatttgagttgcatggccacagccatagaagcaatggagacatcaacacttgcacaccattctcgaagtgctaacttaatctcacaaaacttccaccaaaacaagtttgcagttggatatagacaaccggaaaataacaatgtggcatcattgaatttctccaaacaattgcatagtgattctgccataccccattcttcagcacttggtgcacacctttgatatctatcctcatctaagaataaaagcctttcaaaagcacccctgtagtaaatagcttgtttcaacatgtcatatgtagagttccaccttgtaggcacatcaaggggtagcccagaattgttgttcagtcacattctacagcacacttttgaaattcctcccattgcaacgtagaattcttcacaataccaatagtagtcctaatattctgaattgtatgtgcaatgattttcaatccatcttgagccacaagatttaatatgtgacataaacatctcacatgaaagaaagcaccatcacacatcaatggagggaccttactgatgttaaacagcttgttaagctctatcacaacttctctagcacatttatcatttgatgaagcattgtctagtgtgagagcaaataattttttctcaatattcatagacattactcccttgacaaatgcatttgctagccttgttcctgtatgtttcccatctatatgaatgaacttaagaattctcttttgcatcagccaattttcatcaatccaatgagcagtgatgcacatataagctttgttctgatttgatgtccacatatccatggttgtagaaattcgactagaaacagatttcagctcatcatacaaaattctctttctaacttcaaatatctctaatatagctttactagtggtaatgcgacacttgaattcaaaactaggccgaagagagtggatgaactcattgaaatacacatgatcaaccatagaaaatggatattcatgcataataacagctatataccacttttccaagcttacttcaggatcatacctgaaagtctgaacttcacccttcacctgaagttcttgctggccttgtttcaatgagtgaatacgattcaaatgatttcataagtgttttgtgccatttactgtctctgctccaaacactctaccacattttttgcattttgctttacgttgttgctcttccacaccagtaactttgttcttggccttgtcagtgtacttaatgaaatagtcccaaaccttcgaggtacacttcttctgcctctttgctaccggttcaacttctcctgtgaattctccatcttcttcatcgggaataacaacaggttctgaacttccacctccacctccagtggctgtggttgcatcatttagtaccaatgcatttggtgccaatgccgagtgaccagtaccaacagctacggtaccagccggagatgcacctgtgcttgcacacatactagtgtttgcatcaccactagccattctatcctaatcctacagccaaacagcaaaagtaaaataagaaaaaaaaatccttccaagttctaacgtgatgttgagaaagggcaatgaaaaactgaaactttggctaacctggatggctggatgagtcgctgagtgttgacttgactacccaagaagatgacgaggtggcgcgacgtccttcggctctcggcgttgaggagccaaaagaggcaaggggccaggcggggccttgcggtggtggtcggcgcggcggcagtctgacggtcgtcggcttgtcgcacacccacgcggcgacgtgcgacagcggccggtggtcggtgggcatggccgcgtagccacttggtggtcggcgaactgcgaaggcacgacggcggtgctggagcctggatgcacgcatgcggcgtgcggcgcggtgctgcctggctgtttgcctgcctgcgttctgccctgatctgaactgtgaagtgaaggctagggtttgtgcttggcactttgtttggtgggccttttggatgtgggctggctgttgcctgttgtgttggcctgttgggtgcttgcctgttgggctgctgtccatctatccgggtaatatacggatagattatcgggtaatacccgcataatttcccggataatccgtatccgtcggataccgctctcccgaacccgatctcatatccgcaaaaaattacccgtatttgaaccctgtatccgtgtaagggtccgggtacccgaattcccgacccgaatttgacccgaaataatgtggccgggcgggcggtcgggaaatacccgccccgttttcagtcctagctgcgcgtggcacgacatagttatttgggttctgctttagaaatacttttcggaaaggtctattgataaaattaaaaaataaaaaagtctaaaaagaaaaaaaaattctacgttcacccacccaattaatctgttcctaaaaatcaatatataatttatagaactctagttgtaaatgttgtacagagagatgagatgatcgatcgatccggcaggcaggaccatcactccagcccgtcctgctgtcatcttgagctgtaatactccgcacactgtccaagtgtcgctgtacgtggaagacacaagaggcagggcatatggccagattctgtcccaacaccaccattcgtctggatcggagacgtcgcgcgcggcgcgccatatcctgctcgcgtttccccggtttttcgtattaaaaccaacggcgcgccgccgccagacgaccggacagagtgctcgctcgctgctgtctcttcgagcttgctttgcgtttgcgttgcgttgctttgctcgatcgatcgatcgatcggtcactctctgtcttccccatatgctgaggtcagtgtccgggtccaactcgtcgaggggcatcgccgccgtggtcggcgtcggccccaggctcggctccgccgtggctcgcaagttcgcctccgagggctacaccgtcgccatcctctcccgcgacctcggcaagctcgatctccctcttcttcttcttcctcctccgttcttgcatgatggccggtgatggtggatgtggttgtgtacgttggtgcagagaagctgtcgcagctggcggaggagatcgcgcaggaggcgaaggcgcaggtgttcgcgctgcgggtggactgcgccgacgcgcggtccgtgcgcgaggccttcgaaggggtgctctcgctcggccccgtcgaggtgctcgtctacaacgcctgcgagccacccgccgacggcgacggcgacgcctccccgcgcccgactcccttcctcgccatctcccccgacgccttccaccgcgccctcgccgtctccgccgccggcgccttctactgcgcccaccaagtacaatccatcaatccacatctctcctctcgatcatatcttcgattaatcagtaatcacccatggccatgccggccactgatcgatcaaacaggttataccggggatggtcgagcggggcaggggcaccgtcatcttcaccggctcgtcggcgtcggtcaccggctacgccggctactccgatctaagtaagctgatccattcactggctcgatcgatcacacgtaattaagcaaccggattaaattcctggatccgagtcatgtttgcgcgcgagtaaaatgcatgcaggctgcggcaagttcgcgctgagagggctgtcccagtcgctggccaaggagttccagccggccggcgtccacattgctcacatgatcatcgacggcgtcatcggcgaacccaggtcagtgaaccaaaccaactcatgatctcaatttcactaaccaatacttcaagaaatcaagattacggacgtctttgcttgctagatactaatataattataaagcataaatgcataagcttattatagctttgattcattacgggtagtcaaattgcgggtaattagtttgggcaagtgcgagtggaatattgtccctagtgagctatgacaagaagaagatataccaaagtttcgggagatctctcaatcctatcgttcgctacctcgcgaaggtcggtggtcctgtggcgtcgtcgcgaacgtgtagatcagatcagctcatagggcattttcaggaaaggggaacagaggagaaaaaaaataaaattttgcgtccctctcataaatatgcaggaatacattccgcaatgatggcacggatatatacgacttccgtaataccggccactgaaaaacatgtgcgagctgcttctttcggcatcattccttgaaccctagaaagaagatagttcagtcgttcggtcaatgcgtatattttataatagatagtatcgaaataatttgttaatatatattttagaaaattgacttgaacaagtacgtaagcataccgatattttgttaaaaccgtaagtatgcgtaccgatatatatgccctcatcgggaatatgcaaagcgatggtatatgatagctatatatcctcctgatcaaccaacgagaccacttgtacaacatatcatatatatgatttgttgcattgtattgtgttggatttttttcttaaatagttatatctatctatctacttttcagaggcataaaaaaaagtcaacatattctctcttcacgtttggttgtctagatttttccacattaattgaaaaaaaaagaaaaagatttgcatcaattgatcatggagggtctaaatataaaaatatttgcatattagaccataatgagattagattataatggtacagcttggttcgcttttaaaactagcccgtgtagaatttcagggggaaaaattcaataagaacttaaaagtttccccacattccagatgaactttagacctttagtatattgcctttgttcttttcgaaaactctatcacttacaagaataacaacttttattcatgctcaaagacatttacaataggaagtggtctcatggtatgctcttgggaggtgcagcagcttaagcaagtattagtgatactatacttggacaatgcattggaacttaaatggatgtaaccgtaattttgcacttttatgccttgttccttttcactacagcctataatcttttatatttactttctaaagtgaactatcccatacaaacactatcaacataaaacagtttataaatatgctcctaccctacctgtcagccactcgtccatcatttcagcttcccacactcccatctctctccccccaccaatttctttgatcttcctccattccataccgacacaacaatatacatctttctcgatgccagcactaacaacacgagcctagcagaaagccaccttaatgagggatcgaccagcctcctacctctctatattgaaaccttaatttgggatttgtcaactacccaatgcctcttccctctctctttcccatctgtagttgcaactgtgtactccgctctattttgtaacggacaggatccccttctctccatgaacccaagcctcaacttcatctggagaagccatagcgaagtatggtgaaactgatctagatccagtatcgtcacaaaaatagcagctaaaaacattggtattatggatcaacgccatgaaaacaacctccctctccctttgtccacagcgagctacaacaattatttttccaagaaaaatagtacaaacacaagcaccaacatatatacgtgtaaactcatcgctataaacactctagaagtatatatgtccgagagactgagctagcacttccataatttagtgataagctattctttatgattctttttcaggctttttcttttctttgcagcaacatgcatgcatcagacaacatttctttttcagttctcgtgtttattccgtaccatgatctcgcttcactgcacaaaagatttccatgccctacgagagcaggacacggcgacaccatttcaaacccatcgctatgctgagttgtaaatgctcttgtctactgtccgatccaacgcctcccttccattcatggcatctccaaaaaaaaaaaaaagcaacaaaatatattctctttctagagtcatagtccgatccgacctgttcgatctcggaaactttttaaattactacttttggatcataaatcgggttggatagttgggcacctggcccaaccaccaactgccaccttatgctgcttctcccctcggctcgacacgttacgcgcggtccaacgttttcgcccggaaaaaaaaagctctcatgccgtccttgtgacctgccgcggcgccggctgccgacaccgcacgcatcggcgagcgaatcgctcgctcgatcgcgcgcacgccgcgtgcgatacgctttttcgcgctcgcgctccggcgctcggcgagcgcgcaccgagaccacgaccatcgcggctagcttttttttacagtgtgggtgggttaatcgcggggcgcgatcgagtgatgatggaagcgtacgtgatgttttcgtgtgtgtttttgttgcacgcaggtcagggagggggaggtgcggcggcgagacggcgtcgtcggcgggggcggacccggacgcggtggcgcagagctactggcacgtccacgcgcaggacaggagcgcgtggacgcaggagatggacatccggtcgccgtcgctcatgtagtcggccggccgatcggggaggtggagaggcatgcactgtagctccggcggcggaatctctactgttgccaaggaaggaaagaagaaaaaaagaaaattcattgatcgtgtcatcgtgtggtgtggtgtgcgtgtgcgcggctgcggaccgggcatcgtgtccccgttccgcgtcgcatgtcttctttttttcgcgctgcgtgcgcgcgccgcttggcgcttcgcgcgcctaatttttagtgtgtggttgatgcatcatccgtccgccgtccatcggcagcatccagcagccggtgcacggggaagttgccgacgacggcgacctgcaaaaattcatgtgatttttctgtacggttttctataaatgtatagtagtattatgtctcgttttatgtggttttctgtacggttttctataaatgtatagtgtgtctcgttttatgcatggttacctgcacttgattgcatgaacagtgatgggatggccccttgagaattaattaggtagcgcatagcaatcgagaattcgagacgctcttttgtgggaaagcatggcaaatggcactggcccagacagcccggggccgcagttgtgtcaagtggttagccagtacagggaggggatcaagtggcctttcatgtgagaagagataggccgatccaccggctgtttcatctgattgaaatgatttcggtgtgacggtgtcccagcaaatgtggacgtctactcagtttctattccaatgaaaaagaaaacgagaattggagagagacgtcccttcaaacattgttgaagaaaaaattgtgagcatgttagtgattgaacatgagatctcagggttaaaaccacgcaccccttaccactgcactatcaagtgcatctcattccattccaatgcgaaaacactactctgctaagttgcaagttgcaaggaagatacactggcctctgtaatcgaggccatcaaaattcaaaagggtcgtatgatgtcaaaattcagagagatctggttattgctaatagagctgtttcatcacagcaaagagatgccgacaatagagtggtactctttggacatgtgaatagtgttacatgtacgacgctactgaagctgggtttatgcagagttcttatcgccaccaaaggcgttttccagaacaccggtttccttaaggtggctgatgtccccgcacgccttgacaatgcaacgcccagtggcaccagacacaaggattacgcttacggatgtgttgtgtatcttaccgtgaagaggcttcattggactggcatgcctgtagagttctctgatggttccaccgtgcgagaccaagattattcgctcccctgttgatagagttacacaagctcagaaatgatcagaagctcacatgcaggtttcaataaaatgcagttgcaattacagagttatgttatggaaattaattatgttgtgtaaacactgatgtagtatctccacctaatatcaacacgaagcacgaaacagcacgagtcaattaaggatgccaataagccaactacttaagtggtattccttttgatagactgattaaagcatttcatttcatcatagcgtaatgtaaaaactctcagacaatccaattataagataaaactccaaggatgaagctcacagtttaccttgatgtttctcgactatgttgtacaagcaagagacacatcgctctgatagttgatcaagactttctccaccaccctgaaaaacaagcccaaaattcttgtaagagaagctactgcaagaaggcatatggtagcagcaaaagaagtgnnnnnnnnnnnnnnnnnnnntaaatatggcagttataaagctaacttgagaagcctctatgccaaatgttacaggtaagtgtactacaggagatttgatttgatagagagcttttgtcatttcaataaggtgaaaaattaaacttaagcacatatttgtagttgaagatcatccatgtttgacacgcctaaacttgatctcttgcaaaactgcagccctaaactataaaaccgaacatttaaatcctgaaactcataaaaccattttcattaaacccttagcctgatttactggtggtttcctccacattagcagtaacatcacaagttttcattttggcatcgcaacccagttagcatagtcttaactagctaatgtgatacagttgatggcacgtcaaatgaggtggcaaagctagcaacatgtagatgacaggtaagcaaaacaatagtagtttaggtctaggggaatgtttcaagagtttttaggttgtaatgtgtccagctttgtggttcaaggttgatatttcgacttgcgcaagggttcagggttgtatgaccttttttcaaaacctatgcaacggttgactcaatggcatcaaatgggcgtggtatcattgagaatctgcttgcaaacatccagcaattgacaaacataccacctatgtatggtcttcccatacatggtcgtcatggtctttccgatatgttccaccaagctagggatgttcagttgtggatggctagctcactaagccccgacacccaccctcaccaccagcaacccccgccatcgccactgtcgcccttcatccacgatcccctcccattagctacccaaccctagtttccctccagtcgtctagcccccatagatcccccactgctccttccccggtgaaccctaaaccctatgtatggtatcagaagcataatctgtttgctgaatcaatactgatgtgttataaaaagtaagacaatggagtgcttacaggaatttgtcggttcctcttgtgcgacaaaaatgctctgtaagcctctggcttttctttgccagcatcttcatactttaagccctgcagatctccgatgtgtctctctctcagtgctggatcaaacacaacctatgatgcagacagtttctacattagtaatcaatgaccaattgatcttctagtcttctacaaacaatacattatgcgtaactgaagcagcgtagatagtcagcctgagatatttaaaaaatagaaaagtgcatgagttgaatggacaaacatttggcaaactgcaagcttttgctattatttctgcagtctctgccgctcgcttcagatcagatgaatatatcgcagctggcttggcttcattagaaagacgccgtgcaaccttgcattaaagtcaacaagttccacataagacacaccactccaaatgtcttacggcaatctgaaatatgtcataccataccgcaacagcttgttgtcttccaatctcattcagttctacatccaggtgcccctaatacaggattttggttctatatcagttgaaaggcagtaagaaactataagtgtgataaaataaacttatgaataagacatggttagttaatgcgcaaagacaaggtaatgttggtaatcatatcatgaaatgcctttaccatactttgtttccatattacacatcagatatagtcaggtaatgtgtaaccatagctatctgacaatccactatggcgagtcatagcataagtttatcgacagccataaaaccttactgcctatcatctcttaagtttttgcattgcataacttctgttatagaaactgttccttacaacagcagatgtacgagggaattttcctagtactttagtaaacaactacgagttcagaccatgtgatgaagcacatattgcaaactgtaaatttctataaaaggaataagggaattgcattactttaacatttaacatttttcacttcaactttataaactttattatacgagaaaatcatatcaatccattaagattaggggagtgaataaacagtcactggaacaatttaattaggggagtaccacattaagggtttcatgctgaaaacaaaagaaaaacaagacctcttatgtaacgggtgcaatcaatcaatcaaaatccgttcagcaaattaaaagaactttctaaataccaacatactttcatcaaattctgcatggcatcacttgagaaaacatccattttgtccgacttgtgagcccttgtatacgatatatcgtccttatcaagacacgttctttgtcaaactattttggcttagattagatagtaaagccaactagtctgtattactccggagcattgtctaaggtacaccggagcattgtaaagtctgagcactgaatgatcaaagaactagaaacaagtgtaccaccaaactatcatttattcttcccaattttcccaaccaaagcttttccccaaagttgaagaccaaagcttcagagaaatagatggggctcggggcgggaggaacagagcacggaacctggatgatgcgcgaggcgttccaggcggtctccccgtgccgcaccaccacgacctcggtgaactccccagcctcgctctccctctccctctccgccacggacgcggacgacatccctaccgctgcccccgggtggtgcccgtcgttccggcggatctgccgggcgacggcggcggcggggccggcgggagcgagggacgcggaggcgcccggtggcggtggtagtagcgaggtgaggacggcggcgatggcggcgcgcggcggaggaggcaggcacgtgggcatgccaaggaggagcggaggcggcggaggcggcggggagaggccggcctgttagaagatagcggacacgatgggccggccaaaattggatacggtcaggttacgcacaagtttgttcggcccatcaaccagcgaatacaagatgaatattaaggctctgttcgggaggggttgggatccctcctccccggcacgtaaaacgatgttcgcattaacgcgtgattaattaaatattagctatttttttaaaaaaatagattaatatgatttttaagcaactttcgtatagaaactttttgcaaaaacatatcgtttagtagtttgaaaagcgtgcgcgtgggaaacaaggtggggagttgggaaccatggggaacaaacagagcctaaaatgttttcccataaaaaatattataattttttttaaaaaaatttcggtttggaaaaaaaaatacaaatatactcataacccctcacgccccgtcctcccagagggtgttttgtgtgacgtggcagattgttcatagtgtgacgtgatagattgttgatagctcacgttaacgaccatccgtttaggcctgtcacttttgcaagcgccacccttactattctcctatagaacgatttttgctccacctagagcgccactcaaaaaaggtaggctcgtccctctgtctccctctcaggacgaatggggctatctgtatttaaatcgttccacctagagcaccactcgaaaaatggtaggctcgtccctctatctccctcttaggacgaatggagctgcctctatttgaaatattcaaatcttaaattcgttttcttaggaagtcgaacctaggacatacaagtactacttgagtactttactactaggctacaacccctttcgcttaataaaaaaaattaaaactaaaaaattctgcaagatgacaaacctacatgcatcgttgctagcctagcccactttctcttcttccctttcctcctcttatcttcccttgtcgaccagaacaatcaagtgcatagacggttcctctttctcatcgggtaggtcgagtgtaggcaagtggtctcccactagcaagctctccctccacctttctctagcgaactccctcacgcgctctctctctctctgacgaattccaaatccaagctagcaccaactcctagccttctcacccgaccacacctccaccatcaatccatctccctaagccgccgcagcattatgtgcccccgtcctgctatctttctcatctttgatggctctccgccactagagacacccctgcctcctaactgttcggttcactttgctcccaccactaacactaacccaccatctggtgccgaccccgtggctcctgcgcttatctgccgcctccccaccatccctctaagcacaagaatccttgcttatctctttccagagcagccttctctgtaacccaaccctaaaccttgaccgtagacctaacccatagcttatcacgatgcattcatagcgtgcctatgagttaggattttcgcacatatatccatgctttcattttcaaaagtaccaaaaaaaaatcccatgtcgaagttcacctaaatcttttacagattttgaagtattataaacattttcaaaatagtttatagcaaagcaacacaatcagaggacagttgccatgcagtggcttccttgcatgcgcgcgcgaccaaacaccgcatgtgctgtgtgcaatgcagcacggatggcaagtgagtcagctgctccccaacaattacttccgtggtgtgtgtacatgtcgccgagttaaggcctcccatgactctttgtgcaaaaactcgcagatccatatcgatcaattaatctctgcaaaaaggcaaaagccacaaattaagtttctgcacgtcctgagtcctgacctgacttatctagtgcgttcataaagtttaatcaatcaaagaagcctgcatggattgatatatgataatataatatgactagtaagcattgatcatgcatttctaaactcaatggctgggcctgagcttgtctggatcctgattgtctgcagtaatgtagacgacagttactgctcatgcgaggagaacagtgaaaaatgccaggaacagtatagatccactgtaggagtactcctaaaaatactgctgatcattgtactcccaaaatactgttgatcaatgtagtagttagttactgtgtcgtatgatctaagacattgattatcatcgaacggcaggggaatgcccctaattcaggtcactgttgccctctgcagtgacatttctgaactgcacagctgaagttctaaacattatgccagacacataaagtcttaccaacagtgcagtgagagctaatcaagagctagggacttgtgagctaggaaaaagacagcatcactatttctatgcatttctttgaagcagattcacttgctccgccctaaaaaaaaagagatatatatctagtagcgttttattcggctccagcttcacatgatgaaaaatctggatatgatttgcccaataggcccttagttttaacctgttattttagctcaccttaatccagttttcttttgccaatttttagctcatatagcgatatcgatcttctaatgattgtgtgtgtacatcttaaaaaagataatcgtgcaactgacgcctaataaagcatttgatggtttaatccaacatagacaacattattagcaaatgcatatgacctcccaacatcttcttccacgcatcctccttaaatagcgacgtgatctcctcagctttcttccccatggggctccatcggagcaaagctctgcagccagccagctgctagccgcgcgtcaattcagacggcacaccaaactccacctcaccatcgatcggtgtcgccaatgccatcgctcatcgatggcgcggcctcactgcggtcactcctccggccgtcctccgatggccgccggacgacgaagctgtccggcggtgggggcggcggcggcgccggcggcgtgggcggcatcttcaagatgttcaagctgctgccgatgctcaccacgggatgcaagatggccgcgctgctggggcggcacagcggcggcagggcggcgcccctcctcgccgaccacgcgccgacggtgacgctgttcgggcaccggcgcgggcggctgagcctagccatccacgaggacacgcgcgcgccgccggcgttcctcatcgagctgcccatgctggcgagcgcgatgcacagggagatggccacgggcaccgtgaagctggcgctggagagcgacacccgcagcgcgcggcggcggctgctggaggagtacgtctgggccgtgttctgcaacggccgcaaggccgggtacgccatccggcggaaggacgcgtcggacgacgaccgccacgtcctgcgcctgctgcgcggcgtgtccatgggcgccggggtgctcccgccgccgcccgccgaccgcagggggggcgcgggccccgacggcgagctcacctacatgcgcgcccgcgtcgagcgcgtcgtcgggtccaaggactccgaggcgttctacatgatcaaccccgacgacggcagcgacaacggcggcgccgccggccgcgaccgcgagtgcgccccggagctgagcattttcctagtgaggaagaagtgagcgaggaaacgagtattttacatagtatttatactgttctcttgtgaatacaactatatatatacacacacaagtacacacattatatgatcgagctatatattaatagtatgcttgtgtaattgtgatgatcagacaatcgtcccaattaatcacctcgcccctcattgcaatgatcattcgctacatgcatcttgtactcccttcctccatcctaaaatataaacattttgagactcggacatggcctccgggatactattttaactaataatatttataaaaataagatgttttaaataaaaagagttatatattatgatagtttgtttaatgataaatctaataacatcaattttacatgattgatcttttttatttttttattaatagttaaagttacaaatgtttgacttttcactatgttaaaaatacttatattttaggacggagagagtatcactctagagattgtttttacacttagatgacacatatctttttttttttgaaaatacatgcaaatagttggtacggcagttgtttttacagtacaatgcatgccataatatcgtgatgggacacgtacgtaccataataattttatctttaggtctatgatcgacaagcatgtgggggcagatgttgacacaaaggtcgtagttccgcagtactttgttcctcatcaacttgatcacaaattatatacttatatcatcatgttagatatgaagatatatatagtttaaacgttgcacatggataagtaagatgtatctccccagcagtacgcatgataagcaaacatatatagcaagcacgggtggatttaccatggggatgatggtggctcaaaccttcactattgacatgacaatcatggaaacctcccacgaccccaactaaatatttttaccatatgtagatggcaggaggggctctaactttatctaattcgtttagacccctgctattttttctggatgcattaccaataacaagtagaatctcactgcatggttagtttagtttatacataccagtatgaattacggtaatagtgttttcatcccttgatgggatatcctctcatttcattcatgccatataaataatcataaaaaatataattttttgacaagataggttaatttattttatatataaccccataatatgtaagttaaaattcaacttttacaagttgtaacaaaaataattataaatgcatgataactatttttaatttaatttattttttataacttgtagaagttaaattttgtcttgcatgtttatagagtgatatattttatattaactagaaaaaatgcccgtgcgttgcaacgggtgaaaactattttaatcttattattgttagtttgttatatggtttagttaagatgaaataacaaactaacaataataagattaaaatagttttaatcttattaaaactatttaattcactgtgttaaattcgcttgcatatatattttgttagaaaatcatgagttgtaattaggagtctgatcgtctcaagttagtatacgagttttttaaaaagatttcttatacgattccttttgtatttgcaaaagcaaacgaacttaaaaaccgacacatacacggatgacataccaaagtaccagaaaaacatcttcaatttttataatagtggagatagagagatatgttatcaatttttatttttttaataactatttaaatgatatataagcagggatgaaaatccgtatcctgaattacgttcaagtacaacatggtgcatacataatgatagtagagcatcgatctgggtcggcgtcagcatgggtccaaagatccgactggaagctggcttgaggttatgtgcaccaactttggtatcgcatttgaggtgtgaggagaaggggataaagttagggtttggaggagggtggagagaggtaaaggaagtggaaggggagagagttcaatggccgcgtgaaggaatcgggggccgaaatcgagagtgggggaagacgattcacggagattcgaggagttttgcacaggtggtgagtgctgaatcatcaacaatggcggataagggggatgcttggagacggagagatccacaaccatggctgtatcgtcctcaggggttttagccaaggccacaaggattccaagcgaggtcgcagggattccaagcaaggccatagttccaaccgaggcctcaagnnnnnnnnnnnnnnnnnnnnnnnnnnnagcataggggttttcgtcctcaacaatcaaggcctttgggtggagctcttagggaaaatcaggtatggcaaggtctggaacataattcatctcaatctcctacatctacaaacccacctactcaggataagttgaatcaacagaagataggtgaagttgtgtctgtagtagaggagaaagagaagaatttagggtctaagatagagcaggttgaggttaaaggtgaagctgggttaattgtgcagcagaagagggagagctctaatgtggaggctatgttaaacaaggaaaagaaaagtgaggagtcaaagacagaaggggatacaaaaggtgtggtgaaagatggggttgataagggtgcccaaatcaggaaatggtgtgggaaatgtagatctatgggtcatatagctaaagattgtgtagtgagaaaatactgtgtgatttgctctaaggtttctcataatactgatgaatgctttgtggcacaacaaccaaagccagtggcaaagatggtgggatatgcagctggtgggttgggatgtgtcctcaaacagaatgctaaaagtactatgggaaaagaacatgtgaatcccaaagcaatcataacagttttggatgaaggaaagttggctggaaagcagttggaagaaaggttttgcacaacagtttaagtgggtttgggaatggagagcaaaacctttgtctaatggtgctttttagatgagattcccaaatgaagagaaattggaggagctgtcgaattttgtttcgtttggactgaaaggcacaggtgttcagattagtgtaaagagatggtcccatgaagctgaggctgtgggtaagctgcatactgtgtgggtt

SEQ ID NO: 6571 - DNA, 9751 bp, Oryza sativa
attcctgcagccctaatcaaaattatttttacattaaaaaatcacaaagagacctccacctattaggtctagcagctctcgctctgtgactctaaatatcctacaaatgactctaaactgctacgtggtgctattaaattaaataaaatactaaaaaatcttaaaaaaagaacaaaacatttggctatcgatttgttagttttttaataagaaaaaaacccaaatctctctccctcgctccctccccatccccgtgtggtgttaaaatccattaaatatattataaatgcctctaagctgctatatgacattcttgaattagagaaaaatcttagaaattttggaaaaaaaaaacccaaccattagatatgacataaatcgatggacacattttttcaatggattaattgacacattatattaggtcattaaatctatatttttttttaaaaaaagaacaccctaaaccttcttccctccctcctttgcggcatacagtgttaaaagtcgattacacatcttataaatgctcttaagatattatgttgttctcttaaatcaaagaaaatcctaataaaattctgacaagaaaataaaacatctgaccatcggtttcaatataaacatctgacacattattttagtctgttagattaatcatttagaaaaacatcccaaacctccctccctccctacccatgtacagtgtgcgccattcttttctctctgtttttttatctccttgacaattaaaattaaaattatctataagggaaaaaacacaaatggacctccatctattacttatatcatgttaggcatctaaagactttctgccaacttaattaatttctcttgacatgcttatacaaattgaccttgatactttcaaaataatgtttttaggacatagataaatatttttaagaaagatgatcatagtgtccgaattacacatatgatctatgaagtcactaatcatagcaggtattcatgtagcaatatagacaatagggtgaaaatgaaggtgtggttggttgaacatcatattgataagcatgtgggttgtacctaaggattttaaccgtggaacaaccttgcagtggctttagcaataaatcaagtcagttccatttaggaattaatgaccatgtcctttatttatttatttttattaaacttgctacagtacattgtaaagtcttgacgtagaacaatctaaaacatgtatttgttataagacaatacactttagtgatgattcgctaaatacattatgaccattacttcaaaatttcaggagagaaaatttagaacgtatacctttaccccatactaggttatgttttcttatattttcgtcccaaattgcaaagatcaaatcatttcaaggatgattaatagaatgaaactatccaaaagaaaaaaaataaaaatgggcataaaataaattgaaaattgaaaaaatattgctggattttaaatcaatacttgattgaaaaattcaaacattttacaaggatggttagaatgaaaaaatatatctataattttaaaatacaatcaaacaaaaaaaataatattattgaatttgttttgaggttgtaagatatccttttggcgagttaaaataccctaaattttatcataggaaccacctccattgtttcgacacaatagtttctcatcaattaaaaaccacatgatctcaagtaattttattttagaatttatatgttgcacgggtaattataaaaatataacaagctttcaaatcacacaaaataagtttaattttagtttagaacataatatatgatattttaataaaaagccacccgcatataaatattcataataaaatttcactcacattatacgagaaggtgcacgcgcatgtgcgcgggctaactttctagtttaattaaacttgaaacaatttaactttgacatattataacctgaaacggagggagtagtatataaaaaagaagtatcaccgttttttttcttagggtattagctgtagttgggatccacacccaacgttctgtaatcggattattctactcccgtaattgggccagctcagtcctaacatgaaatggacggtgagagcaaatttaagtagcttaataaggtgtaacagcacacccttataaaaacataatgattccaaacgtaagaatgcatagtaggaagcagttctctctgtaaagcgcaggtgtgtcgacgtttgatgtcgcggttctggtatttgcatggtatggggatcgtcggtgctagggtatacgcgagactaaggtaaaagagatgaagacatggatttttatacaggttcgggcccctgaattgtcaggtaataaccctacatcctgttggccaaagccggtattgctcttattcatgataatcacaccagtacaatatttggggtagcctatctaactgttgtcgacatggcggtctgacgatttgactcgtagtcgacaacagggtagccttcctccttgaatccgtgtccggcgagatcagagatagcgctttcatctctcctaacagtatccggagacaccgtaggggactagccgtgcttatctctgaagtcgatatccggcggcatgtcttggcgtatgtaggcttctatgttgattgtgttgggtgttgatcctctgtgtatgttgattctcccgttgggcgctgatcccgttgggtgttgattgtcccccctctcctcctaggggggtttgtatttatacccatagttgtctccttgagtagtccttgtcgtttccatgtagaactctggttgtctttccttatccggaactccctcgaggtcagtttccgtataagacatggtatgtggtggatcctgccgagatttagtcaactactattaggtatgtggtatccataaccctgacagtagcccctgacttcgatgcaaatgaacgagttcatattctcaaccgcagactttggaggaactgttatcgagctcacgtgaccgttctcggtgagtttagagataacgttagacttcctttatcagcctcgtgcgggcaccgaatgagtttgcctaagtcaatctctgatgtcgaccgagaaagtacagagcgtacgactaagtctcccgctttgctgtaatcaagaatttggattgaagtcaagaaattttatctcggtgggtacaccatctcttcattctgtattccttgtcgagatccatgaaccgttctcgagtaatcgagcaggcgtagagtctgcgacggagccttgtcgacatttgtcgtacttgccttagtcaatcttggtgtagaaccatagagacatggagtcttcgataatgtcgaatagaattttcctgaaatcaatactcagaaaagaatattagatagaaatagcctccgagcgaatgctcaaagggtgacatgttataatatgacagactagtgaattgaatgtacagaccagtgttttgtatatgagcatcttctctcttaccgactccgatcagtcagtttgtagagtcatacactctccctagcccccagccttgtcgtcggagaatcgttctcggatgacaaggctcttggacctttgacctgcctcggttgaacaagcactgatcctagcccccaaccatgaagttggaaaactcaatttccgattacacggcttggttaatacgcacggcgagaactcttacacgaccagatcttacatggtctttcgtctctgaaggatccgacaaggccttatcggctctgggcgtccccagccgaagttccctcaggttcctcggaggccttgtcaagacggcgtaaagggacagtacgataggtttcaatgctaggtgtcttttgtggtaagggatctctgggtaaaacacttggcgatcttgtgcacctaatatcaactttgttgaagcagggtaatgggagaatcgctacacccctggtcgaggaccgggtagtagccgtaacccgaccacttgaagtggaaatagtgggagaaacgctacatcgctggtcgaggaccaggcagtagtcgtaactcgaccacttgaagtggaaatagtgggagaaacgctacatcgttggtcgaggaccaggcagtagtcgtagctcgaccacttaaagtggaagtagtgggagaaacactatatcgttggtcgaggaccaggcagtagtcgtagctcgaccacttaaagtggaagtagtgggagaaacgctacatcgctggtcgaggaccaggcagtaatcgtaactcgaccacttaaagtgaggcgagagagatcactacgttttactggttcgagaaccaggagtaggagtctcttaatcacctataggggcgctaaagttggtttattacatgtgcatatcatgtggccagcatgactcacacacccaacttatagcatatccggatgtccgttcgcaatcatgtcgggtgatcaagccgacgacgttcgcgaggaattatccgttaacatccttttctcgagtagtccagcgatggccggcgctatgagataggtcgtcggtcttctttgataggttgggcgcgacgactctgcatttgtcgagatcgttctcgataatgcggtgtactcgaccacgacctactcgagtgctcaattgttcctgaaaaatattttctagaaggcaagatatatagcagataatgtcgagtatgtactcaaaaaaaactgcatggatcttctagtattatcaggatataacgagcagatgtaaatatcaggcattatgtaaaccgtaaacaagcatgatttatacggaagaaaacagagcgagcccccagcgttagatcgtagtcgatttaacatcggggacactcgcgctacagatattattgtataaagaacatgctctgggtaaacataataaatcatggatctgataatgatgtatgatatgaataggtacgataaattgcatatgaaatattgcgtacctttgtagatacatgccggatgtatctacgaaattagtagatcaatttgaaaaaccaatctaccaattaccttattgcgtactcgttggacatcatatgatctgacatcttttggtacgccgcgtatcttgaggcttggatgatctcgatagaccaagttgtcgatgacgatgatggttctgatctggttaggttggatctccccacagccgaagtcgccgagtagcttgttgtcggagagtccatctcttaaacccatctcgtcgaaatcctgaagcaccaaaatccccctacctggcgcgccactgtcgacgtttgatgtcgcagttctggtatttgcatggtatggggatcgtcggtgctagggtatacgcgagactgaggtaaaagagatggagacagggatttttatacaggttcgggcccctgaattgtcaggtaataaccctacatcctgttggccgaagccggtattgctcttattcatgatattcacaccagtacaatatttggggtagcctatctaactgttgtcgacatggcggtctgacgatctgactcgtagtcgacaacagggtagccttcctccttgaatccgtgcccggcgagatcagagatagcgctttcatatctcctaacagtatccggagacaccgtaggggactagccgtgcttatctctgaagtcgatatccggcggcgtgtcttggcgtatgtaggcttctatgttgattgtgttgggtgttgatcctctgtgtatgttgattctcccgttgggcgctgatcccgttgggtgttgattgtcccccctcctcctatggggcttgtatttatacccatagttgtctccttgtccaagtagaactagggaaaccaatatggatacaatccgagtagtccttgtcattttcatgtagaactctggttgtctttccttatccggaactcccttgaggtcagtttccgtataagacatggtatgtggtggatcctgtcaagatttagtcaactactattaggtatgtggtatccataaccctgacaaggtggtagttggatgtccatcgagggacaaaaaaatccacggtcaaatttattatttttgtttcgaattgtataagtcgaattttaacttatatgtgtgtgaaaagatacatcatatattgatctatcttgataaatttttaaaatttttaataactttttgaacgtcatgcacaaaacgaggggatgtcgagggaaaaaatccatttccaaggttatatatacactctgaggagatattgccaaatcgatcggtaaaactttggtcgctggctcgctgcctgccagagaattccttgtagacttgccagccgtcatggactcatggtcctctgatcgatcatctcgtttgtcgatcgcctccttgccgtttttctcgtcgcttatcccttcttttccagcgcgccctctctgtctgcagttagcttcgacttcgaactagtggtacatgtacctggccccttagggcttagggtgaaattgatagtacgtttgaaactgtacgaggtgcaccaggagcgtgaaagttgtgttggactgtagggtggtgcatgcaccaggtggcaaagagtaatgacatggattctcaatgtctacatgaaggtaaaccacataaatactttaaatttaaatggtgtttgattacaacacgagaaaaaagtatgaaaacatgagctaccatcttttggttattttctctgaaattgccataggattgttcaccataagaatttcaaaggaaatgataggattcaattaatcctttatttcaaataatttcatagaaaatttttctatatattaattataaccttctaaatttctatgtcaatcctccaattaaaaggggcctcattttggaggataagaacataaggcttgttttctttttttctaaaattttgacaactttaatagtatcgatgccgctacgtttagatataccttttgggttgactttaaaaagagttgagtgtccggggacatgctaagagcatctctaacagcctcttcaaattggactctccaaacacccatatggccaactctccatttgatttggctagttaactagatggtcactctaacaaagcgcctcatcggatggccaaatgctttggctgatcagccaaagctgcctccaattcggctaaacttcaatgcatattggttagcttattttgcttaaatggcttatcagcgaaagcatttggccaatgttcgctaattaatactgcgtcttccaaattgtaaccttcccatggcatataagctactaatacgttttttcctaaagcaagttccccaccaaccgtagcagccctctgatgaggcccagactctctattaatcctcttcaaaataacaatggacccacatatctctttccttttttcccccaaaacatccttcctatcgtcgaacaccacgcatcgcaccaccaacgacgacgatagaggggcggcgccggtggaggggcagcgcgaaggggcggcacggaggggcagcaccgacggaggggcgatgttagcgggagcggcgcgagcagcggggggatagaggcagcgccggcagaagcggtgcaaggatgtaggcggcgccggcgggaggatggcgcgcgcgccaatctggagacgccaccactggttcgctgtccctcccctccctccttttcctcttcttcagcacggccatcgcggtggacatctcgcaggcggcggcggcctcggggtgcctgctgctacgccgcccggcagcgccagggctcgtcaacattgccgtggcaagggaggaggaggagcggaaaggcgccgtgcccgtcgtgctcggcggagatcgtcctcgtccacggcatctctgcttcgggagaggggcaaaaggtgtggggcctaccattggagaggccattttggatggccaaagttggccagcaggagggggagtttagccagccggatggcttggccatctagttggcaagtttgttagagtgtgtttttcgttcaaaattgctaaattttaacttggagagagagatagagatgcggttggagatgctaggtcatactcttcagcctaattgcctcccaaacaaccagggcaggctatgctagcagccaccctacggcccccgcttactaggcctcgatgtgatcgcacaacctatgagattggcccaatccgaaatacacaccgtaatgcaaatgaataagtcgacttatactccctcaaatatagttttaatctgattcgtatggatccctcaaccataatattaaatatcttgaccatctaactattaaaaataatgcaatttgactcccttaacagtttcaagagcgttttttactgacttagcttgttgactagtctaagtggttgagtcaattttatgcgggacccacatgttagtctccgttcctcttcctcctctctttttctatctgcggtggcaacatggagaggccgatgggaggaaggatgaatagggaattggtaccatatcttcggaaacgatgctcgatcgatcggtaattgatcatatttatcatttaaattaatcagtgtcgacattactactatgtagaaagaaattaaaaaataaaatttatgtataacaaaaaacggctttgctaaaattatgtcgacatatttctgggctaaatacagtcagtttgtcgatctgccatctaatcttctcactattcgtgcaagtacatctgataagctaatcgaacaacttgctcctaagttggcgactcctttttgctttgcatgacacgtgttggtcatcaacgaatgtaattactctatttacacagtaattacacatgtgtaatttagggacttacacatataattttagtatttacattgtaaatattctaaaattacatatgtaatttagatacttacatatgtaatttcgagacttacatcgtaaatatactaaaattacatatgtaatttaggaaattacaatgtaaatacatactgactattttttggtgaaaaatatggcgccataaatatagctactccaaaaaaaaataatggtcggaaacggtaccccttatacgaaaacgatgctcgctcgatttgaaatttccgtgacccattttcactcctaccggtgagctcttggatgaccaccacactccctccaccaacgagtcgataacgagttcgctgttaccaccgccctacaagagcatgatttttcctgtctcgttgccgccaccaccggcatgctcatcgtgcgtccccgagtcccaccgcctgcgccaactcgatgtcctccgcggcggcggcgtcgttgcacccgtcatcatcgtcatgcccggcgactcggccagacacgaggggcgccagtgcgccgcccgtcgcagccatagaattcgaagaagcagtctgaaaaccggcgtggagagatcattagttcagcatcgtggaatgctagaattcagttttgcagtgcagtaagaatgcaaatgtgctagtactactagagttttccacagggagggaggcattactgtgcaagcatatatatatatatatatatatatatatatatatatatatatatgtatgtatgtatatatatatgtatgtgtgctcccacatccacaaacaaaaagttcaggattcagatccaatagcactagcaaatcctagtgacgaacgattcgtgctgcggtttggggggggggggggggaggggg

SEQ ID NO: 6572 - DNA, 12976 bp, Oryza sativa
ttggaggacctaaacgagtgatctacaagtttagggaccgggatgacactgtcgaacaagtttgaggacctgaacggtcaatttgcgagtttagggaccgggatgacacaacgatacaagtttaaggaccggtgatgaactttactaaaaaaaatgacatatatatagaaacagcgggcggtcataatatgcgtatactcatccctataaacgcacacgcacggatacactactcctataagcacctccaaaaaactggacctatatcttgagatcaatgaaattatcacgggacgcctcgctgaagactaggccaacatatcttgatatcaacaaagtcatcacagggtgtctcattgtcaacaatacgtcgtctaccattaaaaaaataattagccataaatacaagcttagaatataggacttgaattaggatgggctaattttatcacaagtaaactaactagtttagctaacctcacttcgcaaacttaacatattttaatgtaaattccatatctaaatataacaacttttaacccttacgatttgtccctaaatataacaacttctccaccaacattctctttccaaccaatcacagccctccaccattcacttttcccacatacctccattagtcatccaatcacaaccctctaccattcactctacttacttttttaataactgtgtccaactctaaaacttattatattttgggatggagggagtacaaacgatagttaaacaatcacatggtgaaaaacaaattaactgaaacagaaagaatataatgctgtacttttagcaaaacttttgtttctctcacatgtactccaacttaggagtaaataagtgagtttggtatagggtttgaagcactaccaaatatcggtagtgtcaaaaatttagataagtttttggcactattagtttgtggttaggataaagaatttcgggttgaagcatttttgaaatattggtggtgtcaaaatttagataagttttttttacactattaatttgtgggttgctatggtagatttgactgcactctataagtttagccgaacatgactccgttaatccagctggctattataaactactagcattccatacatcttgtcgacgggtgatacccgtagaccggatatagagggtattggggtacgttggtacaacgatctacgtagtacgacatcgagcaatcaaaagacaagaattatactggttcaggccccttgacaggtaatagccctaatccagttgatatgggattatacggtggaaaacacagcttacaaaggaaaagatggaacttgccatatccggcgaggttgtaatcgagttgattcgactagctctcgacgacttggctcttcgcaggctccggcttcgtaggctatgtgggttgtattggctctgagattcgatcccttatgccctccccgaggggtcccttttataccataggtctgatgctctccgagtaggactcgaacacaccagacctagcacgacacgtaggtaacccagttcttgtccgagaaggactcttcccatttgttgatttcgtgaaaagtttccttagattatgaaggaaatgtccgcgtacgcgtgggtatgccatgtcgatacataacgtatatcgaagggtagagggtatgccagacccgtaaccctgacagtagcccctgacttctactcaaaatgaactcgtgcgaccatttgcgacttcgggtgtcgagaacgttatcattccaggtgcgaggaccacggagatgacttgtagtcaagcatgccgtttgaagcccaacggtcacgagtgaattttgaactaaagtcaaaaactgccgcgcgtaacggacctagaaatttccttcggggatttctctcagttccttggaattcgcaccgtcgggggtgcgcctatttaaagggattttaagtgcgcattttgaagtccgcccactccgtcaagcacacaccgcccgttagcactcctcgccttctccgccgtcataaagaaccctagcttcgtcagctttaggtccatctccggcgatcttgcagctgcgatggatctcggcaagtcgacttccactagcgcgaccctaaagaagctccaggaggatggcgcccttcctggccgtggaaacgcggagagggaagcaggaggtactgatcctcagcccatcttaggttgcatggttgcgatcgaagattatgttgtctgcgggtttctccctccaccctccgaattccttctgctggtcttgaatttctatgggctttctcttctgcacttgaaccccaattccatcgctgcacttgaaccccaattccatcgctttccttagcgtccttgtgcatctttgcgaggcctacattggggtagagccctttcttgatctgttccgcttttattacgagttgcgctggatggaatccaatagggtgtccggttccgttgggttccgacttcgtgacgggatgaagtcgcgctatgtccccttccagtgcccctcttctcgcagtaaatggcggaacaggtggttttaccttgaaatcaaggactcaaatccggtcctcgttgttcccgaggaacaactggacaagattccagtctggaccgccaagccccccttggccccctctctccaatcgtttatcgacatcatcgataatctccgagaacggggtttatcgggatatgaagtcgttgcagacttcgtcggtaggtgaatccagccgctccaggctcgggcccacccggcctataactattccgggccagatgacgcgacccgggtttctcctcggggtatctttctcgcattcacttcgatatgcttgtactcgcgatcccctctgacctatcaaaaactaatttcttcttgacaggtctgagcagcgaaatcgtggagcggcgtgttggtcaggtgatgatcagcggcccgaccacggcgagcgacatccccgtgcccctttgtgaaaagggagcggcggagcgtgacgaagcaatcaatgtgagttcattcgataagcgtccgccttcttttgctcaaaatcagcttatgacatgatttagcgtaagcccttcctttgactgatgtcgtcggtccgctcgcggatcatcaggtggcggcatctctgaaagagaaggtcgtcaaggaggcgtctgacgctgccactactagtggtggcaaagctccgactaaggcgaggaaattctcgtctgtgctcggacaccgccgcaaggcggagactccctcggtaattttcaccttatcatccatttatgtagcgaggaagatttgttctcaccctatgtcggttgtcttgtaggcttccgacacatctcctccgcctgcgcgacgtcagcgcattgtgacgatcggcgagaagtaagtgaagaaacttttagattctcgtgtcttctgctcgagtggagttttgattcatggcgatttatagggaggcgcgggcgaaagcagctcgggccaaggccgggggaacatccagtgcatcccctgccacggcatcaacagatgtcgttcccgtggtcgggagtcgggaggtgacgccgagcggccccgtcagcgaccctgctggaggtcgtggtctgccagagaccgtcctctcctgggaggagctccaagccaagatgaggcgccttctcgaagccggtgctcgcggcatcggccgcgagatctcagaggcgagggcggagacggcagcggcaaacgcgtgtgctgagcggttggtgcgggaactggctgaggcccgcgaggacctcacgaagatgagggagctggtggccgggaacgagcgtcaacgcaaagggctcgaggtctgcatgtcggaacttggagacaatctctccgagatccgtggttcgctgcgggtcacctacaccggcctccaccagctcgccagggagtgcggcgtcgagtccacgatcccggtgaaccccgatgagttctcgttgacttcttctcttgcggagctggcgacggcgataggggaaatcccctccaagcatacggccaggatcgcggaggagacgtccaacggtatcttcaccggggcgtgtcacgtccttgcgtgtgtaaggttgtcgcgccctgaacttgatctgcgtgagatcttggatcagggggcggcaagcgacacgcgtagagaggtgatggaagaagtcagtgacctgggggagtctgtcctccctctttttgaagaataggacttcttgtatttttgtcatttgtaaatcttgaactctggttgccttcgtgcatgtgattaccatccttgttcaatgttgatctcggaagtttttcttgtcgattgtagagatgctgatgacgaggatgtccagcagcgcgggcagcccgagtcactgggcagcccgagtcactggcgataattccggtactcgagtttgaaccacacatcccacatgacgtcgaggaccaaactcttgatgtgaaggtcgacatggcgacaaccacctcaagtgagtagcctttttaactccgtgttgggttagtggtttccagcttgtcttagtggtcgttatgtttagcaggtctcgaggatgcccttgcaacccaagatcatcgcatctagtattggaagacgaaatttgaagtggcggaactcgacagaaccatgctagccatgaagaaagagcaagccgtggaaacgctccgaggccgcgaggtgtggtttgcgtcatatttaaagaattgctatacctcaatggcccgggtatgcagggagcttcgagtagtccgcggcgatcctgaggaatcggcggccgggtatatctcgtggctcaacggggcctgtccccaactcgatggcatcggcaagcgtatcgacgaagctttgaagcaagagtgtcatcgagcgagccgatatgccggaggacatgtactagcttgcctgcgagatcaccgcccgcgcctggatcttgaattcctccatgaagggtttgcttgttctcggaggactccgacggagatagaccaccttgcgaggtcgatgtcgccattagccgagaaggtattccagtctatgaactggcattggccctcttggtagtactcgtggcctgttacagatgtcttaggaaaaagtgtaatgtagtgggagatttatgtaaaaaaacagtaagaattattatgtgaataaagaaatctatctttaacaaatgttttcttactctggatgttgtgtgtgtaagagtgtgttctcagttaacgactttagttagccgtttgagtcgtacactctccctagcccccagccttgtcgtaggagggatttcctcgggtgacaaggctcctggacccttggcccgtcttggttgaataagctctgatcctagcccccagccgtgaagttggaaagcttggtttccgattacacggcttggttaatacgcacggcgagaactcttacacgaccagatcttacatggtctttcgtctctaaaggatctgacaaggccttatcggctctgggcgtccctagccgaagatcccttaggttcctcggaggccttgtcgagacggcgtaaagggacataaggacaggtttcaacgctaggcgtcgtcagagtaaggggtcattgggtgaaaacactttggtcgtgatatgagacctaggaataggctttattgatactgtaagggtgcttacaggtatagcggtattgactcatacatagaatttacgtagttggtcaatgttccacgaatttgctagttcgcgaacgtcgccgtcagcgattttgaatgcgcctggccgcaagacttgtgtgatcgtgtagggtccttcccattttagtgagagtttgtttcgccccgcttgggtttgaactcgtctaaggacgtagtcgccgatcgaaagtatgcgtgctcggatgcgcttctcatgataacggcggagggcctgttgatagctagctgctcggatggcaactcgctcacgatgctcctcgagaaggtttagatcgatctctcgctgattctcctggttctcgtcggaatgcttctgtactcgtgtgctttgatgccgtaactcgtcggggagcatggcttcagaattgtacacgaggaagaagggtgtttccttattggatgttgtcggtgtagtgcgcacggcccatagtactgatgggagttcttcaacccattttttgtcgtgtgacatgagtctgtcgtagacgtgggtttttatcccttgtagtactatgtcgttcgccctttcgacttgtccattgctttgagggtgagagaccgaggcgaaacatatttggactcccaagccgatgcagtaatcctggaaatcggcgctgatgaattgagagccgttgtgggttatgatgcggtgcggtagtccgtatctgcaaaatatccctctgatgaacttgatagcattatcggccttgatttccccggtgggtactgcttcgatccacttggtgaacttgtcgatcgccacaaataggaatctgtagccgccctgtcctcatgggaatggcccaagttagtctagcccccagcatgagaacggccaagtcagagggattgtctggagcgcttgtgcaggtagcttagtgtgcttgctgtggaattgacaggcttcacatcgctggaccatgtcgcatgcatctttaagggcggttggccagaaaaacccttgtcgaaaggctttgccgaccaatgtccgaccggcggcgtgtgacccgcatatgccttcatgtatgtcaaggaggagttgtctgccgtcgtcggtagagacgcatttgagaaatatcccgtttgacgcttttttgtataagtcgttgccgaccatacaatagatctttgctttgcggattattttctcagcctctgtatcgtcctcgggtaactcctcactgctgatgaatttgattaatgggctgcgccagtcgtctgtagtttcgatgtcagcaacggcgtgttctgcctcggttacctccgagctgatgtcgggggtgttcgggccaacttcgccgcttacttctttcaccgatggcttcgtcaggacgtcgagaaaggtgccgggctcgagcagctctcgtctggatgcgcgtcgtgctaggtcgtctggctcgacgttgtccttgctatagacgtgccggacctcgatcccattgaacctcctctctagcttcctgacttctgagagatacttggataactcggggttggagcatttgtagtctttgtgcacctggtttgcgattagcttagagtcccctttgacgattagtcgcttggccccaagtgcggctgcagctcgtatcccggcgagtagtccttcgtattctgtagtgttattggttgccctgaagttgaggtgaattgcgtgcttgaattgatctccggagggagatgttaagataaatcctgcccctgctccttggctgttgagtgcgccatcgaacgccattgtccatgtctcattgtcgccttggttatctgacttattatttggcatggtccaatcggccatgaagtcggcgagtacctgagatttgatggctgttcgcggcacaaagtggatatcaaactggcttagctcgactacccatttagcgatgcggccgacaacttctttgtttctcacaacttcgccaagtgggaaggaggagacaactgtgactctgtgggcttgaaagtagtggcgtagcttccttgatgtcatgatgactgcgtagagcagtttttgaatctgtggatatcttgtctttgcgtcatggagagcttcgctgaagtaataaactagtcgctgtactttctctctctcgacgacaatgacggtgctaacggaatatggcgtggcggcaatataaaggaataattcttcattaggttggggagcaacgaatacaggggggtttgataggtagcgcttgagtgcaataaatgcctcttcggcttcctgtgtccatacaaatttgtcttgtttcttcaacaaggcgaagaaaggcctgtccttgttctcccatcctagcgacgaatctgcttaatgctgccatgcatccggttagcttctgcacctccttgagtcttgtgggcttggcatcgggtcgcaccattagtttgtgctcaatcacctccctggggacccccggcatgtcggacggctgccaagcgaacacgtcggcattatcgcggaggaaggtgatgagcgcgagttcctatttctcatctagtgtagccccgattttgacagtcttgtcgaggttagcactagagagtggaacgatcttgatggcgccatctggcttcggcgtcttgtttagcttgctcactttcttgggtggctcaaacgtggtgggtggggtgggcgtttgctcgaccatgtcgaggctccgcttgtcgcactgcaccgccagctttgcgttcccctgaatagtgattgttcccttcggtcctggcatcttgagcacttgatatgcgtagtgtgatgcggccattaacttcgcaagtgcagttctcccgatgatggcgttataagctgtatcgaattcagtgacatcgaaggtgatatgctctgttcggaagttgttggcttggccgaaggtcacgggcaatgtgatcttgcccaaaggtctggatgatgattggggagtaattccatggaagggttgatcagttggtgttaactcactttgcggaattcccattgcatccagagtgctggcgaagaggagattgatcgagctgccaccgttgatgagaactcgtgctaccttgacgtttagaatagtgggctcgaccacgatcggatatcatcctgggataacagaggttttggggtggtcctcctccgagaactctattctctgctcagaccacttcatcttgggtgcagccccctgccacgtcgaacagacttcacgttccactttcttgtattctcgcttggaggagtacgttgtggagccgccgaagatgtgtgagacgtggaggtcggagtccgggtacgcagagtctgattcgtgaggaggtgtctcctcattcttctcgacaacgcatactcgcttgcccttttcaaacgccatgtgcttctcgagcgactttttgaaaacaaggcaatcctccagagaatgtctgtccgttttgtgtatggggcaccatgatttctttgtatcgctgccctgtgggtctgggcgcttgggagggttcgcgtactcagctgcgaggacttccgcttgagctttccttttcccgtttttgcgatttttcttcttgcttgactcagatgcgtctacggctggtttcttctctcccccggtcttcggcttgttgttcttgcgtcttagcgcgtcatccacgtgggcgcaccgctcaacgatctcgaataatcttcgagtagttgtgatgcgtcttgttgccaactcctgggtagtgtagcgatctctgacaccggacttgaaggcacgaattacaaaagcgtcggtaatctcaggaatagtgtttctgcactcattaaagcgccgaacgtattccctcaatgattcccccgagttctgtgttaacgtgtgtaagtcgtcttcgatcgcgtggcgcttgtatgttccttggaaattggcgacgaactgttgccacaggtctatccacgaggagattgagtagggaggaagatgcatcagccatgaacgtgcagaacccttcaacgcagttggtaaatagttcgccaacgcgttgtcatctgctccggcagcataaagcactgtcgagtagacttgaaggaattcttccgggtcggtgctcccatcatacttttcaatggccccgggtcgcaatctctcaggccatcggacatcacgtagggaacgaccgaaagccctacacccagcactgggggcggtgggttgccggcggtcgcgtgaccttcgtggatgtctgtctgatgatgaagaggacacggatgatgacgatgacgatgggtcggttggctccggcgtacgattacgaggatgacgacctggatcccgggaatcttgtcgttgtctctcgctgttatctcggcgccgatctccttcgtcgtcgtcgttgcggcgatggccatgaccagtattgtctggcccccgccgttcgcgatcgttgcattctcggtcctcgttttggcggtctcctcgatcatggtgccgtgaagaaacatgacgccgagagcgatttgcgtcgtcccgtgtgcgccgtgcttctcggcgaccgttaatttgatctcgaagatcgccagtgccacgaggtggaggggtagcctgtcgaggcgattccctccgctccggatcttcaccattggggttgccgattggtggctgatcttggtgtgctgcggtagcgacctcttcgaacgcattgctgaggttggtcaccgactcccgtaattgttctgtccaacgctcgaggtcgtcattcagaacgggatcgtaaggagtttccctcagtatagcttgaatagccctgatgtgctaggctggagtagtcgattgattcgccgcttctgcgttggcttgcgctgacgtgccaacgtcatcgataactagtacctcccgcggcgcacttgttgtcgatgacccgtagtcttcgaggagatgtaagaccgatggttcgtgaggatcgagatcgattaccccaacgaatcgatctgaggctggagtcgctccctgttccttgccgttatccctggcggggacgtatgacttaggagacggggctttcatggcgccgaggagaactttacagctcgagagatcgtgattctttgtcttgtggataggacaatagacatcccgagttggagaaatacgttgaattccacgttctttgcaggcgcgaatttcagcacggacgttgatgaatacccagcaatcttgaagggtatgtttcttggttttgtggataggacaccaagacctgatagcttcagaagtcatctttgtcggcccgtgatttacgtcggagggacaagacttggccgcatcagaatccttcccaagtttggatgtagtcggtaatccgttctccgtttcaacgggtggatttttcgacatggagccgtcttggtttgtagccactgcgttctagttttcagtcattggaggaccggttgagatcggcatcgtggtgtaaaccgggaagacgatttcgcccacttgagtccataccagcatcgttgaagtcgagagtgcttggctggagctggtgttgacgttgttgtcgacgaagcttgatggcatagtagtagaaccttgagtaccaagtgcccctacctggcgcgccactgtcgacgggtgatacccgtagaccggatatagagggtattggggtacgctggtacaaggatctacgtagtacgacatcgagcaatcaaaagacaagaattatactggttcaggccccttgacaggtaatagccctaatccagttgatatggtattatacggtggaaaacacagcttacaaaggaaaagatggaacttgtcagatccggcgaggttgtaatcgagttgattcgactagctctcgacgacttgtctcttcgcaggctccggcttcgtaggttatgttggttgtgttggctctgagattcgatcccttatgccctccccggggggtcccttttataccatatgtctgatgctctccaagtaggactcgaacacaccagacctagcacgatacgtaggtaacccagttcttgtccgagaaggattcttcccatctgttaatttcgtgaaaagtttccttagattatgaaggaaatgttcgcgtacgcgtgggtatgccatgtcgatacgtaacgtatatcgaagggtagagagtttgccagacccataaccctgacttttatattataagtcgttttgattttttttctattcaaaaatttttacattttacttaatatatataaaaaatagcaacatctataataccaaattagtttaattaaatataacattaaatatattttcatatttattttgtgttttaaaaacctaggtcaaacttaaaaagtttcactagaaaaaaaaattcaaacgatttatataatacgaaaccgagaaaaattcaaacgacttatataatacgaaaccgggagaatatattattcaaagctaccggaaaattgaaaggacaaaaaaaaataacgtcaaaccaaaaccaaaaatagccccaaaatcttccacgcctgggcagaaacaggcgaaaaaacttctgacgcggcgggtcagaagtccagaaaccagcagtccacagcaccaccgcagcagcagcacgtactcctacaacaaagtactagcagtggtgcgtcgtacctccacgcgtcgctctctatcccccactcccgccgagattcccctcgccggccgcctcactctctcttctctcactgccacgtgggccccaccccatccgcaccaccgctcgcggcgcatccacccgcaaatcggcggcggcgacgaaggcgagcgactgactccagtagtaataaaggcgaacggctacagcgcccatccagctccctcccactgcacggcgcgcggcagggagccgcacgcgtaaacaaaccaaccataccagcccaactgatttttctgtaaaaaaaaaaggggagaggagaaaaaaaaaagggaaagcgaaaaaaagcgaggtcccccttcccctctcctcccccgtctcgtctcgtctcgtctcccacctcgcaccattcctctctctctctctctctcccccctcgccctcgagccctcgatctccacatctctctcgcgcgcgctctggtggtctctccacccccccccccccacgcagcgcaaacccccccgattccccccctcgcttcggccaccagcggccgcccagcccgtcgcgcgcttccgccgcgccgccgcggagatttttttttgtgcgcgcgcgcg

SEQ ID NO: 6573 - DNA, 42361 bp, Oryza sativa
ggcccatctccccctctcccccggcccatcttcccctctcccctctcccccggcgcgctcccgctctctctccctctctctcgctctctctcgccccctccccttcccggcgcgctccctctcccctctccctcagctccgctccgctccgcccgcgcgccgcgcgcgcgtgcgcgggagccgcgccgagcgctcctcctcctccgctctgtccgcgcgcgtgcgcgtgagtcaccgcgccaagcgcctcctcccctcgcaaagccggcccccgcgcgctgttgttcgcgcgtgcgcccgcgtggtcctcgcccgcaccgcgtggtcgctgcccggccccgctgccctgccgcgcctgcagccgctcggccccgcagccagcgcgtgtgccgagccgcgccctcctgttgcgagccgcgcgcgcgtgccgagtggccgaccgcctggtcgccgccgtcgtcagcgcctgccgcgcctgtcgctcgtgtcgtcgcgccgctccaaaccgccccgccgtcattgccgtcgtcaccgcccggcccccgccactccgcgcgcaagccgccaagggacggaggcagcgcccctcctccctctgccgcgtcgcccccgctcccctcctcctttttcccgaatcggcaaaagggcaagcccctttctccccctcctttttcccctttttccccgccggcgtcatcctccctgtcgccgctttggccgcgaccgccgagcgccagctcgcgccttgaccgccctaagtcggttcccaaaccgacattgccgccccctttaaacctcagctccttcccctccaatctccctcgttttcgcctcctcgccatagctgccgcccctgtgctctgttcgccgtcaccgttcgttgttgcgcgtgtcgaaggagtcggcacgagcaaggacgcggaaggggacttcggccgcaccctctccttcctcttccccggcccgaggccggagagattactcccgcgccgtcggcctctcgtcacagcgcccctcctcatctcggtgatgcctccctccgttcttcctcctcgctccatctcctccccctagctttcggtagtagctcgagtagactccccgtagttagccggcgccgccccgaccgttgccgtcgctcaccgtgtgctcgccgccgtcgccgctcgagctccgtagcacccacacgtcgccagcctcgctcggcgtagctccgtccaatccgacgctagcatcgagttcccgaaaccgcgtagatgctctcaccgccgggaatcggtccctcgtgacctcgtcggcgtttccctcttccctccccaccggttgtcgccgccgcgattcgccgccgtcgaactccctctggcgaatccgagccgatggctcgtctcccctcatcacgaacaaccgcccggtgtgctagcttttgcccgtatcgccgtggttcgttccgccgctcgccgccgccgcccaccgtccattcgcggccgggtcgtcgtctacctcctgccggcccgcgtggcagccacgtaggcgccacgtcggcgccagctcagcctagaccgggtcgagccaaccccggtcagtccctccccgtgcgcgcgttccaccgcgagccgtgaggctgcgcgtgggcccgctgcatccgcgtccaccgcgaaccgcgcgcgtgcaccgcgtccctcctccgcccgcgcgcatgagccgcgtactccctccgcatggtgagctgagccgctgacaagcgggtcccacccgggaccgcgcatggtgagcccggtccaccggctctctctctcctccctcccgcgcgcgcgcgtcttgggccgctctgggccaccttcctgggccggccggcccgttaagctcggccgagccgccctttctctcgggccgcgccctagccgcccgagggaagtctatattccctccctctccccttttcttttcttttcttttccaaaaaaaaaggatttaattaaatccttttcctttagaccaaaaatccaataatcttagaaattcaatatctttccagccgtaaatccgtttgactccgttcaaattccaaaatttctcaaatctcgagatctatctaatggcacgcttagaggtcattaatagggctttattttcgccgtttattgagttgtcccgttttgcgtgtagtttcggagcccgaagacccgcagtgcgaggatttcgaggatcaagctccagatctcaagcaaggcaagccacctttgaacatcttgagcctatatttgaaatctaattatattgcttgcaaaatattatgcattgataggattgcacttaatctgttgttctgtctgcaaggcagattggcagacctacctaacttgttgcatttgatccttccattgttaattgctataccatgtccccttgtaaccatccagttgcgcctcgatattcgtgcaccctgtgccagtatcgacggtcgccttcaaacttaaaatctgagtaacaacttgggtaaaactggagttttacaaaagacttggaaaacccgacacctgggtcggtgcttgcgaactaaatgaatttccaaaatcgcggaccggggaacgtaacgggtgtacggtttcccgctctcgcacttaaggaccgattccttggaatttcatccaaacataagacaagtacgaccacatgggtggaatgggacacccctggctgagtaactagcttatcaggggagccttgatgccgagagacatgtggattcaccggggtggtgtcggggaggacccctgggcttcctggcacagtatggtctgggacctaacctgttgttggtctgggacccctctcgtcggcatatggtaaacctgtgtcggctttggaaatgccttgtcatgaaagcttggaggtctcccgacgtggctgatccccacgggctgggtgatccgggttagtaatatcgtgtgggtaaagtgtaccccctctgcagaggttaacaaactgttcgaacagccgtgcccacggtcatgggcggatgtgaggtgattcctagcgtagtttggtttgactactgcttgtgaaattgctgtgtgaaaaggggttcggtgtttgaaaaatctgcagctgatgggatcagctaggcccgggtggccgtttgaaaagttgttggcccgggtggccgttgaaaaagctgttggccgggtgccaaccttgtttaaattctaaagactgatacattgcacatactccgaccggacgagacgcactgtctcatccgtgtcgtttgagaagcactcacttagttgtttcagaaaagagttcaaataaaattaattgcaaaaacaccagcctttccttgaagcctgcattaaacacttacttcccatggcttgctgagtactcccgtactcacccttgctctatataaataatccccccccagttgctgaagaagatgaagcggatcctgctgatgaggagttcttccaggagcaagccggctacgatgagttttagggtttcggcctagttcccaagtcgcgcctgtgttgattggtccaagtcctggcttccgctttccttttgtaatgcagttgtgagctcgggatctgtccgcagcccaacatgactgtacatctactctataataaagagacctctgttgctgtgatattctgtctccctgtgataccagcactgtttcctgggactggtatcgattaacaggttaatttggagcgtcacgggctagttccggtcaggactagttcggggcgtgacatgatctttgctgggtcgaccgattttcacaacagtcccgattctaataggaaccggaactaaaaattattttttagtcccggttaaattttttttgatctttagtcccggttcgtccatgtcaaaggtctgtcaggtggctaagaatctttagtcccggttggtgattccaaccgggagtaaagattaccactttagtgccggttggtaattctaaccgagagtaaagattatttagatctttagtcctggttggtaataccaacccctcgtatataatccctaaaatttatcctcaaatcctctagcttaaagtctttcttcccatcttcctctcctctctctcttatcctctcttattttcttcttatccactctttccttatcctctttccttgcagagacagagcgaagcggcggaggtggtctggcgtggcgcgggggcggcgccccgcgcggtgggggagggaggcgggagcgggcgacggcggcgccccgcgcggcggtggagggaggcggcggccccgcgcagtgacggcacagtggtggaggcggcaacggacggcggaggtgatgactttgtgatgattttggggatgattttgtgatgtaaatttgcgggtgatttttagatgctttttgaatttgttgatgatttgtgatgtaaatttgtggatgatttttagatgtttctatgaagttgccgatgaatctgtgatgtcaatttgtggatgattttgtctgtgtgtatgatttttgttgttgagtttagtgcaaaataaatatgcaagtagctaaaaacaataaaagaaaaaggaaagagaaagggtcagccacatggtgcttttattttttttctcccggttggtgactccaaccgggactaaagatcgtcatctttagtcccggattctctctcccgatttgcaacccgggactaaagagggttgtgaaccgagagagatatggggttctccaatagtgtttccttcatgttctttttaatttatacccatttcgttagttaatttatatatgtcatgaacgtattattactcttatatttatttgctaactcactgagaaaaacacaattcttaacctgaaaaaagttcatttgtaagaaaaaaaagggatagaattatttgaaaaactcaaataaactcatttgttttaataaatttcacatcacattacatgaaattcatacatcattttcacctaaatttaaacccaactagtggggtggcccgcggaattgcacgcttaccacctatatcgaattatctaatattttctaaatagtcaactcattattttagaatttaaaaaattaaatctcatcatcgttgggttttcaaatttatagttttaaagacacaccagccaccatccgtcacttatttgccactttacttgcttgttcggcccgccacggcttccatacaatcaggttttattttaatgattttctaaagtcctgtgaaacgctgccaccctacttttaaaggcccacccgctaccaactagttttggaccagttggtcgcaacaatcaagatttgttatatttttgtcctttttgaaaacatattttacaaagatcactgaaaaaacttaatcctacgtaacagcgccgtccctctaccactgtgcaacctagagatgacgtcaatgaaattggcaccatcgtcccaattaataacattggtgttggaaacggtggaggcaatgtttgttcatcctacaataattactacaacttgagaaaatgttcgcatcaatagtaatgagagtttatctagccatcaaactaggtggaccaaatattatcatattaaaacagtggtccatatttattccatctactaccttcatccaaaatgttgctatccagtactaaaaatctggataggcctctgtcaagattcgtagaacttaagatatccactactagagaaacgatctttgctagattgacccaaaatcacaatagttccggttccaaaaagaaccgggactaaaaaaacccacagctattttatgatttttaatcccgattggtaacaccaaccaggactaaaaatcatttttagtcccggttcattccctgtcagtaggatgtcagggggccgaggatctttaatcctggttggtgtcaccaaccgggactaaagatcatctttatagtcccggttggtattactaaccgggactaaagatcatattgatctttagtacaagttagtaataccaactaagactaaaatttaatacgtagtatataatccctcttccttatcctctcctccacaatcgcaacaacatctcacacgtacagatcccttccccttcctcacacttatcctcttcctcaccttcctcaaacttatcctctcctcctccccctcctcccctggcggctcgtcctgctttttttttttccggccggcggccggcgggtcgcgcggcgggtggtggcagccggcggggccgtgcccagtggcggccatggcgggcggcggccggcaggcggccggcggggccgcgccaggcggcggctgaaggtgccacgcgcggcggcggccggcggggccgcgcccggtggcggccatggcgggcggcggcgggcaggcggccggaggtgccgcgcgcggcggtggccggcggggacgcttctggcggcggccgtgccctctcgtctgccagccgacttcttccttttcttttatttttttttgataattcgtgattgattgagatatataattttgtgatggatctgagatgaatatgtgatgtatttaatttcggtgtattttttaggatttgtgatgtatttgatttgcttgtatttttttagaattggtgatgtatttgatttgtgtgtataaggaacttaagatttgggatgttactttgaattggagatttggggatatacatggcactagattcaggagaaaatatagggattaactctaagaaacaataaaaaaaggatcatctacactgcactgccgctaccctctttagtcccgattggtgaagatctatttttagtcccgggtatttgaaccgggactaaagatagcgatctttagtcctggattcgtactcccggttggaaaaccgggattatagggggttaccaaccggaagtaaaaaggctttctccaccagtgatcccatctgcagcaacattttgggacgaaggtatgaggtaatactccctccgtcccaaaatatggatagactctttatccatattcgtagtattagaatgtgttatattcacccaaatcaattatattttaggatggatgaagtattaattttgagttttgtaaatattaaataaatataaaataaagttgagactccataataagggtacaatttgccaattcagtacttactagttccgagaatttcataattattaaatcatgaaaaatgtttatagtgagactccaaacagagcacaacttttctctctatgtattaactccaaattaagttttggaattatttaatcatatggaaaaactaaagctgatctggtaagtattagcatttattatacatataatccatttttgtatttgttaaatttcaaatttgtataactgttaataaaattaaattatgtagtactttattccagatatacgacaaacaaagtttacatagtataacttttccaacaaaattaaagtacaaatgtaatagaaatatagcctgttcgaatgcatgcatgggttacgactaatgattatgctgttggttcagggagggaatttgctacacaaatagtattcgatacatgcatatatgcatgcatgtccgtgcatccatgtttactgaaggaaggccttcttctggagcctggccttgcgttcctccgacagcatcttggcgaaattctccagctcctcctcgttggtgcccctgctcatgtcgggctcgttcttgccggtctcgaggttcaccttgcacgcccgcttcttgagcagcgccttgccaacgtcgacgagccggttcaggttctccggcgtggagacgtcgacggacgccgtgtcgccggtgagctcgtcgtcctggatgcggaggtagctcttctcgcagtgcagcgcctggaagagcacggaggcgtggatgtcgacgaggtcggcgctggcctggctgaagctgtcgatcagcggcgacgagccgtcgtggtagacccagttgatcatcccccacttgccggactgaacggcgtcgtacttctcctcgatcttggccgtgccggtgcccagcgacaggatcatgaacttgccgtagtccgccggcttgatcgggaagaagtcgtcctgtttacccagcaggatctgcttgcttacgtgtgtcatcgccaacagcgtctgcaagtgccaattcatacatgtcagacatgtagacagctatatatatattaccgccattaagcacctatttggggagtttaagattctgagaagcagctgctgaaaaactagctggtgagaatctgagaagctaggaaatccggcttctgacttctagttcattttccagattatacaagtacagaatctgggtaaaaagctggcctgtttaggggagcttttggcaactggagattctaggagaagctgcatgcagctgctaaaagctccccaaatacgccctaaataggtatgggcatgttttctattgtaaagtttagtaattttcgatatctccggtaccaaatttacactagaaattttgcctttctcaaaaaacccgtaaaatttctcatatgtcagagttgtacaacacagccatgcatggtgccttaattagttaccgggttgttcgcggcgacgccgccgtcgacgaggttgaattcccggggcttgccgtccttgtccttggtctggaagcggtggccggggaggtacgtcggcgccgccgaggtgctgatgcacacgtccgacaggagagcgttcttggacacatcgatctgggcctgcatgcgatatatatatatgcatcgcatgtgtcagtacattgatatatcactaattaatatttaagttattggacacgtttaattacgtcgaatcgggagaaggtgatgggctggaggagcttgatgtcgaaggtggggatgacgacgttggtgatcgtctcattaactcgcttatcgccgagcagcgactgcaccaccgagtgcaggtacttgccgtcgtactttggccccgccatgctctggaacaatcccacaattggaatgctgcatccacagcaagatgttgatctatgcaggttaagatcataggaatgcatgcacgaattaattaagctggtattaattgattaattttttatataatccaatctgcaccttctgggagggaagatcttggggcagtgcttgaggtagaagtcgttgatgtccttggcggcgaagagcgggcggccctggtcgttgggcgcggtgagcatggcggtcaccagcccgccggtgctcgtcccggcgattacgtcgaagtagtcggcgatcctcgcgtcggcgccgtctagcttctgcagcttctcctcgaggctggcgaggatggtgcccgggatgatgccgcggacgccgccgccgtcgatgctcagcacggtgacgatgctcccgtacgacggcggcggcgacttgggcgtgcggcacggcgacgtcgtcggcagctgcgcgccgacgacggcgcgctgcaccaccgggttcacggtcagtggcgccgacccgctgctctggttcgtggttggcgccattgattccagctctagctagctaattatatgcaatataatgcaacggttagctagctaattatgctaccaagtcctctgctaaattaacaaagacgactgcgagagagatcgatcgatcgttcaccttttcctgctaaaaaggcaatctctcgtctggtctgttcgtcttgctcgatctgattgatagctttgtgacgcgctcgggccacgtatttatagtggaggattaaagaaagaacgtacacggcttttaatttgtacgtagcttatacagttgcagttgaagcgatcactataaaatttgtcgtttgcatgcgtcagttgcaccaccatttctgctcctaggaatggaacgggtgatcgaagaaaattttcacaagttggaagcgatcaaaccggcaagctaactaagcacacggtcagctgctacacttggcgcctacagggttttttaatttgttttctggccttcatgcatatgttgcccattgctgctgccttggcttgcgttagccggacacatacgtgaacatctgtacgtataggtgattgtgcatgccgtgcatgtgcgaattaatgcagacctgtcaactgttgtttccttggttaggtacgtagctttagccgccagtacaatattaaattaattatagttatataggcgcataactgtagaacaatatgttggttgcaatattaattaatctctcgaggtgtacgtgaaaatatacgcccccttttatatgtatcttttatatgtatgatgtgtgtcacaaaaaacttgcaatgtccgcaagagagagagagagataataagctaggttagaagaaataggaagaattaaagtacttgttgtctgtcaacaaccttttccatgctagtatggtttgtttcatgaacatggactagatcagtcatgagcatgtggttgacagacagcaagtcatggattttccttttgcatattccgtgaaagaaaaaaagcaagtcctgattttgtgtccctcacatttcaattttgtggaggagaatgatgaatttttgtggaaatgcatgctattttgcccctttgaccattgatttttgttccagagatagcgcaaagtaccctgaggccgtcttgtttagatcccaaaaaaattttggccaaaaacgtcatattaaatatggaaaaaaaattatacagattgcatgtaaattacgagacgaatctttcgagcctaattacgccatgatttgataatgtgatgctacagtaaacatttgttaataacggattaattaggcttaataaattcgtctcgcagtttacaggcggaatctgtaatttgttttgttattagtctacgtttaatacttcaaatgtgtgtccgtatacttcaaaaactttacaccaaagaactaaacacacccagagtgtcttgacgatatttctacatgtcggaagaagaatgtccaattatgttttgatttctaagaaaatcgggtctacagtaatatcttgcatgtaatttaaatgctacaaaaaatttaaaaattaactacatatatcacaatgtcatatatatatcactctacagtacaacattcaatctgtacacattccacggaagaaaaaacaaaaatttaactattgaacattacgtgtagcgcccgttccgtcgtggcgcctagcgggaaaattaaattctaaaaaccctaattgcgaaatctgttttttttttgcctgttgtcagtctccgtgtcaatctctgatctcaaatccccgatatgtcgtcgaattcaaattccgaatccaaacctccccgcaaaagtctagtttgcctccctcaggtgcggtgggccgattccctctcggcccaactctctctctctctctctctccctcagctctcccctcgctctgcccgtgcgccgcacgcgcctgcgcgtgcgcgtgagccgacgacgagccgagctccccctctctctctccccgctccatccctggcaagctcctcgccgcgttttcgcaaccccgcgcgccgttgccgcgctcgcgcgcgctcgcgcggtcgccgcccatgccacgcctgcgccgcccgtgccgcgcctgcgccgcccagccccgctgccctgccgcgcctgtggccgcgctgtcgctcggccccgcgagccagcgcacgtgcccgagccgcgccgctcgcgtctgtccaaaaccctgaggcagcgcctcccgctcccatccctctcctccccgagttggcatggctcgagctccctttccaccctccgtttcccgctttcctctcttggcccggcctctgctctccctccgctcagagctagcgccatggcagaggggcagccgcgccgcgccagcccgtcctctgcgccgtttgaccgcgcccgtgatgccccgttccttcccctcgaagctccatcccgcgcccataaaatccgccctccccctctcgttcggttccccttcgctcgcccgagttcgctccaagccgccgcgccattgtcgccctgccctgctcgccgccgccgctcgtcgtcgcgcgtgtcggaggagccggcacgagcgaggacgcgtgacgtggactctgggcgcaccgtctccctcctcttccccggcccgaggccggagcgatcacgccccgcgccatcgaccatcgtcacggcgccccttcaccccgcacggtagtgcatcctccccgttctccctcctcgttcctcccctcctccttagctttcggtagaagcttgtatagcctccccgtagctagctggcgccgtcccgaccgctgccaccgctcgctgtgtgctcgccgtcgtcgccgcccatgctcgatagcgcccgcacgtcgccggcctctctcgtagtgtctccgtctaatccgacgctacgaacggactccggtagccgcgtagatgctctagtccgaaggaatcgaactcccatcgcgccgtcgccgttaccctcttttctcgccgccggttgccgccgccaaaatccgccgccgtcgaactccctccggcgaatccgagccgttggctcgtctcccctcgtcccgtgcaacctcccggtgtgctcgccttcacccgcatcgccgtagatcgccccgccgccgtccgttccggccggcgtcgtcgtcttcctctcgccggcccgcgtggctgccacgagggcgccacgtcggcgccacctcagccgcgaccgggtcaagctgaccccggtccgccgctcccctctgccccgctcgcgcgcgcggtccatcgcgaaccgtgaggctgcacgtgggcccgccgcatctgcgtcctccgcgagcagcgcgcgtgcaccgcgccccccctccgaaccctagcgccgcgttgcccgctccccgctcgcggtgagccgagccgccgacaagcaggtcccactcgggaccacgcgaggtggacccggcccaccggttccccctccctctcccccctccccccgcgcgtgcctttgggccgccttctcgggccggccggcccattagctcggccaggccgcgccccttctctcgggccgcgccctagccgcccgagggaagtctattccccctccctctttcatttctttttccaaaagggtttaattaaatccttttcctttagacaaaaatccaataatcttataaattcaatatcttctcaaccgtgtgtccgtttgactctgttcaaattcaaaaaatcctcaaatctcgagatctatctaatggcacgcttagaggtcaataatagggctttattttcgccgtttgttgagttgtcccgtttcacgtgtagtttcggtgcccgaagacccgcggtgcgaggatttcgaggatcaagctcaagatctcgagcaaggcaagtcacctttgatcatcttgcacctataatttaaatctaagtatttcttttccgcaaatattgcatgaataggtttatcacacgtaatttggccgtggcttgcgagatagcctaccggccccaatcctaaattgctgcaattaccctgcgtgaattattgaatacttaaaactcctttgtcgactgttgtgcttcgatgcacgggccttcaggcacgggcatcggaacacctcccctcaaattaaaacatccaacgatgggtaaaacttggggttttacaaaagacttggaaaacccgacacctgggtcggtgcttgcgaactaaaatgaatttccaaaatcgcggaccagaagacgtaccgggagtacggtttcccgctcttgcacttaaggaccgtttccttggaatttcatccgaacatatgacaagtgcgaccacatgggtgtaatgggacgcccatgtctgagtaattagctaatcgggggggggcatgatgccaagagacgtggattcaacggggtggtgccggggagaacccccgggtttcctggcacagtatggtctgggacctaacctggtgttggtctgggacccctctcgttggcatatggtgaacctgtgtcagctttcgaaatgccttgtcatgaaagcctcaaggtctctagatgtcacgccccgaactagtcccgaccggaactagcccgtgacgctccaaattaacctgttaatcgataccagtcccaggaaacagtgctggtatcacagggagacagagtatcatagcaacagaggtctctttattatagagtagaagtacagtcatgttgggctgcggacagatcccgagctcacaactgcattacaaaaggaaagcggaagccaggacttggaccaatcatcacaggcgcgacttgggaactaggccgaaaccctaaaactcatcgtagccgacttgctcctggaagaactcctcgtcagcaggatccacttcatcttcttcagcaactgggggggattatttatatagagaaagggtgagtacgggagtactcagcaagccaggggaaataagtgtctaatgcaggcttcaaggaaaggctgttgttttcgtaattgattttgtttgaactcttttctaaaaagtctaagtgagtgcttctcaaacgacacggatgagacagtgcgtctcgtccggtcggagtatgtgcaatgcatcaatctttagaattgaaacaagattggcacccggccaacagcttttcaaacggccacccgggccaacaacttttcaacggccacccgggcctagctgatcccgtcagctgctgatttttcaaacatcgaatccccttttcacaacagcaatttcacaagcagtagtcaaacaaaactacgctaggaatcacctcacatccgcccatgaccgtgggcacggctgttcgaacagtttgttaacctctgcagagggggtacactttacccacacgacattactaacccggatcacccagcccgtggggatcagccacgtcgggagacctccaagctttcatgacaaggcatttcgaaagccgacacaggtttaccatatgccgacgagaggggtcccagaccaacaacaggttaggtcccagaccatactgtgccaggaagcccaggggtcctccccgacaccaccccggcgaatccacatgtctctcggcatcaaagctcccctgataagctagttactcagccaggggtgtcccattccacccatgtggtcgtacttgtcttatgtttggatgaaattccaaggaaatctgtccttaagtgcgagagcgggaaaccgtacacccgttacgttccccggtccgcggttttggaaattcatttagttcgcaagcaccgacccaggtgtcgggttttccaagtcttttgtaaaactccagttttacccaagttgttactcagattttaagtttaaaggcgaccgtcgatactcgcacagagtgcacgaatatcgagccgcaactgggtggttacaaggggacatggtataacaattaacaatggaaggatcaaatgtaacaaattaggtaggtctgccaatctgccttgcagacgggacaacagattaagtgtgatcctatcaatgcataatatttcgcaatcaatataattaaatttcaaatatagggtcaagatgttcaaaggtggcttgccttgctcgagatccggagcttgatcctcgaaatcctcgcactgcgggtcttcgggctccgaaactacacgcgaaacgggacaactcaacaaacggcgaaaataaagccctattaatgacctctaagcgtgccattagatagatctcgagatttgaggaattttggaagttgaacggagtcaatcgaatttacggttgggaagatattgaatttctaagattattggatttttggtctaaaggaaaaaggatttatttaaatcctttttttggaaaagaaaaagaaaagaagggagggagggaatatagacttttctcgggtggctagggtgcggcccaagagatttggggcggctcggccgagcttaacggaccggccggcccaagacggcccaagcgcgcgcgcgcgcgggagggaggagagagagggagccggtggaccgggctcaccacgcgtggtcccgggtgggacccgcttgtcagcggctcggctcaccgtgcggagggagtatgcggcgtacgcgcgcgggcggggctgggacgcagtgcacgcgcgcggttcgcggaggaacggatgcggcgggcccacgcgcagcctcacggctcaccgcggaccacacgcacggggagaaacggagggagcggctggccgggtcggcttatccggtcgcggccgaggtggcgccgacgtggcgcctacgtggcagccacgcgggccggcgggaggtagacgacgaaccggccgcgaatggacggcgggcgacagcggcgagcggcgtagcgagccacggcgataccggcgaaagcgagcacaccgggtggctgcacaggacgaggggagacgagccaacggctcggattcgctggaggttgctcgacggcggcggattacggcggcggcaaccggcggcgagggaagagggaaacggcgacgaggccacgaggggccgattcccggcggtgagagcatctacgcggcttcgggaactcgacgctagcgtcggattgggcggaactacgccgagcgaggccggcgacgagcgggtgctacggagctcgggcggcgatggcggcgagcacacggcgagcgatggcaacggtcggggcggcgccagctaactacggggaggctactcgagctactaccgaaatctaaggggaggagatggagcgaggaggaagaacggagggagacactaccgtgcgggacgaggcgatgtgacgagaggccgacggcgcgggagggcgggaaaccacgcggcgtgcgcgcgagcaacggcgcgcggggccggctttgcgagcggggagctcgcgcgagaggagggggcgctcggcgcgggcgactcccgcgcacgcgcgcgcggcgcgcgggcggagcggaggggagcggagagagaggcgctcggcgcggctctcgcacgcgcgagcagcgagggggggggaaaacgcgccggggggggagcgagagagagagagagagagagagagagagagagagagagagagagagagggcgcccgggagagagagggggggccggggaagagatgggccgagcggaattcggcccatcgaacccgggggaggcaaactagacttttgcggagggattcgatttggaaggaattggattcggaattgatctcgacgatcgatcgcggattgagatcttgagatggcacggacactagacaacaagcaaagaaacaaatttcgcaattagggtttttaagagataattttcccgctaggcgccacgacggaacgggcgctacaccagacgtggccattctgcacgggctgggtgatccgggttagtaatgttgagtaggtaaagtgtaccccctctgcagaggttattaaactgttcgaacaactgtgcccacggtcatgggcggatgtgaggtgattcctagcgtagttttgtttgactactgcttgtgaaattgctgttgtggaatgggttcgatgtttggaaaaatctgcggtggatgggatcagccaggcccgggtggccgtttgaaaagctgttggccgggagccaaccttgatctaatcaaagactgatacattgtgtcgacgtttgatgtcgcaattctggtatttgcatggtatggggatcgtcggtgctaaggtatacgtgagactaaggtaaaagagatggagacagggatttttatacaggttcggcccctgagttgtcaggtaatcaccctacatcctgttggccgaagccggtattgctcttattcaccataatcacatcagtacaatatttggggtagccaatctaactgttgtcgacatggcggtctgacgatctgactcgtagtcgacaacagggtagccttcctcctcgaatccgtgcccggcgagatcagagatagcgctttcgtttctcctgacactatccggagacaccgtagggtattagccgtgcttatccctgaagtcgatatccggcggcgtgtcttggcgtatgtaggcttctatgttgattgtgttgggtgttgatcctgtcgggtgttgatcccgttgggtgttgattgtcttttccccgctctcctcctaggggggcctgtatttatacccataggtgtccccttgtccaagtagaactagggaaaccaatatggatacaatccgagtagtccttgtcgtttccatgtagaactctggttgtctttccttatccggaactccctcgaggtcagtttccgtataagacatggtatgtagtggatcctgccgagatttagtcaactactattaggtatgtcgtatccataacactaacagtagcccccgacttcgatgcaaatgaacgagttcatattctcaaccgcagactttggaggaactgttatcgagctcacatgaccgttctcggtgagtttagagataacgttagacttcctttatcagcctcgtgcgggcaccgaaagggtttgtctaaatcaatctccgatgtcgaccgagaaagtacagagcgtacgactaagtctcccgtcttgctgtaatcgagaatttggattgaagttaagaaattttatctcggcggtacaccatctcttcattccgtattccttgtcgagatccagcaaccgttctcgagtgatcgagaaggcgtagagtctgcgacggaaccttgtcgacatttgtcgtactcgccttagtcgatcttggtgtagaaccatagagacatggagtcttcgataatgtcgaatagaattttcctgaaatcaatactcagaaaagaatattagatagaaatagcccccgagcgaatgctcaaagggtgacatgttataatatgacagactagtgaattgaatgtacagaccagtgctttgtatatgagcgtcttctttcttaccgactccgatcagtcagtttgtagagtcatacactctccctagcccccagccttgtcgtcggagaattgttctcggatgacaaggctcttggacctttgacctgcctcggttgaacaagcactgatcctagcccccagtcatgaagttggaaaattcaatttccgattacacggcttggttaatacgcacggcgagaactcttacacgaccagatcttacatggtctttcgtctctgaaggatccgacaaggccttatcagctctgggcatccccagccgaagttccctcaggttcctcggaggccttgtcaagacggagtaaagggacagtaggataggtttcaacgctaggtgtcatctgggtaagggatctctgggtaaaacacttagcgatcttgtgcacctgatatcaactttgttgaagcaggggtaatgggagaatcactacatcgctggtcgaggaccaggcagtagtcgtaactcgaccacttaaagtggaagtagtgggagaaacgctacatcgctggtcgaggaccaggcagtagtcgtaactcgaccacttgaagtggaaatagtaggaaaattgttacaccgctggtcaagaacctggtgtagtctaaactcgaccactagaagtaattgtacgagagatcgctacgattgactggttgagaaccagtgagtaggtgtctcttgatcatttgaagtcgtggtgcgaggaccgctgcgttattactgtagtcgtacctcgaccatctgaggttgcggtacgagagattgctacgtactggttcgaggaccagcgaacgagtagaattatctctcgaacaccaacggaagctgcagtgcgagagattgctacgtactggttcgaggaccagcgagcgtgtagaattatttctcgaacaccaatggaggtgctagagttggtttattacatgtgcgtctcatgtggctagcatgactcacacacccaacttgtagcatatccggatgtccattcgcaatcatgtcgggtgatcaagccgacggcgttcgtgaggaattatccgttaacaaccttttctcgagtagtccagccatggccggtgctatgagataggtcgtcggtcttcgttggtaggtcggttgcgataactccgcatttgtcgagaatgttctcgataatagagtgtactcgaccacaacctactcgagtgctcaattgttcctgaaaaatattttctagaagacaagacatatagcagataatatcgagtatgtactcaaaaaactgcatggatcttctagtattattatgacataacgagtagatgtaaatgtcagggcattatgtgaaccgtaaataagcatgatttatacagaagaagacagcgagcccccagcgttagatcgtagtcgatttaacatcggggacacccgcgcaacagatattattgtataaagaacatgctctaggtaaacataataaattatagatctgacaatactgtatgatctgaataggtacgataaattgcagataaaatattgcgtacctttgtagatacatgccagatgtatttacgaaattagtagattgatttaaaaaaccaatctaccaattaccttgttgcgtactcgttcgatatcatgcgatctgacatcttttggtacgccgcaaagcttgaggcttggatgatctaaatagaccaagttgtcaatgacgatgatggttccgatctggttaggttggatctccccctcagctgaagtcgtcgagtagctcattgtcggagaatccatcttttgaacccatctcgtcgaaatcctgaagcaccaaaatccccctacctggcgcgccactgtcgacgtttgatgtcgcaattctggtatttgcatggtatggggatcgtcggtgctagggtatacgcgagactgaggtaaaagagatggagacagggatttttatacaggttcgggcccccgagttgtggggtaataaccctacatcctgttggccaaagccggtattgctcttattcaccataatcacaccagtacaatatttggggtagctaatctaactgttgtcgacatggcggtctgacgatctgactcgtagttgacaacagggtagccttcctcctcgaatccgtgcccggcgagatcagagatagcgctttcgtttctcctgacagtatccgaagacaccgtagggtattagccgtacttatccctgaagtcgatatccggcggcgtgtcttggcgtatgtaggcttctatgttgattgtgttgggtgttgatcctatcgggtgttgatcccgttgggtgttgattgtcttgtcccccctctcctcctagggggccctgtatttatacccataggtgtccccttgtccaagtagaactagggaaaccaatatggatacaatcctagtagtccttgtcgtttccatgtagaactctggttgtctttccttatccggaactccctcgaggtcagtttctgtataagacatggtatgtagtggatcctgccgagatttagtcaactactattaggtatgtggtatccataaccctgacacattgcacatactccgaccggacgagacgcactgtctcatccgtgtcgtttgagaagcactcatctagttatttcaaaaatgagtttaattaaaatcaatcgcaaaaacaatagcccttcctttgaagcatgcatttaaacacttaattcccatgacttgctgagtactcttgtactcacccttgctctatataaataatctccccccagttgctgaagaagatgaagtggatgtcacgaccggaattaacccaacgggcgttccttacgtgcgtgtattattccttgtcccaggaggcaaggtacaccgaaagttgatatatttcagagtttatcaagcggaagcgtaaatagttaatttattacatgggcggcgaaggcccagcacacacaaagacaaacgggaaacagcggaagactagggcgacgaccacaggcgcttgacggcaggcacgagctagacaccaaagccttcatcttccaggggctcctcttctgggtttgggaaaaaaattgagcaagactgagtacaaccaacgtactcaacaagacacacccacaagtgcaggataaatgcaagggagtaaagggggttataatataaagggttagggtttgcagtaaacagcattaaaagacacttagttgctcaaagctattttgtaaacacgattccagagctatacaatattattaatcaaggccgtgaacccacacgaacctgccttaacccaaggcctacgatgattcagaccgaactggcaacccgaccctgggtcccagctcgtcccaagccaacccaggccaaccattccacattttagttgttaagcaggttttaagaattaaaacactaacttgggtacattgctcggcttgcccataacggagggcgcggctattcgaatagattatactctgatcagaggtgtacatctttacccacaagacacatcttcctcacgtgtaaccacgtgccacataccaccacggtatacggacggaagacgtgacatagtttccaacccatcctagccatagacaagagtaccgacccaaccccacctacggccggaacccctgggacaggtaggcaggactgagcccctagcagcaggacaccggccctgtgccatgacatctcgactaccgggccgcagctcgtgtagccttcatttgtcctagagatgtccatcgacccccaacttcgtccatctccatccgtgtacttttgtttataaccagactgagccacaaactaagccttactgtcacgccccgaactagtcccgaccggaactagcccgtgacgctccaatttagcctgttaatcgataccagtcccaggaaacagtgctggtatcacagggagacagaatatcacagcaacagaggtctctttattatagagtagaagtacagtcatgttgggctgcggacagatcccgagctcacaactgcattacaaaagggaaacggaagccaggacttggaccaaacatcacaggcgcgacttgggaactaggccgaaaccctaaaactcatcgtagccggcttgctcctggaagaactcctcatcagcaggatccgcttcatcttcttcagcaactggggggggatatttatatagagcaagagtgagtacgggggtactcagcaagccaggggaaataagtgtttaatgcaggcttcaagggaaggctgttgtttttgcaattgattttatttgaactcttttctgaaaacaactaagtgagtgcttctcaaacgacacggatgagacagtgcgtctcgtccggtcggagtatgtgcaatgtgtcaatctttaggattgcaacaaagttggcacccggccaacagctttttaaacggccacccgggccaacaacttttcaaacggccacccgggccaacaacttttcaaacggccactcgggcctagctgatcccatcagctgcagatttttcaaacatcgaaccccttttcacaacagcaatttcacaagcagtagacaaacaaaactacgctaggaatcacctcagatccgcccatgtccgtgggcacggctgttcgaacagtttgttaacctctgcagagggggtacactttacccacacgacattactaacccgggtcacccagcccgtggggatcagccacgtcgggagacctccaagctttcatgacaaggcatttcgaaagccgacacaggtttaccatatgccgacgagaggggtcccagaccaacaacaggttaggtcccagaccatactgtgccaggaagcccaggggtcctccccgacaccaccccggcgaatccacatgtctctcggcatcaaagctcccccgattagcaatttactcagccaggggcgtcccattccacccatgtggtcgtacttgtcttatgttcggatgaaattccaaggaaacggtccttaagtgcaagagcgggaaaccgtacacccggtaggatccccggtccgcggttttggaaattcatttggttcggaggcaccgacccaggtgtcgggttttccaagtcttttgtaaaactccagttttacccaagttgttactcagattttaaggttgaaggcgaccgtcgatacttgcacagagtgcacgagtatcgaggcgcaactgggtggttacaaggggacatggtatagcaattaacaaaggaaggatcaaatgcgacaaattaggtaggtccgccaatctgccttgtagacgggacaaacagattaagtgcgatcctatcaatgcataatattttgcaagcaacataattaaatttcaaatataggctcaagatgttcaaaggtggcttgccttgctcgagatctggagcttgatcctcgaaatcctcgcactgcgggtcttcgggctctgaaactatacgcgaaatggaacaactcaacaaacggcgaaaataaagccctattaatgacctctaagcgtgccattagatagatctcgagatttggggaattttggaagttgaacggagtcaaacggatttacggttgggaagatattgaatttctaagattattgaatttttgatctaaaggaaaaggatttaaataaatcctttctggaaaagaaaaagaaaagaagggagggagggaatatagacttttctcggatggctagggcgcggcccaagagaaatggagcggtccggccgagctaaatgggccggccggcccaaggcagcccaaactcgcgcgcgcgcgggaggagggagagagagagccggtggaccgggctcaccatgcgcagtcccgggtgggacccgcttgtcagtggctcggctcaccgtgcggagggagtacgcggctcatgcgcgcgggcgggggagggacgcggtgcacgcgcgcggttcgcggtggacgcggatgcatcgggcccacgcacagcctcacggctcgcggtggaacgcgcgcacggggagggactgaccggggtcggctcgacccggtctaggctgagctggcgccgacgtggcgcctacgtggctgccacgcgggccggcgggaggtagacgacgacccggccgcgaatggacggcgggcggcggcggcgagcggcggaacgaaccacggcgatacgagcaaaagctagcacaccgggcggttgctcgtgatgaggggagacgagccatcggctcggatttgccggaggaagcttgacggcggcgaatcgcggcggcgacaaccggcggggagggaagagggaaacggcgacgaggtcacgagaggtcgattcccggcagtgagagcatctacgcggcttcgggaactcgacgctagcgtcggattgggcggaactacgccgagcgaggccggcgacgagtgggtgctacggagctcgggcggcgacggcggcgagcacacggcgagcgacggcaacggtcggggcggcgccggctaactacggggagtctactcaagctactaccgaaagctagggggaggagatggagcgaggaggaagaacggagagagacactaccgtgcgggacggggcgcagtgacgagaggccgacggcgcgggagtgatctctccggcctcgggccgaggaagaggaagaagagggcgcgcccggagtccccttccgcgtccacgaacgcaccggctctcccggcgcttggcgatggacggcggaggcgaggcagagcacgggagcggcgacaacggtgaggaggcgaatgggagaggaaaggaagggagggggaagacgggtttaaaagggcggcaatgtcggtttgagagaggggaaccgacatgggcggtcaagccggcgagctggcgctccggctagcgtccaaagcggcgacaggaggtgacgccggcgagaggggaaaaaggggagaaaaagaggaaaaggagggacagaaagggggctcgcccctttgccgattcgggaaaaggaggagggagcggggcgactcggcagagggagaggggctctctgcctccgccccttggaggctagcgcgcggagtggcgggggccgggcgatgacgacggcgatgacgacggggcggtttggagcggcgcgacgacacgggcgacaggcgcgggctggcgcggcagagggtgacggcggcggcgaccgggcggttggccactcggcacgcgcgcgcgggaaacaacgggcggcgcggctgggcagcgggaccgggcgacgcggacggcgcagacgacgcggctcgggcgggaaaccacgcgggcgcgcgcgcgagcgacggtgcgcggggccggctttgcgagcggggagctcgcgcgagaggagggggcgctcggcgcggctctcgcacgcgcgagcagcgagcggggggggaaaacgcgccggggaaagcgagagagagagagagagagagagagagagggagcgcccgggagagagggggccggggaagagatgggccgagcggaattcggcccatcgaacccgggggaggcaaactagacttttcggaattgaactcgacgatagatcggggattgagatcttgagatggcacggacactagacaacaatcaaagaaacaaattttgcaattagggtttttcggagataattttcccgctaggcgccacgacggaacgggcgctacacttacccactagacatgtggaagtacggtagtgctttgcaacagaggcccgaagaccggtccttatatggccgaggtgctactatcaaaaccatgcaccccgagcccagcctaaaaccattttgaggattttgaatagagggggaggtgtgaatccaattccacaataatccatccattcaaaagtgtccaggtgatgagaatattcctaaagtctagagttgtaaaaccacctaatgttgcctaatgaaccagcgaagcatttacctaaaatcatactagtggtaccatgagtagagtgtccactagttggggttttgtttattctaggggaacaaggaaataataacaataacaataataaggtcataacaaaggtaaataggcatggctagataaaacagtgataacgcgggaatttaaataaagcgataatgcaataatttaaatcaacataattttataaactgggattcaatatgttcaaggatgatgtgacttgccttgctcgctttcccaaacgtcagcttcaacttccacgaagagcggatcttccgaagctacggcgtctacacgaccaacggaaaagaaaaggcttttactctaataaactccatataacaagctggaacaaagcacaaaaataggttcttgacttcttaaggaaaaattagagacttgaacggtccaattccgagttcaaatggccaagttatggtcatttgaagtttatatgctctttaaatgaatatttgcgaatttcttcatttaaattttaattttaaaagggcttattgcgtcagccgaggggagggggcgcgcggaccgggtccacgggagtggggcccacgcggcagcctcacggtccacggtggaccgggtgcacctgggctcacaccgaccggcgccatgggtcccacgcgtcagccgcacccgagggcgcgggcggctgacggccgggccccacgcggcagccactcggcgcgcccgagggcggccaagccggcgtagccggcgggaggcggcgcccgcgcccctatggtcgccggcggcggccataggcacggcggagcggcggccgagagaggggaagggaaggggaaaaagaagcggcggtccacggctcaccctaggtcgacagcgacgacgaaaaaggcagccggagcggaggaaggcggcggcgcggctcgggtcgacggggtcgacggcgttccggcggtcggcgagcgaaacggaggggtggacgaggtcggcgaggatgcggcgaagccgaaggaggcggcgccgaggtgggaggtggtccggggcgacgacggcggcggaccggagctcgacggcgacggcggagagagagcgacggcgcgagctcgattccggcgaggaggaagggcggcgagaggcggaaacggacggaggaggtgcggggagggtttaaatagagttggaaaggggagagagcggccggcggggaaggaataggcgcgggaggtccggccgccatcaatggcgccggcgatatttgcgggggcaaatccgcccgtttgaacgtgagagagagagggaaaaatgggggaaaagggagaggggatcacggggagtgatttccccctctttattgcacgcggagacggcgggaggcggcgggattcgcggcggtggcggcgctagggcgcgggcgaggcggcgggagcggcgggaggaaggggatgacgggtgggccccacccgtcagcgagggtggcgggcgggcccgcccgtcagcggcgcgcgcgcggggagaggccggatgggccgcggggagaggagagggagggggagggagatgggccgagccggcccaagagggagagggagggaaaggggactttttagagattttctttttataaaatcattttaactttttttatttcttaataattattatttgtgctctgaaaattccactaaaatttatttacgcattttaggcttttaggaaatatacaaaaatcctccaagccttatttgacttttaactttgcacattttaattgttggaggctttcacacggattttaattattctaggcataatttagaggatgtattttagagtcattttgggacgtgacagtggatcccgctgacgaggagttcttccaggagcaagtcggctacgatgagttttaaggtttcggcctagtttccaagtcgcgcctgtgataaatggtccaagtcttggcttccgctttccctttttaatgcatttgtgagctcgggatctgtccgtagcccaacatgactgtactcctactctgtaataaagagacctctgttgctgtgataatctgtcttcctgtgataccaacactatttcctggggccggtatcgattaacaggttaatttggagcgtcacgggctagttccggtcggggctagttcggggcgtgacattacggcttttattaaatgtcatctttttttttttagaaaatggatttaaacctggcctctacacccaaaagtgggtgtgtacatgtacagccaaaccttttattatgttcttaaagtactacaataattcgtttatccattgataagctctgaatattttgcggactgtcgaatgctatggccatggaaaaatatgcacgcctccttaaggaatatttaggatttaaatatatccaaaatatttttcactttagaaacatgtttaggatttaaatagaagttttaggcgacatagcctttgtggtgatctcgatgatgttatttttgacaaaaataaaatgatatatatttatcacccttatatgagctacacacatataaacatcatttggctctatatatgtacttgttcctgaaagggaaaaaaagactctggacttgttctttgatgcatgcaaaacaagtggtaaatatgagtttcttgtcctgttatggttggttgtccatgcttatgatggatagtttggcttttcttttaatcaggtaaagaaaactgttttggtgtttacccacaattaggaggtttgaattgtactctagctactttgtactcttgtatatctgaaaagaaagtgtgcatgcaagcattcacagtccttatagttcatcggtttttctattttctctacattttacagccctgttggtttaatttgagacttttttcccgcaaaaggaaaattgagacatttcaataccaacggcgcatccatttagcaggccccaaatttagctcaatcgccggcaccaaaggtttccccttgtaattaccccataccaaaatctatatactactacctcagtcccaaactgatcctaaaataattacaattctagattacttatcatatattaagatttgagaagaaaaactaagatacccttcattaaatggtgcatagctagtaagagtaggatgatgcctgaggatagaatagggataatgtcacaccccaatctgataccgccgtacaacggcacctgacaggagcgtgtcgtagggaaaacggcgcgaaccgcttcctacgaaaccgcgatctcggtaccagtcccaggacatagtgttggtacccacggtgacaaatatgaatcatagcaatccttaaaataaatagagtacttatttaccttaacttaggttgcagctcagacagcccgagaatacaaccgacgacacggatgaggcgaacaccaacaacaacagcagcagcagaaccaacggtctaacacccaacaccacaggcgacggctgggaaccaggacgaaactctaatcttcacttcactttatcttctcttcagggcggaggaactatatatatatatatttatatagagcaagggtgagtactttcgtactcagcaagtcacgggaacttaggtgtttaatgcaagtttggaagagaggcaaggttgttttgcaaatcttttatttgaagacattttgaaatcactaagtgatttatttctttctaagtttgggccgaaaagagacttgcgtctcaattcgactttaagagatgtttttcaacagctcatttagtaatgtaccgacctcccgggtcagatcattacttctcggctcccagagccattccacttgattaatcggctcccagagcctttttcattttctcggactcccagagtccagctgcccagcagcaaagcaatccgcttccactcaggaagcctagtctatgatgcccacagacatcccgaatcacacagattcgtttctgaccactcaggtcatccatctgccacataggctgattctggttacgattcccacaccacaacaacttttcacaaagcacaggcaaacaaatctacgcaacgggaaccacctcacatccgcccatgaccgtgggcacggctattcgaacagttagttaacctctgcagaggggtacactttacccacaagacccgaacttactccagacactggccggtgtcagaggttcgcgacaaagcctttcccaagccgacctagggatacctcatgccacatagaaggatcaaatcctcacataaacataggccattttaggcgttcaccaatcaaactccaaccacctcgatcggtaattcagcaagcttctcgttcttgcattaccaggaacccggtttggctccaaccgaccccgccccggcgttcccaactattggcatgcgaggtttccctgaaccgactagctacttagccagggtgtctcattccaccttgtggttgcactttgattatgttcgatgagtttcccacaggaatcggtccttatatgcgaatacgggacagtgccacataggcacaacccccgcatcgcgagttttcacaattcattttattttcaaacacaccgacaccacatgtcgggttttgaaggcttcacaaacccatttcccaagttttcgacaaacaacgatgtatgtgggatatttggtatacgtgctcagagagcacgaataccgaggtaccacaagggtggagcgacaaagaatcagggtagtacgacctacggaaattagtgcgactactgggtaggtccgtcggtttggcacgcaaaccgaggccaagcaagttaagtgtgtgattctaataatgcaagttgcaaacaaaataataatgacttttcaattataggggcaattgatcaaagggtgacttgccttgctcaaggtcttcacgaagcttcacgaatcttcgagaaaacccgcgatcgacgaaaatccgataaccgcaactatacgcaaacaatcgaaaacctaaacaaaagaccaaaagaaagatcctatttagactaattagtagtgccattaaatagatctcaatttacggaattattgcaagtggaacggagtcaatcggacgagcggttggggagatatggatttcctaagattatttggattttctatctaaaggaaaaggatttatcaaatcccttggaaaagaaaaggaaggagggatgtcatttagacttactcaggcggcttaggctcggcccaaggggtcatgcgcagcgcggtcaggccattgggccagcgcgggcgcgggtggtcagcccattaggggcgcggggagagagaggccgacgcgggtggacgcggtccaccgcgcgggacccacatggcggtggttgggttcacggtggggagggcgcacacgggggcgggcgctaaggtttcgggtgcgcgcggttcgggcgcggcgcgccgggtggacggatggcggcgggcccacgtgcagccgcacggcttgccgtggaccgcgcgcacgggagggaagacggagggagggggcggctgactggcttggcccggtcaaggccgaggtggcgccgagatggcgcctacgtggcagccacgcgggccggcgggaggagaaagaaggggcggccgagatggacggcagacggcagccgagttcaccggagctcgtcgcgacgattcgagagagagggagtacacctgaacgatgggacggacgagagggagtgagccaccggatcggattcgccggagggaggccggcgacgacgaatcgcggcggcgcttgccggcggcggcaaaagagggaaacgacgacgacgcgatgagagctcgattcctagggacttgagcatctacgcgacctcctgagttcatttctagagtcggattgggtggagctacaccgaggaaggccggcgacgagcggctactaccgagtttgggcagcgacggcggcgagcctacggcgagcagcggcggcggtcggggcggcgccagcttgctactggaaggctactcgcactactgcccagagctaaggagaggagagggagcaaggagggagaacgggagatgcactacagagtcgagacggacgctgtgacgagcggccgacgacgcgggagcgagctctccggcctcgggccggggaaggggaaggagacggcgcctggagtcccgcgtcagctcctcgcgcgcacgccggcttcaccagcacgcgcgatggaggagggaagcgaggacggcggtagcaaggcggcaagggcacggtggtggcgagggaatgaacgagagggagatggggcggctcggtttaatagatggcaatgtcggtttagggaggaagaaccgacattggcggtcaaggagagcgagctggcggtcatcgacgcgtgcagccaaggcggcgacaggtgatgacgccggcggtgtcgggcaaaagtagaaaaggaggggaaaaaagtgagctcttctctttgccgagttggggagggagagggataggagcgggagctcagcctcacggttttggcaggacacacgtggagcggctcgggcacgcgctgcagagctcgcggcaggcagcggggccgagcggcagcgtagcgcaggcgctgacggaggcggcgaccgggaggtcggtcacgagcgtgcgcgcgcgcgcgggaacgagcggcacagccgaaaatcgaatggcggcagcgggaaatcggcgatggcggcagcgctggcgcgggagagagagatcgaacgagagagagagacagcgagagagaggaagaggacgagagagcgagagaatgtccgagagagggaagggagagagagacagcgctctctctctctcggtggtcacgtgcggcgcacgtggagatggagggagttgagaagagatgggccagcggcatgtttcggcccaaatcatcacgagggaggtaaaatagacttttaccagaaggtttgatttggagagaagtttgatgtggagattgaatttgaattcaatttgtatatttgtacacgagggttcaaggtggatccaagggaggggtcaaggaagggcttcaaaagcgggaattttggtatttttgggatggatttatatttggcggcacgaaggattatttcagaggatttcaaaaagggaagatcattattcaaaaatggaacaagggagatagcggtagaatgccatggatagatagatagacagaaaggtaggttgataggtagagggacggatagacagatggattgacagatggatagataaacagatagataggtatagtagatagatagatggatcgatcgatagatagatagatcgagactcagagagagatgggatggaagagaaggaagaggtggaccggaaaaaggatgaaggaatccaacctatgagggaggttaaatagactttcacagagagatttaattgggaggttttagggttggagtctggattcgaatttcgaggttgatactcggtctcgggagaataggaaggagtcaaggaagggaacaatattcggagacgagtcaaaaggggatggataatttagagaaagagagtgtaacttgggagtttgagtttgactactcaacgagatatgtgggtaaggattttggagagaagtctgaatagaagggttcggacttcgagattatttcggaacggaaatcattttggggagaactcagggcgaaagggattgaatcttgggattttgagttcaagggtggaagtgatctcgatttgcatattcagacttggatcagaagttcgagaaagagaacaagggtagattgatgaaccaatacagggagaaagatagatgaatcaaaacctgagaggttgaattcgaatttgagaatcggtttgaaggaaccaaggagagagcttatgacgcgaaggtgaatccttagatgaagttagggttcgggcattcgacaaagttcacggatggggttccaggaggggattccgaatagaaggaatcgagcttcgggactatattgggatggaaattttgaggagacgatctttgataacagggtatcgagacaagggagggatttaaattgagatctttggcacaacttagactcaacactcaaagaacgaaattttcgcaattaggattttgccgaattagtttttaacgtctcacgaaaaacggagcgttacagagaaattcaaatcaaaagtgattaatgaaatagttactactctattatgataattattttgggacaaatttgaatcctaaaaatacaattatgatggaacggatgcggtatctcggatagatatctattaacagactcataacttaaaaggatactccccctttcaggttataagatgttttgactttggtcaaagtcaaatttctttaagtttgacaaaaaaaatagtaatattttcgacccaagataaatttattctaaaaatatatttaattattaacataaaactagtttggtaatgtaaatattactacatttgtcaataaacttagtcaaatttaaagtagtttgactttatcaaaaccaaaacattttataacctgaaatggtttgaaatgaagagagtatatcttagaggcggatatagtagctacttttagatttcttttatatatactagggattaaggcaagatgagaaattaaatagggatgatctgtaatattggttaacatgacattttaaatactgttatatttttagacggagtgcgtaaataggaatgtaatttcatgttgccttttctactagcctcgtacagcttcagataatgctcctttagccaagctagcacaacgtgattacgtgaatgtgtcacgtgaccttctccaagccgcccaagtaactagctagataaactggtcgatctccgctgcgagagcaagataatgatgacaagctagctctcagtctccacgaattggagcaaagctggcgtgcgatatgatgcagcaatggacaaattcaagcagcctcagtaattaattaactcactttcaacttgctccaaaacgtgctgattaatctatcagtttgcatgcatggtcagtagttgattatcatattcattgacaatgatagacaccgaaacaatcgatttcgtgtccgctctcaaagataaactggttacgaacaaaaaaagatgcgcattttagtaagcccccttgcgtagaacacaggggatattataactggacgatacaggagaaaattaaaaattaaaactttggtagcacatgcatacaaacatatctgaatatatattccgttctgcgagttttaattttctacagtttttgaagttcataggacaactttgacacacttctatatatatctcgtattattgtgtctcgatcgatcaagtagtgtttattcaaaaaatatcgtacccgttcagtatacggtatgttaattatcatactacataattattaagtagctcgatctcacgtatcacctacggtatctgaccgtagaaaggatcagagttggaggtttattaataacaagtaaaattcaactttgtgtgcctgaaataattaagatagtactggcataaaatacacagtattgagatgacgtataatttgttcagatacatgcatccttaactgtcattagaatattgcataaaagcaactatattaattgtgtttgtggacgcatgtcatctagcgcataattgatctattttttttgctaggagtgcataaatgatatcaccgtaatatacacgacattttcttctcgatcaatgaaattgcacggaaagctcctgtttcgtcatccattgggaagacaaatattttcctttcgtagtttcgtttccaaaatatggagacgaggtactgaaaggtacatacatctagctttgtctgcgtcgtccatggtgcttaatggagtacgagtagaaacaatgaaaactaaacacggtatatatactagtggtcttgactattgactttttgaccggcatcagtaagacacaatagttttgacatttgaccggcaacacatgcacaagcacaggcacatgcatgaattcataaaagttccattattcctgtataggatgggatacttcttaggactaccaatctagacagattcattaggtagtgacaatttataacggagagatagtatatatatatatgtgtttgtgtttataaatatttaaattttacaaaactataggtactttagtcaaattattgtaaaactatagatttaaggtgttgtatcgtaaaactactgatttaacaataaacttatcacaaaactacatgtttaaggctaaatatctcaaaactacatatataataataaaattatcacaaaactaaacatgttggggtttaatatccaagttttgtgataaagttgatataaaacatatagttttgtgataattttgttactaaatttgtagtcttgcaatatttcaccttatatgggtggcaagttacgttggatgtcgtacgacaacaattttcataaactatatacccaagataatcggaaactcttttagtccctcaaaattttataataaatttcacagaaccataaatatttcgagcaaactatcacaaatctacaaatttaaagtgtcagatcacaaaactacagatttagcatgaaatttctcacaaaactaaatatttaagatagtgtcaaataaaattaagatggagtgtaaaaaataaagattaggtagcaaatttatcacacagctataggtttagcaccaatctaatcacaaaactacaccatttatatagctccaacataaagatagtgttagggatttgaactctagaatctctaattatatgatacttggcttttcatatgtagttttatgacaagttttttttttgttaaatatgtagttttgtgatagaacaccttaaatctgtagttttgtgtgatagtttgatcaaaatatatgttgtttgtaaaatttactcaaatttttataaatagtatagaaaatcaaatgtaaactcagtttaacatatcaagaaatattttaaaaaacaaattcaatgtataaacatatcggtactattcaatctaaatttatgctctatattgtgaaattttctccaccatttacgttaaatttgacaggaaaaaaaaagaagcatatgaggggaagaaattagaatcctcatcgcctcatgaacacagagtacagtatatatgcatgcatggcagcacgttcagtaccaatttggctaattggctacttgatgctcaccacacattgaagtcaacggctgcttaattaagctttgcctgcactgccattccataattcagtgaaggctatattttactctagtactacctactactatggagtattttactccagtagtaagaaaacgtgtcaacgaaaattgatctatctaatctatatactccatgcatcccaaaatattattacctccgtcctaaaatacctaaaatacttgtcgatttaagtttttatttgtaaagtttgatcattcgtctttttaaaaaaattatggaattattatttattttatttgtgacttgttttattatcaaaagtatcttaagtatgatttttttaatttgtacgaatgtttcaaataaaacgaataatcaaacattaaaaaaaatcaaaacgaccattaattttgatatggaggtagtacaacataaaaccggagtagacatatcataatactacgaatctgaaaaaccaatcctaatatcacgaatcaagatagagatctatctggattcctcggactatatatctcgtttggttagattgcaatattttggaacggaaatattatatattagttggactttaaaagaatctcacattaataaaaagaacagtgaataaatttagctattcatctaagtgcactgggactaaattattgttgtttacttgagtttacattagttagatcttcccaaatattgatgtctaattgtaaattaaatcaatatgatgctaacctgaaagtccaaaatatttaaaatttcatgtctattcattacgattttcaaattattaggtaaaacaactgagatgacaggccaagtacaactgtatttatgaactttggatttcggaattaatatatcaagaaggaatttaagttgtaactatatatatttgttatttatgggtccatgtcaattatgacttgagaattattaattgaattttataagaactaataaattaaaatagtaataaatcaaaacaccaagatggctacaactccatgcttatttttacgtttgagttttagaattattaaattatgaaaaactgtaatttggtacaaactgagtacaattttatttgtattaattttgaatttcataaatcatttcatgtaagaaaagctaaaattacaacagtataacaagtacaactttatatttattaattacgtgtacattccgtgcacatcaactaacaaatatcataaaaaaatccaaaaacaatcaatcaatagtattacacttacttataacatcttaacctgaaattcattacattttagtcgtaaaaaaacaaaaattctgacagatttaagactacaagtctattgaaattttgtctttttattttttttaacgacttgcacaagacgatacgaagttctatcgatagagaaaaaaaaactacaagattacaaccctgaagggtcataaccaggaaaaaggaaaaaatatgccaccaccccacacaccgataacgccaacacacaagtctaggagaaggctagcacaggaccggccaccgttaagcgtgaccgaccgccactagaccaacaaaggaacacagacgagatcgtcccttagggtatgccaaaatgacgttttcaagaagagaagcgacggaaaaaccgccgccgccgtccgtcggggctcaaatgagccaagactaggctttcacccggcaaccacccttgaggtgtgagacagcacgacaacaccctcaggagggtgaatgaatcatcgttgtcggtccggccaaggccggactgggttttcacccgccgctcaccacctgcgaatctacgctgacgcaccgatgctccaccaccactcaagctctgccgacatctgggacccctgcaccggcgccccccgccggccagccttcatgcgccaaagaccacgccacacccaccggcagctcctcctcgcaccgaggtcgcctcctccaccgccggccacatctctcgcgccaagccggcctcctccaccggacgcgtctcttgcaccaatccagcctccctccattggccgcgcctctcgcgccaagccgaccttcatctccaccgctcgcgcctctcgcgccaagccggcctccgctgccatcggctacgcctttttgcgccaagccggtctccaacccctcctccaaacgatgccgcgccggccagatgcagccgtctgccaagccctcggctagccgtccgaggccgtcatacctccagtgatcgcagtcacggtcaccaccaccgcaaccgctgctgctgaacgcccagccacctcgtcgtcgccatcctcacctcgccgccgtcacccaccacggccagtcctcctcccgtccacggtcgctgtccggcccatcgcccgtgcatgccgaagctgtggacgccgcctccagctgctgccggcgccgaccgcgcaagccacttggaacaattttttctagattttttatgatatttatagttggtgtacatggtgtattcatgatggtttacgtgcataggatatgttctcatataaccaaagagagatttttgtacgtaccaaaatttatatactagctaggatgtattccggtgacttctcaggagggtaagatcattcgtatataaattgtgcaaacatacaacttggtcgacggagaggaccagcaaacaagcacaaccatcgctttgatagttgacttaacgaatccggccgtacgtacgagtagggtcgcctaaacagacaatacgatatattttaagctttgattaattatgacggtacgcatctttttctctctgccttttaaaacaagatatttaaatgcatcgtccatccgtcatgcatttgtgtaactagcaaaccattttccatgattatacacgagctagattttatattcaaaagtggaattgaatagataaatatatttgtttccatttcgatataaatatattttatatacgaccatatcgatcaatatatatgagcctttatggctttatcatcgcctttatggctttatcatcttaacccgccacgatcgagtgatgaaattttttttatttcttttattaatgtgatatttttttaatctctaaagtgaacatagtggaaataaatggaccaagcatctagatggtcatattctagttttacgtagatttaaggtagagtttgaaacagattattcacatgtcacatattatctattcgattataggaatatattaaatatcttatgaaataaaccttacgataagtggtccaagcaatgcagcaaaatatttttttttgagaattcatatttagaaccattgagggcccctttgatttggaggaaaaacataggaattttgtaggattttaatcctataagaaaatttcctataaagccctttgaaacaaaggattaaatcctatccaatcctttgaaattcctatggaatggacaatcctatagagattttggaggaaatttagcaagaacttcaacctcttggtaactttcctctgagtctatctctctcatccaatttctacgtttttcctgcggttcaatcaaacgatcattcatgtgtttttcctgcgttttgcaatcctttgttttacactttcattcctattaaaatcctacatttttcctattcctgcattttctcaaccctgtgattcaaaggggccctgagtttgtttcatgacaatatgttgggtatatgtctatcggtgatatgggcctaggggtatcatgtttagagggaggaggccgccccccccccaactcacgtggcgtctcttgagaagggtggcgctcgggtggagtggctgccgccccctcccagcttagggtaccgagtttggaggaaggaggctgcccctagacccacatggcacttccccgaggggatggcgcccggggtggagtggcggttatcccctccgcgcttgggggtcgggcccgtcccgatcaagactagagggaggaggctgccccaagcgccacgtagccctcccccgaggggggatcgggcccgaggtagggcggtggcagccccctcctgtgact

SEQ ID NO: 6574 - DNA, 18512 bp, Oryza sativa
aatgaaatcgatcctcttttttttttcaagaaaaattaaatcgaccttattccataccaacagctctgctgcgaaatgctaagtttacaagtctcgatccacgcatgcaacaaaaacacaacaacaacaacagcagcagcaacaacgtacacgatggcgacgcactgacaaggcgaggcgacagatcggaggagcaatggctgatcggccgggtcacttgccgccggcgacgagcgagaggagcgcgtctctgtagtagccgtgcgccttcccggcgacggcgtcctccagcctcccgccgaactgctcgtggtaggccgcgcggatggcgtccatgtccacgtccgcccgcgtcaccgccacccgcgtcagcgcctccttcgcgtggtggtcggcgccgtcgctcaccgccgccgccaccacctcgctgaagtacctcgccggcgtcgccaggcacagcgccgcctccctcagtgtctcctcgtgcccaagatcctaacaaaaaatccaataagatcgatagatcgatcgattagttcgtcgtggtttgattgattggttacctcttcgatgtggcggccatggatttccttgtagtgcttgaaggtctcgacgaggtgcggcttgctccgggtggtgaggatcctgacgacgtcgtcgttctccaccagcttcgccgccgcgtggccggcgctcttcaccgcggcgacgagcgccttcgcctccgcgcgcgccgtctcctcgctcaccctcgggccctcgtaccggtacgcgctcaccagcccgaccagcagctgcatccacgcgcgacacgggacacagagaaagatcaacgggagaggtcgacgcgacgacgacgacgtgcactcaaggtgtttgttgaattgcttacgccgcagtagggcttgtccctggcgcggtaggcgacgtcctcctcgagggagtggtggaacagcgcctggtacgccttgcgagcgccgaggagctcctccgccgtccgggtgcaagcgatctccacgacgatggccgccgggtgcgcctggtggagcacgtggtgcgccagccgcggtcgcgctcccaaaggtgcatcgcccacatcaccatcaggttctgaacagtgaacaaacacaaccacaataacccaatcagctccatctccattgacaagcttcgtcaagaattcaagattcaaagagaagagctaaatcgcttgccttgaaccgcgagaactcggcggcgaggtggagcatgtactcctcctcgcacttctcgatgacgccgccatgatccttgaagaagccattgaagctcttcctgaacccggacagcttctccggctgcctgcgccacttggccagcgccgacaccatcgccggctcgtccacgccgaggccaccgagcccttcattgatcaatcgatcgatccacaaaatccataagcatttgcaagacaaaacaatatgaaacagcagcataaatgcacacacgaatgtgtccaagaattgaatggttgtaagtttactaacctgagaaggccctggtcagatgctggatttcatcagccatggccgattggatgatctctgaatgcaagcaacaaagatgggaagagaagatgagtagtgagtgaggattggctactggcttagctgattgctgtgagctgtaagcttgctctctccttcctgtggatgatcgatctttataccaaagaagtttgtgtctgggaagccaattatgggcaatggtggtatttcaataaccaggaaatgttcatcagtagtctacacatgtgcagacatgtacgtatggatcaatctaatttagttccctgttgaaatggaaaggaggataaaagaaaataaacgagttgccagcacatgatgctgagttagccccgggggttggggtggggtgtgttcaattgaagtgattggttgattggtgaattggagtcgtggaacacggggtaatctgagaattaagattatgtctgcaataatttgaataggggcaggtctgatggcctccttacctggatgcagtcccatcatgctgaattcctagagagaagatgagaaaacttgttgcatatacacctgcattttcaggtctggactgtaaggtagttgtgatggacatgattcaatcagagatagtaaaatgtttgctgttctttcttgaattttgttatctgtcaggcaaaatcatagtaaacctactctcagcactgcaattcttattcaagggaaaatataatgcaattgaataactgtagggcagcatgcaatgaagtgttataccgaaattgaattatctaacatttgcagcaatgtgagtactaactatttttttataatggaaatcattcagcttctgtgtactaattgctaattagtagcaagatccacaagacacgctgtcatccttatcaacggcatcagaattgcccatacctttgatcaaatcatggttggtttatgtcccattcgattgtttttcgatagtctttgctcaatttaagtttgtcaatgtcttgcaattgctacgatgacagagggactgttttctgaaaaataagctgacagcaggaagcgcaacttctacttgaagtgtttattgtaaggtcaataaccagctaccagacatccactacatcaatacattgtagcttgatgtatttggcttgttggtataaaataaatagtagtttcataattgggtccaatatattgccattgtcaattggggagaggcacagaagaaaaaagaatccaacgggtattttgggactttttgacataattttcttttaacataatattttggaactttcagagatgatcagttttagttaagcaatggtgtcttggcatgagtaacatgctcactggaacgtatatatacttgacaaaaatctgtattctctaagacagaacgcataagtggccatatcaccatcgtctttaagaaacatgtgaaacaagaaggttcctagatttaccacaatgttctggcaagaaatggataagaacatgctggcaattttgaaacatgaaaatcatgatgtgccagggatataaatatcctatcatttgaaacctactggggcaattgtcaccttcaaaaatgtggaccaagctaattaattgtcctttgatgttgggtcaccctctgcaatcatgcagggaaggatgaaaaattggcacatggtaggaaaaagacaagctgattactgagaactgcacaagcggatcacctttaatattgcagttgaaatctgatcgagttgttggcatttggcaacttggcatgtttgcaccagaaaaaaagggcatctgccacatagaaatcccatgagtttcacatatgaactgcagtatttggccgttcatcttttcttaaatgttttgttatgcgttggcaaccaaattatattcgattcagtataaaacctttaatcagatcagcgtgatccgcaaggagacttgtttttttagtttcctgagcatgaagtctactatcagctccaacattgccaactgtacctttcacactttatttttgcacagttgtatgaaagtaatgggagaaaagacattcttttaataaaataaatatttcacaatgtttcagttccaattggaaggaattttaaaaggtaagaaaaaatgataaaatcagctctgtgcgtttcacatgcatggaaagctaaaaaaaaagagagaaatacagaaacgtggttttaaacgagtcaggccctttgaattttaatcttagagaccataatgcttcttcttttgtatgatgggcttaacatgtgcaaattcttatatgttgtggatacaacgtaagtttcctgagtactgcccccctctacttttggatagtataatcgatatgcaaaagataaccttaagagctaagcattgaatcatatttgaaaagcattgaattatggataataatatatttcaaaaaattagaaataatacatgttttggtcccttgtgatcactaaataacaatttcagttagctatgtccataatatgagcaaacaaatcaattcacttgtacatgtaagagtttaataaagaaaatataaatcaatccaatgacagcgcctgaagtcaagtgaaaaagggtttggttcctaaaccaggttggaaggtcgacccccaccctggcgcgttgttttcaaattatttctttttcatatttttttcaacaaagttttgcaactaaaatggttggtttacaacgtgtcgcggatgatataaaaattatatattgcaactaagtggttagccatatatatttttttctatgaagttatgcaactatgtgattcgactacaatgtgtcagttatagataattatttctttttcatattttgcaactaagtggttggtctacaatgtatgcagatgatatgaacaagttgatgatgaatcctcctcctaattaagtaaaccacgtgaatatataaaaaggtaacaaatgcatattggttactacttactagtagttttttaaaactaaaccggcaggagaactgccaattatatttcattaaataggagtaaaaactcagatgggctacagaaaaagaaaaaacaacctctcggcgagtagagactcgccaagcctttccaccgtggccagtacaaccacacagcacacggagctccacatcactctagccaaactatcaacgaaatgatggcggaatccaacgatgaacatcgatgtcgagatgctgaagaggcggcacacagcgttgacatcacaaggcacgtgtcatcgttgccgagctagccgcccagcgacccagtagctccgactccatggcaatcatggcatcattgtaggcatcgccaaaccgagcaaagcaacaccaagctcatactttggacatcagccaagcccctgaagcgccaaagcctgtactagcaacacccacatccctagagagaaactgcaaatgttatcgttgccaagcttcgtcgcaccccaacgacgtagcagctccgactccacccgacagagacaaacgaagaagctggatgctaccaatacaagaaaggaaccaagaaggagaaggcctcgccaagcacctaggcatctagcgcatcgagctgacacaggagtccagcagcggcaaatggtgcatgggtaaggttctccaagatgatgcccccaaggaggatacaacgtgaaacgccgccatcgcccgtccggaaaccggatcacagtttttacctggagactggtagcggtggagaaaacgctataacgacgcctccaagaagggaatgacgccaaaggcgccaccgtcgtcgtgccagccaaaggctaagcaaggctttcgccaacgatttcgtccagcgccacctacccacacaacaaccgttgctgaaccaccacatcatctcatcagccaccagttagcccagttcaccaccccacggctcaggtaggctcacggcctgctcccgcacatcgccatggcaccgtcgtcctctgcacaaaccgccacgtcccctctcccgaagctccccacggccaggacaggatctagccataggaggggaggagctccacgaggtgggttttttaagccgcccgggaagaagagacgtcgccgccgccaactgcttccccgtgcacataggccagagaagcagcagttgatgcatgtccgtgagccgctgccgcctcctccgcgcggccctcgcgccgcggccgccgcctccgccgccgacctgcgcgtccagcccagatctagccaagggagggccggatccgaactcgacggctccggatctggccgtcctcgccaagctgcgcctctcgtgctccggtctcatcggcgccccaaccgcttgactaggagtgaggggaaagggagagacccgccgccgccgtctttgcagccgcccggctttgccggcggctgctcaggcggtggcgaggtgggggagaggagggagagggagggggtgacgatggggtttcgccgcccgcgtcacccctgaggcggagcgaccgggcgtcgagccgagttatatattacagtttaggaacaaaagccttcaaagatatgtttaggaagcacttaacacaataattatttgcatttttagaagagacatgacaataaaaccaaactgaccaaggaaccaaccgggcaaccattacacaaaaacaaaaaaatgtcccagcttgtctgagctgtccatgattgcaaacggtattcaatcaatcactatcacttacatacacaatcaaacacttcaccaagatcataaaaatgagtaaggaaaaaaaacatcatggaaaaataccatgaaatacaaatggaaaaaatagggtagagcccagagcattggatgtgcagattaaagctatactactagcattcaagtttttttcaactctgctgcgtaggaggcgtgtgtgtgccatgtgttgctggtgctgctgcctggactgcatccataacatacctccactcaatctcctcttcctccatttctccccccattctctctcctcctcagctgcttctgcaggtggaggagaagcagcagcagcagcagctgttgctcccatggcttccatctctgtcccaaacccagctccttcccctacagaggatgcagagagcataagaaaggcagtgcaaggtacaaatggactcttcaatctctttgtacatcatgaacatttaggatttgaatttgtttcacaatgtaaacttaaagagcactgaattctgaacactgttctttgccaaaccctgttgcttttcatgtcattgttattgttttcatctgaagtgtttgcgagtaattagttgctactactccagttcatgtggaagagacgagaaattttgtttgttcaagttggtcatggattagctaaacatgttctacatagctctgaaagactgaaacaactgatgatttcgaaatcaaatatttgaattttcttttcttttttttggttgaactgaatcaaaggatggggaacggacgagaatgcgctgatcgagatcctcggccaccggacggcggcgcagcgggcggagatcgccgtcgcctacgagggcctctacgacgagaccctcctcgacaggctccactccgagctctccggcgacttccgtgtaattagccctcaccctggcgacctcgccggcgggcggcggcgccattgatggactcgagttcttgattgatctccctctctctctctcttgccgtgcagagcgcgttgatgctgtggacgatggacccggcggcgcgggacgccaagctggccaacgaggccctgaagaagaagaagaagggcgagctccgccacatctgggtgctcgtcgaggtcgcctgcgcgtcgtcgccggaccacctcgtcgccgtcaggaaggcctaccgcgccgcctacgcctcgtcgctggaggaggacgtggcgtcgtgctcgctgttcggggacccgctcaggcggttcctggtgcgcctcgtgagctcctaccggtacggcggcggtggcgtcgacggcgagctggcgatcgccgaggcggcggagctgcacgacgcggtggtgggcagggggcaggcgctgcacggcgacgacgtcgtccgcatcgtcggcacgaggagcaaggcgcagctcgcggtgacgctggagcggtacaggcaggagcacggcaagggcatcgacgaggtcctcgacggccgccgcggcgaccagctcgcggcggtgctcaaggccgcgctctggtgcctcacctcgccggagaagcatttcgctgaggtaaattaaaatcgaacgtcctcgataacttaaaaacttgcttcttcataaccatcttaaaaaatactttctagcaaatccgtttttccaattggcactgaacgtttaataatttatcactgaattcacatatcatgagaacagactataagtgataaatattaatcatattttaaaagtgacaaattgttaaatgtcccgtaattcaaaacgcgccttaatactacagaacatattggagcaaagtttagccgagtttagttccaaactttttcttcaaactttcaacttttccgtcacatcaaaacttttctacacacacaaattttcaacttttctgtcacatcgttacaatttcaatcaaacttctaattttagcgtaaactaaaaacaccctttgactcaattgtcttttcgcgtcttctttaggcgaacattggagtaaagtttcactcaatattttttttttctcgtcttcttcttcaggtgatccggacatcgattctagggcttggcaccgacgaggagatgctgacgagagggatcgtgtcgcgggcggaggtggacatggagaaggtgaaggaggagtacaaggtcaggtacaacaccacggtcaccgccgacgtccgcggcgacacgtcggggtactacatgaacacgcttctcaccctcgtcggccctgagaagtagccatgtagcagcttggacattttattgcttgctcatttgatttgaacaaaatacaccgtgtgatgttgcagttattagtaaaatgcgagtaggatcgatgttgttttcgttgggtggattaataatggagcatgttttatcgcaccgtggtgtatccaacacttgttttcagacgatactatcgatgtttgatcagaatcaagccagaggtgcttgaaactagtgacaataaaaccaaagaaaaggaaaggtacatgttgcatccggagtaccatggtcatcaatttgttttatgcacattactgtggcgattctcgactggaataccacgaattgaaaaaagaacaaacaagccaaacatctacttggttactacatcagcaagcagatatcatctcacttcttccttgcagcaatagctgcaatcccaccaaccagaagtccaacagcagttgtggcgatgcctattccgatcagaccatctgcagataacgcatgcagatgtttagacagaattatcataaaataagttgttgtcccagtgaaaatgaggaaaaataaataaatgttcgatttgtgagacaatccatcacgtagctcaatacaaaaccaataatataggatataactggaacaaatttctcaatgtctcacctttggcaattttatcttctatagccttcctgagagacaaagcctgcctccaatcaggttgaatctgcaaggaaagtaagttatatagattaattcaggagataccaagccacaaaccaaaacatgttgaagcacaaggaaagcaagttacatataaaactcacgtttcagttggtatacagaacaagcacaatggttttacaaggatgctcacatgaaaatgttcttgcctactaagattaaaactttcaatcccatttgcattgtgaacataggtcaggcaagaaaacaatacaagcactaggaagaccaagtaaacattcccatgactacataatcatcaaaccaagcaaactcaagaaaacaatgctgagcaaatcaccacgatctgtcaacatatagcaaagcacagcacagcaagaaaaccaaaatcccgaaaaacatcttcagcggagttatgaagttgcaattatgataaagatgagcaatagcatattggagacaagcaattttataatttcagtttcagccaatgcccctaaatctctcaaaagatgcaaagaatagtaaattctgaaaggggctcgatgcattagcagctaaggcatccccaccaagcatgagctgaaaagcaatgagcttaaactcattaaccttgcttagctggaattgggttacaagtaaaagggtgaaattaacacatcatatcggagagcttattgatttgcataacagcattaaaactttgtgtcgactagtctggtgaggcaaatattttaaataacaatccagatcaacgaagataatttccgatgcctactcaattggaaaaaccagaaaccatacatagtgtagccaacatgtgtcaactttggctgtgaaaattcagtgaaaaaggatgacaagcttaaagtcaacctgacttccattgcatcatatggcacaaaaacagcactattacgctagcaatcgaacagacttgcacaaacaatttcaaagtttgttttgcagtcacctaagaccgaataattcaatgcaacactctatcctgttttgatagcacaaaaactaaatgacatgaaagttgcttccaggaaaaaaacaacaacattaaggaatatgaattataccaatgaatctacaagctaaaaatttgcacacatacctccaaacaacggtccacaagctgccgacttcttgggtagtcaccatttctgtagtgtccaaccgccagcagatatagcttctccctagtctgcagtgggctgttggattgacctaatgatgctgtgaaaacaaaacgaaattgatcaaaacagattaggctgcaaaaattatgtttagattatcgaaaacaaaacaagatatgagaccttcaagcatgcctattccacgatttacatcctcctggttcttggaatgcacgagggcccaagacagcctcataatgctatcactcttctgctcttcatttgcagcctcagctacctccctttcacagccctaataaagcatacaaccatagaaactctgagcgcgaacgtgtaagcctaaacattatttggaatgtatctagtaacaaacagggtaatgatttttttgtaaagtgagactgatatgtgcattttcttagccaatagttgcagtgatgattgaatcagagatagttccagtgttactcttcagattgtgaaccgctaaaaaggaatcaaaatcacacagctcaataaagagaagccgccttgactcatccgcgttgcaacaaacaatcacgcgagctaatcacgggcagccgacggcagcaccaccatgatggaacaaacaagccactgtaaatgggggcaggctgccatgccgcctaaactaagcatgaaaaccactccacactcgaccattcgctccccagtacaaccctccaatcctcggagttgctaatcctcaagcaccgcgcgggatctcccgctagaactaaaacctccccccattgaataaattaaattagaaattagagtactagaaaaaagctccccacagcaggggattcgaataggagcggagagaatggattctcacggcgatgatgtcgcgggtgcaccaggggatggtgtcgccgccggagaagaagctccccaccgactcgacgagcttcccgatcttggcctccatcggggagggggggtgggcaggggatcgggccgatctggaggaggagggagaggagagcaagcacggcggcggtggcggagggcgaggcgacggggccagcagcggcggatgcgaatccggtgggtgggaatggatttgggtgcaagtcttgagtcgcgtcgcgtgggttttgtattgtttgttcgattcgctgctgctgcttcttcttcttcggcgctaagaaagaaggggaggagaacttccggcgacttctgagttctgacttctcgccgtcgcacgtgggtcccgcgtttaagccactgtttaattcaacatagtcatattataatctgaattattagaactaagttgaaacaaatagatagtttattatgatggattattacaatctataagctatattactataatctggtaatccattaccactataaaggtgttttttaaatattatgggtgtagctatatttatagcgccatatttttcatcaaaaaatagtcggcatgtatttacattgtaagtccttaaattacatatgtaattttagtgtatttacaatgtaagtctcaaaattacatatgtaagtactaaaattacatatgtaaattcgaaaattacataccaattacatatgtaagtgtgtgtaaatgaggtgtaactactgtgtaagtggctgaaaaaaaatcgactgtaacatatggcgccatatttctagcaactccgaatattattgggtggctaacatttagtaacaaacaactaataattcagagtaacaaagaactatcagcttattttatatcagtttattataatataacttatagtagcctggcacagtaatcttaagttgaaacaaacatggtctaagttgattttaatttttcttaggaaaataagtgtactttactttttagcattagcttttaagatttatgtaggaattttataggattcaaatcctctcaagaattttaatttttcgtacgcggccatatgattcaaatgattgtagttttctaaatcctatgaaattcctatagaataacttagggcttattcggttcattagatttccaaattaaaagaataaaaaagtagggctgattcggtttgtaggattttcaaaacgtaggaatagtatagtaatgcatgtgcaaacctaaggattgaaaaacataggaaattttcctatggttgtgtagcaaacaatccaaaggattgaaaacattgggttggagtggattgttttttttcctttgttttcccttaaaaaagtagagggataggaatttttcatttggtgcattcctttgaaacgaatgacagtatagtacccattccaaaggacgaataagccctaaaaagattgggatgtcacatgcacttcatttcttagggatttttcgaagatgtctcacttcatgctaagaatcctatggaataaacttgcaagagcacaatccttaggaatttggtagtccattcctatgaaacgaatgatgcatataggaaaaaaaatcctaaggttttaattcctacaataatcctatgaaattcctctaaactgaatgagccctcattgaaggtagattttgaagaaaacttagcaagagcttcaacatcttggaaaatttcctctgattctatctctcctattcgattcctatatttttcctgcggtccaatcaaacggcaattcttatgctttttctatgttttgcattcctctattttaaacttgtattcctgtaaaaatcatgtgttttttatattcctctgttcttccaatcctacaattcaaatgggcccgaagttgttgagaatacacgtatatataagttttatcataaattatgttatatcactaataagtgttatgatgtataattaggtagaaaacagagtggtagtatttgttactccttctgtttcaaattgcggacattttgtgttttgaatagagacgttttaggttttgaatacattcgtgtatgaattaatgtattttctttatatatgaatctaaatttatatggatgttagtgaatctagataggccaaaacttagagcaagtttaatagtatagccaactgttggctccaaatcatctatagctaatctaatagcctattcatacaatagttaactataaaaatatactacaccattaataccttggtcccacctcttatgcacacataatgtcttggaatccgtgttgcagtcggctacaaatctatagtccactttcttctctcttctcttttcttctcgatatgtgattatagctggtttataacttgctattgaacctcttgtagtgtggaacagtgagagtatagataggagtatctctagttaagacatgcaacactatcgattggcgaaagttgattacatgttgcatagcttattagcgaaaaaaataatttatagataaaactcttatacatgttcttagcgacaaaaactattgataaaaatgaagcaagtcaactctaaaattaagttttaaattttagcaagggctgatatgttgtaggccatacggtacgactgatacctgaatctctcgtgtgatttaccatcatcaccatttggattttctgaaaccactcacctgagaagttttagggttattaaagaagtttccacgcgttcagtacttgttctttctttcgagaatgctccagtagaactgatactaagtcaaggtgattgactatgcatatgactgtaagttggagcaccctttgcacagacaatttcgcttgcagatcacatctaaactagttgtagtatttttcctttaaataagagttacaggcacctgctaatttttgtacagctgtttacaaattacaaatgcaaacacaacagctatgacgcccatggaaataatagccctggttgttgaggagttgggggttcaaaacctattcacttcaaaaacacccaccgcttttcaatgtgtagttcaaaggaaatactcaacattaacagatttactcagtgaaatggatggtgaacagaagggatatggcagaactcaaaatcttgatctcaggcactgaacatctatacgaagaaatcttcgccttcataaacacagcgaagattctgtggctttgccgacgaggagaagaaagattgatctagggagcagactgcccatggacgaactgactgatcgtgatgccttgccagcccaccccccggggttatggtatcatgttggtttcgacgtgcagacaacagctgtgaattacacagaaacttaagatctgacctcataccttccggcttgagtctgggctcgaaaacctttgtaaggagcattgggagtgtttttgacttccagcttatcaatttgaagcccagatagtgcaacccccataatcttgaatttcacctcaaacgttgggaatgtatgcaaatgagtaagcccttcttcaaggcgtaaattcccagagagagacggggctttgtcttttggaatctgccctattgtccaaaagcaggtctgcataaagaaagaaacatgtattatgcaagcaatatatgtagagcataaaaaacctatgtgtggtgatacaaagtatagtataaataactgacatttgccaaaaaagaaaaagcattcaagccccaatcttgcgtttactgagaacgcagatcctagctacatgcatgactactgatagaataggaggcatgaatcaaagttacagtactgatggggaaagaaggtattgacctggtcagcaagaatatcaactgtgccatagtttgcagtcaaatcagcagaagcaataagtgggggcaatcgaaactgcactgttatagaatcaatagttttcccaggatcatttttaatccccaccatcacattgacacggcaattccccgaatctgatgttaactgaggtttcacataaattggtgtggtcttcaatttcttaactctggtcattcatgattaaataatgagtaaaaataaaacagacaagccaaacatagccaacagagagagaaacagaaggaaaaataagagagcaaatatttatgcacctgtaactcatgagctcgaactgcccgtcagggggaacaaacgaaaggatctgattggactcccaaggtctgaatcggacacaagggtgaaacctcacatcgttgataattgtaggattagagaatgacaaggtcagttctggtacacctggaaggctagaatttacttgaattttaccatatgcttcacatttcactagagctccttctctgtaaataaaatttactgggatgtcagacatcaaaaacattctttcactatggtgcatgtcctaaggtaacaagatcagatggtgtcatgtgcgcacatgacagatggttggatctctccagaaacgagctacattgtgtttattcacagacatggtttcgttgggatccttactgctatgacaattaatgggcatgaactagatcacagtagtgaaaagtttgaatatgctatatagatttcagtaatagcttcctgcagatattaatagatgaaaaaactgttcaggcatgaatctagggtctaaaactcaaatttacagatttagtgaaatatatttggaatatcgaaaaggccaaggtgaaagtacctgtttacacatgcatctagttcttcaactatgttaacatagacttcattacttgcatccttgacaacagttgttctccatggtacaaaagaagcagctgcatctggaagtttgttaccaagattagaactcttaccagtcacaacattcaacattttgctgacaatatttggtggggcaatcatctctttcaagatgtttggctcagtagtgagtggaaaaccgttgtccatcatctcatctaaaatctgcactcatacaagtattatattttagagaatacacaaacatgaatattataaaatttgcctatcatggtcttcacaagcaactaaatatgctgatatttagactgcagcatgcagtctagatcgatgtttcacatatcaatagaatgaaaacaacaaagtgtcttgatcaatccacgtacattacagtagaaattattgctaacaagtatagataagtacttgtaaagttcgtcgcactggcagttgaagtatcaattagataagttgtaatacagagcaagtatttctttttatctgtgttgcaaacaataatatcattgttatggaacaagtgggatggcatagtagctgaataatatattttgtctaaccttaatttgatatgtaaatttactataacaattatacttttttatttacatagcaacataaaaaaaacacagcgcagcacaaacaccacaaactgagactaagaatgatatcctagttttgaacttgtaccatggtacacaactgtgtccaaaatctgtatatagagagatttaaaacctgtctgacatagtttgacaagaaatcttccagcaataaagtaaagtggcactgtaatatcatccaaatatttgcactagttttcaaatttcagaagactagaacaaggtgaaaataatataataggcaaccagctgcaaagttattatgtgatgtcacatagaagagcatatgaaaatagacctgatacacaagtacgaagttgtctttgattatgtcttcatttaaatctccaagatagtcagttaggacatcagcaacccgtgagagaaactggaagtcgcaaatcatattcacagaaccataaaaaagagcaaaagtcaaaacctgtagtcagccatggttcttggcatttcatcataaattactttagcaaattactgcaatgtgcatgtttcatggtagattggtaggacaattatgatagtgacaacaattttgtagttagttgcctgtttttactgataatgcttctaaagttccaaagttgttgaacacatcatttcataccttcaagaagctttcaagcatgacaacaaactttgataatatgcaaaacatgattccaaagaaaaattctgaaaattacatgttttacgcataccagaatggagaacattgttcaagctgacatccaaatgcaaagcatatttgataatatataattatatagattccaggatcttaatagatattatcaaagttctagaaataccgattctaggcaaaacccaccagtatgactagtattgatttcacaattattcttgctgaaagtgtgagtagtatcaaagcattcactatgctcagcaacaaataacaagtgatctctgcaactctaccctagttcaaactagctatcttcagcaactgaattatgctgtactgctgattttactaccatcacagagctcccaagcaagtaaaaaggagaagctaagaggataaaactcatacctcgatagccaacaacgggggcatctccacttgggtgcatgccaagaatgtcaccccatttcgataaacttgaaacaagtaatgcgtcggtgagaccaccacctgcaagaccttccaaaaaatcaaagcaacataatcagcagagctcccccatcaaaatctaacagctaaagcagcactgcatcacaacaaatcaaagctcgaaaatccgaaagcaacagccctgaggaagagccgaacatcaaccttggaagcgtcgccggcggcgtgggcgagcacgtagtcccagaaccagccgcagatgccgcggtccacgcggtgcgccgtcatctgcttctccaccatcacctccctgccatgccgaaaaaattgtgttcagtcacaaaatcaggtcaggacagatccggcgacagaggggaggaatcgatgcgaggaggaatacggggatggcggggaggggaattacccggaatcagagaggaggaagacgcactgcaacattctgctcccctctctcgcggcggcggcggcggcggtaccgaaacggaggcgggggatcgccggcggtgaggatctgcgacctcgctacgagcaagagagagcagctctcgcgctggaggagagttgagaacaaagagagcaattagtaggcctagcccatgggctaaggcagaagcccaataggaagttaggaacccagaccacgtgacccacatggtttgaagtggtgccaatgggccggcccatggtaccatgggggacc

SEQ ID NO: 6575 - DNA, 51472 bp, Oryza sativa
tattatccaaaccagagcattccaaaggtggaatgtattaatcaaccttttacgacgccaacgtagataaaacaatggccgggcccgacgaaacattgaacttatcctttcgccgaagatgaaagacgatgcagccccgcgtcgggtgccaagttccgccagaacgtaaaaaacaaaaagtagaaaaggtaaaagggggcgatgcgccgaattgtattgatcgtagcgatagattacatagactccaggtgtacatatttatacccatgggttgatacaagtgcttgtcggacaagaaagaaactaacctaaagataaaaggaaaatataaagtccttatcggacactaaacacactttcctaaagataaaaggaaactaacaaactattcctaattaatagataaattgccatgccgcatcctctttaaactcggtcacttagagataagcttcctttagtagattgatttccttaaccgaatatagcaggaatccgattattggcgacttgataactcccatcggctgattccaagatgctgcagccgataatgattctaagcagatgacatctttgccgattacgaaatttcactgttaacacatgccccccagttttggagtatgaggactcatgctccaaaattctcttctgtctgatcttgtaatcggctttcatgagctgatactgatgtgcttgccccccgagccgagattgaatgatcttggcattgacttcttcttcagacatgtggatataaaattcatggtcccactaggcgtgccaatctgtgttgacgaaaaaaaatcaaacacaccggcctgggagatctgcttagctccagtgcaggtccgaatatgatgagatgcgggcgtgccagtcagtttgattctgcaactgacaagatatgcaaatagtagatcaaaacagccgattggctgacaagccgatggagtagttccagccgatagccgataacagccgatgccgataccagccgatagcgatagggtttaagcgatcggctatatgtccaatgtagataatgatataaaggcaatcggctgatgatgatgtaataaaataacaatataatccaatataaaccaatcggctagcaatgatatgataaataagcatcgatccgaaggttaaagcacacatcggctggaggtccgatgtcatgaaatccacaagattagattaaacaatgaaacctttgttgtcatcggctaaatccaacttatatgtatatgcaatcctcatgagccgatgcaacgtccagataactcaccgactgaaaccccgatgaaacccttattggcaatcaataagcaggctagagattatggttctaagcacgacttagtagataaaacttaactgatgcagcactaagtatgaaaagaaacataatatctagacaatcaagccgatgactgattttcagggtggtagatgcctaagctaatctaatctagcaacgcgatttagccgataccggtagaaaccctaaaacgagaagcagccgatagagctaaattgatatgctaagactagattaatagagacatatgataaataggtaggcaaatatatcatccaaaccagagcaatccaagaggtcgaatgtactgatgcagccttgaacattggacttatcccttcgccggagatcgaagacgatgcagccccgcgtcgggtgccaagttccgccggaacgtaaaaaacaaaagtagaaaaggtaaaagggtggcgatgcgccgaaatatattgatcgtagcgatagattacatagaccccgggtatacatatttatacccatgggttgatacaagtccttgtcagacaaaaaagaaactaacctaaagataaaaggaaaatataaagtccttatcggacactaaacacactttcctaaagataaaaggaaactaacaaactattcctaattaatagataaactgccatgccgcatcctctttaaactcggtcacttagagataagcttcctttagtagattgatttccttaaccgaatatagcaggaatccgactattggcgacttgataactcccatcggctgattccgagatgctgcagccgataatgattctaagctgatgacgtctttgccgattaccaaatttcactgttaacagtcttctacccttaccagccttcaacaaaaccaagtctggcacatagatccttttatcacccccagtttcgactaagtgttggagggacctccacccgaggatctcagcactccatgcattcagaactctatcctttaggtagaacgtcgacacgtatgatgttgaatcaagcttaattttagcgcacgcggccaggacatggctacatggcttatgaagaagcttcggcttattgcaaaagcacgaacatgtgttatcagattcgtgccctagagtaacttcatgcgtgatgaccccattagaagatccaaaaccccccttagtgcgacatgtgacttcccaccttcgtctgacgttcccagtggtaatgaccgtgtgaaatcttgccttctcagtgtcacgcccagaaattcccgaatagaattccaagcagaatgtgcattaaaacccccgtccaggaccggccggggtacacaaacaacaaagttgacatacagatccacgtcttacaaacattataaaagtcttacataaatgcagcggaaaattaaaagataactggagctaagccttgacttggaccgcagttggaacaccactccacaggcatcctcgacggcacggacgaagcctattcctcggagaagccgccatctgacgcgtactaaaactctggggttttggggaaaatagagcaagactgagtacaacccccgtactcagcgagtcatatcggaatagagggtatgatgcaggatataatcgaaggacagcttgagcggttcatttgcataaagcgagcatttaaagacggtagttgaaagcagtaaaacagttgtaataattactcaatattaaccatcaactgtccaacgctacaccacattgcgacaggcccaaccatccacctgaattaatcaattccattagactagactagggtgagactaatcacggtgaatctggttgactgcccataaccgcgggcacggctattcgaatagcttcactctgatcagaggtgtacaattgtacccacaagacacagccccatgacacgtttccgtgcaccgacataccaccacgacataccaaaaagaggccgtgacaggacccttcgcataaccccctctagccaagcacaccacacctcaggtttcactcccgtccccagcgggcaatgagcagtcccctctcgtgcctaggtaaattcggaagcgacagaggccgtcgtagggcccgccccgctccatcatgcccacccttgcctgaatgcgtcaactagaggaaagctacactacaagcccagccgttgcccacgctggcttgtggtaagtacgaggaatttttccagggtttcccgcgaaccggtccttaagtgccatgggcgcgaccatcaaaaccatgcacccacagcccaccataaggtatattttaattgactaacaccaggacggtggctttaatccaacaccaacactagaacctgaagtctatgaattaatgtgatttcccccacggtgtgctagttaaactaagcatggctaagcaatccctagtccaatctctagtcatgttatatcccaagctaacaaaggagcatggtacaaaagtagtatggctgtaacagcaggtaaacatctcatagtattattataaaacaatgcagtatttaaaggaaaatggtagagcatttgcaatataggatcaacatgttcaagtgacaagcatgacttgccttgctctgctgctgggggaacctcggcaactatttcaaagtacaccggagcgtcgggagagccggaatctaagcgacatacaaaagcaaacaatacaaacaagctataagactactgaaacagagaacaaaaccatttttaatggattctatgcatttttcttgatttactgagacttgaatgggcttaaatgaagctcggatgaattagatatgaattttagaagattcgctgtgtttttactataaccagaaaaatccttaattgatttattccgcaataattaaaatccacggtggaccgggtccacggaccggggaggagcggcgcaccacgtggtgcacacgtggcgccgatgcggcgcacacatggcggccacgtggcagccacgcgggcggcggggttggacggccccgatctacccgagggtagatcgaatggcggcggaagcgcgtggccggcgcgcacgggcggctcaaaccggcctggcggccatggcgcacggcagcgcggctcgacgtagcggtggcgcaaggcggcgaccggccggcggcggagggtggcggcgtcgcggcgacgcggacggcgacagcggtggctaagcggctaggcggcagcgtggcggctaagcggcgagagagagagagagagagagagagagagagaggaagaggaggaggggcctcaccaacgatgattgacgacggtgagcgacggagggcgatggcgacggcgggacgagcttcggaaccacctagcgaacacgaagaaaggggttagagagagaggaagatggaagagggcgaggacgccagctgaaggcggcggccatggcggagctcaccggcgcgcggtgcgaacggggttcccgtggcggaaagcggcggcggagaggcggacggcgtggccctcgggcttgcgaacccgacagcagctcggcgcggctcggcgcggcggctagcggctaccggagcggcggcggtggcggcggagaggagggcgacgacgctagggcgatagaggtcacgggagagctcggcgaaatggagaaaaagagagaggggagagcggggatgcttaaataggggaaagagggctcggacgtggccaggagcggcccgatttcaccggagtagtgggaagggggagagagggcgtggccggcgggattcaaaattgaatatcggccgtttcggcgcgggcgcgggcgggagagagagagggagtgggcacggggtcgcggggaaagcaggcgcgggcggcgacgtgggcaacgtggcccgggaggcgcaggcgcgatttggcggcggcggttgcgggatgcacggcggcggcccattcgaaaaagaaaaaggggaaaaagaaaaagaaaaagaaggaaatgaattttcctgggattaaatattgctccgaattttttattcataataattaataatgcagaaattaaatatataataaagcaaagtcaatttttacgaaaataggaaggacgctattgcatagggcgtccaggtgtggacgctgttgtagacaatgtccagatggggacgcttcttacaagggcgtccataatgctgcagttgaagaccccaaagagccgtccaattcaccggactaagattggactttggatccaatcacacaatggtcgaactctgcctcgttactcctatgcagactattgtctctcgttgattgcttgcttgccgagcaggcaccgctctctacctgatctgccagacagggtcgccatcccccggccctccttcaatgcttccactattccacatgacggacactctactcggggtcatatgtgaacagccaccacttttattttgagatatttgattagtttggtttttgttctggtccattgtttactacgcatcgagctctctgctgactgaatcttgagaagcggtcgccagatgaactgcatgcgatgtcttcgatcgatgctttttttttccttttgcaacaggccagagattggaagtcatcgggcgacagatgatctgatagaaggaggatgtttgcgtcgtacccttcgtaattttgcattctttctaaactttctattgcagaacatatacacctgaataccaagatctatgaattgagcatacttgctcggccagccacctggagtgaggcgatgcctggacttgctggtaggaaccaagaggggcggacagacgacgcagcacaagccggcacgagtgggtttttgttccagcatgactcaaccagaacgtggatagcggctgcgacctcccggcgtgaaggcagaaagcggcggcgtcctctccggattcgagagccttcgaggtgagttgaggtgaactgcaacggcagattcctgacgttgtggaggtggaagccggaaggcggctattgcagtctcccggagtcgaggtgaacggcgggcatggcaacaccttgcccgagccctgcaccaacattgggcccgagaagaggagagtcgacgatggcgcctctccgcatggcggcatgggcgccccaaactgagcctggacgtgcttcggtacagcgtccacctctgaacacttcttagaacagcgtccaaatctggacgccctttgaaacaacgtccatcctatttttacaaattcaatttaagatttaccacttatttaattcaagacttattaattactataaataaaaaatttggaatattgcttgtgctcatttttaattggttaaaattatttctaaagctttgaaaattccactaaaaatcttgttagcatatttcgacatgtagaactcaagaaaaattccacatgccaatttcgattattatttgcattaatttattagggtttcactcttgctttcacaccggtattttctcgaggtgatttataaattcaatttaggcttgggaaaagaacttcagggtgtgacactcagccttctcttggaggtactctgccatctttttgcagaaaggtgtttgtgtgttagacatttgttgcaacgctatggcccgcctcgtcctcatccacatcgttgtcctgtgcataatgccttctacaatagcagttagaggtaaaggccttaatttgcgaagaaccgcattgtacgcctctgcaagattagtggtcattatgccatgcctagccccattagtgtcatgcaagagtgcccacttatcattcggcttgcactcaatccaatgggtaaagcatttgatattctttgatgacctacgcttctttccatttgatggaataagatcatccattggttccagggcctgggggacatgtacatcctgcgggttgttgttggtctgctttgaccggatatgtgtccttgtcccctcgtcaagttgttttcaaagctcatcgaactttgtagactgattttccttgcacaaccgcttgaacatgttcatcagccgccggctgttgaattgtttgaaaaaattggcccccatgtgccgcatgcaccaacggctatgcatgtcaggccagtagtatgcaccatcaccatcctcctggagctctttgattgccttcaacagaccggcattccagtcatggatgatacatatcgatgtgtgtttttgcaccactccccacttaagatgttgcaagaaccacaaccagctttcgtagttctcgctttcaacaaaagcaaaagctaccggaattatctggatgttcgcatccgcaccaatggctgttaatatctggcctcggtacttcccagataggaaagtaccgtcgacacacagcaccggcctcgagcacttgaacacatgaatgcatgctccgaatgcaaagaatgcccgttgcatcacaagataatttggaggacgaattgactcccaatcctgcacagcaacataggtcccagggttcctgctctttagaatgtttagcatctgtggcaatgtgtcatatgcttcctcaaatgtcccatatcttttctccatggccttctgcttcgccctccaagccttgtggtaactaattgtgtattgttcacctttctccaccagttttattatgtgccgcacaggcaggtcatcaccttcaataatttccttgtagtacttgttcgcgacgtacgccgcggtcaagttgcggtgcgactccctagtattccgaatcagacaggagtgttcctgcaatttggacacaatccagtaagactcgtactttggcacgtgaccatgacgaccgtgtactcagtcttgttagacttcacaaccctgaactgcctttgcatctagaatgaccatgacttcactgcgtcttgcaacccaattttgtcacggaacattgcacccagattgatttggccatccccgtagaaccatattgaatcatgacaagagttttctgcaatataaccagggtcttcaaggttccacgaagcaggcataggtacttcctcaacttcttgttcatcttcgtcatcattctcttcagcagcgaggttttcctcatcttcgactgcatgtcggtccaccctctcaatttcttcaactatagcaggtatgtcctccccttcatcggcttcaccagttggatggcggttgaccacttcatctccttgtatggatagattttgaatgtcaggaccaacatcgccaccatgatggggagctacaacttcatcttcttcgtgtgaactagacccatctcctcacgattgttggattgccccgctgcgctctccgtggggactcttccttgacatgcttgcaccagcatgacatattcatatccccgtctcctacagccagcgagccaatcctgccaggccttactccgtgtcacattttttaactcccattttatgttgttggccgatcggctccacataaccctcacgttaacactatatatacccggatctaaagaaaatgtgctagttaaccagtaccaaacttcgggcatggtaagtgtgtcaggatttggatggtatagtgtgcattgcctaaagttgctcagatcgacaccactttcattttccataatttcaccttcaccgaaatacactctaaataccgacattcctgccattgtagaaaacacagactactccgtatggaagtcttacagaacaaacgtgtcctattcacgaccaaaattactttacacgcatactgtttttttgaataaatattctttatcaataactacttacttatatttccactgtatttaaccaaaaatcatgtacttgtaataaaaaattataaataaataattacgtaaacataaattatttacttacgaatacatgacaatgcaattcattatttataattgtactacaactttgacataaaaaataaacacatgacaataatattaatacaaattaattaattaaaacacgtaattaaacataactatggcaattaatttaaataaaagagtatgtaatacttaaaacaacacaaccataccatatcgtacataaatatgaagtctttaatatttacctacgtttatcagatcccgcctactcctttataaccagcttgctcgtataacaattgctgcctcaaagtttagttcactgcataatccatatgtttaactaacaaattaattatacaatcaattaagtttaatacagcaaatgactacttgcaccgaagaaacattgacgaaagctaagttaaaaatcattttggttagctctttctattctttatctaggacaacgacactcatttagccgcatcatgttctttgctacagactgtttgtacatacttagatatgacctctgaaacaatactaatattgcaaatttggatgagtacatttaatatattagaactttaactataaattatataaattatctaacggaccgtaactttacttaaatacaaaatatttgtaactatcagttagtacaaaattatctataaattaatcataacatgataaattaatagaactaagttcaacttcacttcattaattacataatcaaattaatcataactaccaatttattatagtttaaaactagttgccatgacataaatttatttaactgcactttagttacaataccaaataaattacaaactgtctattaattacaaattgtcttccattatagtaccataccttgtcttgccttcttcttttcaaccaatttgctcatataaaagtcccaatttcaaagttcttcgtactactgcatttctttgttcattcataactacctacaatgttaagcatgtgtttaagcacaccatatatttcccgctacttaacgaatatttataccttttccatttcttactaaataaataactacatgaactactaattaattgtaacttaaaattactacaaattaattacaactttaatttaatttttctaccacatttaataattatcaatactattaatatcaatatcaataactacaaatataactattgatatttcagtttttttcatttgttacatataatattggccgtatatataaaattaaacatcacatgaactactaattaattttgtcacataattactactacgtaccaattaattgtaacttatattatacttttgtaccttataaattaattatgtctacctattttttaacccgaatcgactctattaactttctacatttgtatttttacatacgacctaacaaaatataatgtagtactaactaatacataactaaatttttcactaacataattaaaaacaaatattaactacgtgaactaaaattttctaaatcctcatcgtatgaatttgtcctaatagaaaactaatcaacttacgtgtctttttttccttctctccactgcctgcactgcctcctctcttctcttctcttgctctgcctctcctcctcagttcattcccttctgtcttcctctgtgaggaccatctcctctcctctcaatttaacccgtgagcgcattggattcgatcgatacaacgcttacaaatggccggcatgatgtgactaaaatagtaaactgataagagtgcactgagctcctccacctctccctaaaaagctacgcgcatgtggtgtcggaaaagcacaaaaaaaaacccgtgcaaaaagcacaaaaagcaaaaaagaaacagggatgggaaataaaggtatcggtggacgctctcgcgcatgtggagcgcgatagcgagggaggtctcgcgcgcacatactgcgagaccgagcccactgccgctccctctctacagtcgctctcgcgcacgcctaaagcgaaaccgcgaccggtctcgcgctcccaaagcgcgacgccgcgggcccaccaggctttctctctctcgcgcatgccgcgtcatcggtctcgcgcgcgcaaagcgtgatgccgcgtgcccacgtctcccccgtcgcgtcataaccggtctcgcgatttcatattacgataccgacgtcggtctcatgcaacaaaagtgcgagagcgctggctccgcccgaggtagtcgcattgatttctccacgtggtgctctcgcgcgtgggaaaagcgataccgctgcggtcttgcgtctcgtttgcgcgagagcgccagctcaacttcggtatcgctctttcggatagcgatttcaccacgctatcgcactttccaggagcgaacatcggtatcgctcttccagatggtttatttctgcaaatcgtttgctatccggcatatttttgcacaatcaatcaaaaaacagtttaatttcaaatttttttctcaactttgtagatgataaaagcgtgcttttgagaaaggttgagatattaaatacataccggtggaggggggttgaaagcattgtacggcaccactggcagcaagtgcgagtagctgactacgattgcatttgagaagattttatacattctctccttcataactttgaattcaagagattcaggatcttcacggttagggtcatgcttgccgtcgaattcaaaggccgtgcgagatctttccttgattggggccagccggctcttgataaaatgctgggtgatctgttccccttgcagaccctgctccttcagcttcagtatacgatccatcagggcaagcgcttgagcagcttcatctcccattggaagtgagttccaagtatcttgatacactggaggaaggcaggagtactcgggaagagctggttcgggattttgtactggggtttgaggaagaagatgcgacagaacagggcaaaatgcggtcttatacccaggaaagcctcgcaagcatgaataaaattggcaatgtggactatggagttgaggtttaggtgatgcaaactgatcccgtaaaaatccaaaatttcccggaagaatcttgaggttggaagagaaaatccgccatagaagaaatgagaaaataccacgacttcacgtgtgtcaggggttggaaatgcttcgccgcacgccggacgacgcccgatgatttccttcgccggaagaacaccgtgtgctaccatttccttcaagctctcctccgtgacgtcggagggcgcccattgactctcgaagctttctctctcctccaccatggatgcgaattggatgatgcgatttgctttcgaaatggctgggaatggatgggggatcaatgcggtggatgcgcggaagatttctgtggagttttggaggacggatttgagcgaatcggtgaaccctagtttcgccggtgcggttttgcactgtagcggggaatggggaaagtggcgagagtctcggtggggaagacgaagcggtgtttggtttttggtattattagggtatcgggagtactaatgggcctaggcccggaacagtacttcagcccatttctttctatcagcgtggctaagttgtgatccttagggacttaggctttttgcttcggtaatacttgctcgcaacattgtagcccaatgctgctaaaatcctttttgacgcagttagataattccttggaattatcatgatgcaaataaaaaggtgcccgacagaaaggtgttatacttcttttgtaagcctttttaggctgcaaaggctgtttgggttttgttgagatgattggtttttgaatagtcattctctcggcatgttatatgcttattttgattatggcgtgagtcatagcctaggctatttcgactcatcaattgtcatgatatcatatttataccacatatgatggatctttgagagtttttactcggatttttgtcatatgtgttgatttatggacctttggagtattttttactcgggcctctttatatctccatttttggtatattaaagctaaagcagtcgggtggatgttttattaaatgtcacatgtgctcggctgtgttattctttggaacatttggttgtaaaaccactcggttggatgttattcgaaccttgactatatgtttagtttttaactaatcacatagtcggggctacacctaattaggtgcatctagtcgatgcacccgatttttttctattttcagaccttcacagtatttgattttgatactcggagatcagggcagaagaagtcggagtactcagattttcgttttggattataagagaagactatttcgtcgactggaaaggtctcaggggctactgtggagattatggataccccatacctacacggcatgtatagtccgactgggtatggggtgtcatgtatagatagaatatctttaaaaggactcgggttcaattctaaacttgtatgtcaaggaaatacccgagatcgtagtcggttacgattgtattttatctgtaactacctatttcgttaggaatatgggctgtgctttgtaatacggaccccttcccctatataaggagaggtccgggtgcctttaggggcacgattttcacccagatcatacaatcaataatatactcggcggatcaatccctggacaggagtagggtattacttcttgattaagaaggcctgaacctgtataaaattccttgtctcttaacccatccacttttccagcttgatagccacccccttttagtattgccaaaatcttgtttcgacattcaccttgatgtaattgcagtatattcgtcatagtatttggttatatcactaatatattttttctaataatatgctcccatctggtctataatttttttgtgcactcatttttatttctggtctttttctttgtgaattatgagacccactgtacattcgattgctttttaagttgtgttatactcctctgtaaaaaaaaacagttctggggatgtatttggtcaatgtgtatgtacagatacatcccttggattggacctttttttcgaaggtgggagtataactttagttgattcgtccttcattttgtagatttattaatattttgttttgattatccatcttcgttgacaaggtaattaagatgaaactagccatacacttttcatctccaattgattcattcattacttggtactatgatgtctatatttctccctaaaacattttttctaatttgaaagcaatactagaattgggataagttatatcgatgacattattatctttcgactgttctgactaattatgcatcaacattactttatcatagtttatcacttggttcacttcacacatatatcttataaatccgtcatatttctttaccttttttatcacctcaaatttcatccaaaagttgcttcttcaaattcctgcagcaacgcacggggtatcatctagtttatactagctagttacctgtgcattacaacgggttatcctatcttactataaagttatcctccactaactccttaagcttgacatgcaaaaatgccacatcatcatccactaacaagatgccacatcatcatccactaatccataaattaacaagataccacatcatcatccactaatccacaaattaacaagatgccacatcatcatccactaacaatcatcacatttaaacatcatgcaaacatgctatatctttatagttattataatttaaaagcttttcaaatacaaacatgttaaattatcatccaacataattcacataatgtttcaatgtatatctttattatattttatgatatcctatatacttatatagttcatcctcacttagttagtgcttaaatgattaatctatggtccaaattatttttctcattttttcctctaattaagtcatatcacatcaattgtttttagcctttagatgattaatctacagtctaaactatctccctacttttcttcttccataaagtcataccagcttactttttacgtttgaatcaccattctacatactatttaaatttaaattatcataaaccatattaatttacttaatctgatgttatctagctatcttatacattatttttttttgttatcatactaaattcccgcagcaatgcgcggggtttcacctagtttaaattataattgagtattattctcatacttatatataagagtggtaactcaaaattaattatatgtaatagttcttatgagaatgttggggctgcccaaaatcaaacaccacatctctagaaattaactgtagctttttgcaatttatccaagcatcactaaaatattatcggtgttggtgccggcgaccggctggtcagacatgccttgctaaaaggataccaaattaccaatctagatgatctttgcgggtaagcccacctccccgttcgtctattgtttggtgatgacgcccaagagtgagaggtccgaccattgggccatgggttcctctgtaccgtcaccatggacatagcccgcttgacacaagtaaacaatgtaaatagaaggtaaatggtagcatgataagcactgcactagagcttcatcaagtatagaagacgatgtgaatttgaggtgttaacaacaacaaaccaagtttgaagttgcccatcaaaacatcactttgactaaattttgcataacatgctttactaatgttgcgtaagatccaattccttacggacaagaatatttccaacaatccaatgagaagacccattcaactatagtgcattctaaaactacatgttttttgttttgtacatagtggctttcacaatttgaattcacaaactacagtgagcaatgcattcttattcatttaatatggagaccctctttttgtacaccttagttagatgcatgggtaagtgattggtgacacttatgtactcgatataacatttaaattctacaattcttcttcactagctgtctttgattatcttgtggttcaatcatgacattttgagaaaaatctcatcggctcagaaacacacttgttgtccgtcagattgatgtcagtgcatcatatcaaaatagaggaatgcaaaccacaagatttgactcacactacaaaaagctaaaaatacatatagatggggttatattctctttaggagcatgactataaaaattgaaaaactaacaacaagataaactatcaaaaaaataagcgtgatccaagaagtttcctctcactgtacacttgttagctgaaacaaattcaacttaatagtttgtaggaaagtatattgagaaagaaataaactatgtgttaacaaccaaatttggcgtcgacactataccattctccgaagcaacaaaacatattttgcatatggatcagcatttgtctgcaactcttgatccattattccattagtccccccccccttctctcaggagcatcagcaccaccatcataatcaacactcttttgtgctaatctccctaacacattcccattctccttgtagtaaggtctttgaccatagacaggggcggagctacaatgtgatccctgtggtccatggaccactatagaaatatggcccaaggccgattacccctatgcatttctttagaaaaaatatcggtgggccatcgtttttttgctgaagacatcgcgtcgcttcgtttttttcgccgcaacccgcatgacgctgcatcgacgcacctcttcgcctcctgccttcggtgtgatcgccagcgatattgaggggcggagcggcgggcggcaaccagcaaggcaggtaagtaggcaactacggcgtcagtgtcaggccatccatcggcacagcaagcagcaggccagccgccagtaggttctcatctcccccattatccctcgtttctcttctctcctttatcctctattttgatttaggtcagcagccagcaaccattaggcctaaccttaggtattttgatttaggttcaattttattttgattttaggattttgaatagtattggtatgtaaattgatataatcaacacttttatggccaaaagaagtagacctgacaaaaagaagtagtactattttcttcttcaattatcatggatgtgtaagttacatttaagtaatttttagacttgtttatcttaaaatgttataaggcctttattgtttgacctgaatgcgtttgataaattttatctagagtattaaaaaaattattttgtgttggaccaccctaccttaaaatcctagctacgccactgaccatagatctcacctccttaggagaatgcaagctacaatagctagaagaaagcaaatccacttaatagcagttgttaatagtagtatagattcgatgtttgcttaacttttttgtttagtacctcagtttcaggtaataagagtttctagcattacacacattcatatagatattaatgaatctaggtacacatatatgtctagatttattaacatatatatgaatatggacaatactagaaagtcttataatatgtaacggaggaaatactaattatcatctttttgctttttgtttatgtaactttttgcttaagtgagaattattatcttgttgctagggtgacctgatttagcaattaatttatttgatgatcatcatgcatgttatagataaattcagacattaattgaagaaaataaaaccaatacaacttttgtgcaaggatgcttatgagctaaaatccaaacttatttctatttaagagagtagtttagctgtgcagaaacgttttgtagaaacattggttatgatcttccaaacgtttgaacaacacataacacaatgtaacagacaggtgtgggagttcgagggtagcttattgcaggctttgttttgctagcgatggtgtggtcgtcggatagatatgaaccgattcagctcaagcatgtccatggttcagctaatgcatcacttattaacaagaggttagctcatgcctatctgtttcaaaacaatctaaagtctaaagcatgcaactcaagtgcatgaacaaacaataattaacacacatcctacatttctaatgacccaacaaatcatataaataacatcctaccatctcaaaagcaacaaaaaaaactgcattacttagtagccattcacatttgctacctcaagcctcacacctttttccagcaacacatcaaccacaacaatggctccatgcaccaccccgaagtgtagggccatttgctgcccattgtcccccgtgtttatgccgtctccatgctgcccatacaaaacccattagctaaaaaagggacatagcaacaccctaatccgaggctagcagtgagcaaacattatagcgaagactgcgacatcggccggaaccgaccttgatgatggagaatgcgacataggggtagtggttgggagcggcgtcaattacaattacaggttatggctaggtaggcgattaggaggccacactggccaccagcacccccatggcgtgctgtagaattagcaccattggcgttcgctcctctggcgttgtcttcaccaaagcgcaagatgagttagagtcgatgtttgcctcatcaccgtagaccacgagaccaagcgacaacttcaggcatgacgacggtggaacattgtcccaggaataagctagctacaaagctcaagatagatagaatacaacatcctatcttttgcgtgagtgcggcgtcggttggtatgcgcatagaaaaacatgagatggtcaggcatgcacaaacatagtgtctctggtgcacagtcacacatattttggtggctttgttggatgaactagttggccacctcttgaaagttggttgtgatgttacagaagattctcttgcatgcgtcgcatcacatgaactaagtcgagacttcgatggtggtaatgccatggtgatggattggtgttcacctgcttggttggtgtcgcaaggatatggtagattcagaagaaagttatcatcgtcgttgttgtttgttgttgttattgccactgccgtttgtggtgtttgtagtgttggcaggtggtgtggcgccatcatcactggtgttggtgctagagcttgttgtagatgcattgttgcactattgatgatgatattggaggtgccacggatttgctggtgacattgaagttccaaagaggttgaagcatgggtctactaggaacctgggactacaccactagggatagagccactcgtgtttgacgagcaaaccggtcgccgagagcacaaaagatggactcacaaccgcatgctcaatattagggataggtataggctatggctgggcaatcgatctggagaccacaccatccgctaacaccaccacgacatgctgcaacattgctatcgctagcgtccgctccttcagcaacattttcactcgagcacgtgagttagaactcagaatcgatgttcgtctaatcgccgtagaccatggaccgagtgacaacttcagccacgatagcagtggcacattgtaccaggaacaagctggctacaaagctctagataggtagaatacaacaatgtatcctttgcaccagtgcgacgtcgattggtatacacatagaaaaagatgaactgatcaagcatgcacaaacccaacgcctccccaagcagtaggaacaaccagttgatatgctccttctcggccgcgatcacccgatgcattcattactattcaccgcaagcacactgagatggctgggttgccgatccagagaccacagtagctacaagaaccccagggcgtgttgtagcatcgacactgttggtatctgctcattcagcgacatcttcactggagcgcgggaggagtcggagtcgatgtccaactcgtcgctgtagaccacgggactgagtaaaaactttagccccgatggcgaggtcagatataatatcctatcctttgtgcgagtgcaacgttagttggtgtgcgcacagaaaaatatgagtttatcaagcgtgcacaaaacggtgtcccccatgcaataggaacaacatattgatatgctcattctcggtcgcgatcaccgaacgcatttaattctggtggtcacagttgtcgtagtctggtatgttgggtttcatccacctgtccggtgcatgatcacacatgttttaatggttttggataaagtggttggccacctcttgaaacttggcaatgacgtgatcactggagtgaaggaggagtcgaagtcgacgttcgctgcatcaccatagaccatgggacagagcgacaacttcagccacgatgatagcagcacgttgtcccatgaataagctggctacaatgctctagataggtagaattcaataccctatcctttgcgtcggtgcgataccggttggtgtgcccatagaaaaaattgagatgatcaagcttgcaaaaaccctatgtttacccaagcaatagaaataactagtttatatgctctttcttggccataatgactagatgcattcagttttgttgcctatagttgtcatagtctggtaagttcggtttcatccacctctctggtgcattgtcacgaatgctttggtggttttgtttgaagtagtttaccacctcttaaaacttagcttctatgttgtagacaatctccttgtgtgcattacaatgccttcatcgagccaagcctttgatggtgatgatgccacgttgagacggctcaaagatggagtagtgtttggccttttggtttggtggctcaaggatacgatggattgcaaagaatgttaccattgttgttgttgtcatcgttgctgccaccgtttgtggcgttcccaatgttggcatgtggtgcagagacatcgtcgccgctactgcttgctatgaatgtgttggtgcgatgttgatgataatatgggaggtgtgatgagcctactggtgacgttgaaggtccaaggaagttgaagcatggagctaccgaaactatttcactagggatcgaaccactcataccatcggtgaataacaccctggcggccatgaaagcagctcagtcattgccatggtgatatacaagcaaaccggtcatcaaggtcacaaaaaaccgagccactaccgcatccttggtattggggacatgtacaggcgatggctaggtagccgatctggagactacattgactaccaacaccctctcggcatgaagcagcacatgcgtggttggcgtctgctccttcgacgatgtcttcactggagcacatgagtattcggagtcgacgtacgccgcgtctttgtagaccatgggacagagccacaacttcaaccacgactacaacgacatgttgtcccaagaaaaacttgttacaaaggtctagataagtagaatacaacacctatcctttgcgccaatgcgatgccggttgttaagcacatagaaaaacttgagctaaccaagcatgcacaaacctaacgtctccccaagcagtaggagctaccagctgtttgtctccttctcggtcgtaataaccagatgggttctactcttctggtcatagtcgtcacaatctggtatggccgggttcatccatctcgctggtgcatgtcatgcatgggcatgtggtttaggaggaaatagttggccacctctcgaaacttggccataatattgtagatgaacacttgttcatgtcgtgtgcctgtgctgaacctcaccttcgagtgtggtgatgccacaatgagaaagctcgatgagagagtgatgtatggctgcttttttggtagcccaaggataacgttgattcatgagggctctatcatttatagagccaacaccatttgtcattgtcgttgttgccaccattttcaccgttgccaatattgccaggtgtatcagctgcactaccactagagtttgtggtggacgcgttgctgcaacgtcattggttggaacatggtgggtgacacacatgcactgtggaggattggtgatgatgttggagttgcaacgacgagcctggtaacattgaatgtgcaagaaagttgaagcgtgaggctacttggatggcaccattgacattccaagacactaggattggaatggggatcgaacctcttgcatcacgtgtgaaaagatgttggtatttctgttaacagtgaaatttggaaagtccctaagagaattatcgcatcgccaatagtcggattcctgctatattcggttaaggaaattaatctattaaaggaagcttatccagaagtgaccgagtttaaggaggatgtggcatggcaagttatttattaatttggaatagtttgttagtttccttttatctttaggaaagtgtgtttagtgtcctataaggacattatgttttccttttatctttaggaaagttgctttcttgtcctagaaggactagtatcttcccatgggtataaatatgtacacctggggtcgctgtaaactatctctccacgatcaatgcaattcggcgcatcgccaccttttaccttttttactttattttatcgtccggcgggacttggcacctgacgtggggctgcattggttttcgatctccgtcgaaggggtaagcccaatgttccgccggccaaggcaattgtatcatctacgtcggtgtcgttcaaggctgcattagtacattcgacctcctggattgctctggtttggttgatatatttgcctggctatttatcatatgtcctagttaatctagtcttagtatatcaatttagctatattggttgtctctcactttagggtttctaccagtatcagctaaattgttttactagattagattagctaaggcatctaccaccctaaaaatcagtcaacgggttgattgtctagatattgcgtttcttttcatacctagtgttgcatcaattaagttttatctactaagacatgtttagaactataatcccgagcctgcttcttgactgccaataagggtttcattggggtctcagccgatgaggtatctggatgttacatcagcttataaggattgcatataagttggatttagccgatgataacaaagatttcaccgtttaatctaatatgtggattttatgacatcagatctccagccgatgtatgctttaaccttcggatcaatacttgttctattatatcattgtttaccgattggtttctattggattatattgttgctttcttgcattatcatcagtcgtttacctttatattgttatttacacatcaagcgtcaaaatctacatcagaattatagccgatagctcaaaaccctattactatcggctggtatcggcatcggctggaattaatctatcggcttgtcagccgatcggctcattgatctgctatttgtatatcttgtcggttgcagagtcaaactgactggcacgcccgcatctcatcaacctttggtcctgcactgaagctaagcagatctccagggcgttgctgttgtcgacctagcccgcgccaacatagacctagcaccataggccaagcgcagatttctcgtcgacactacctaccgcctacctcactttccgtggagcacataacaaactaaagtaatttctaacctagataccataactaagttattaattactactctagctttgcgcaggaacttccctctttatccatagtcctagtactagagcactcaattggacactaagcaacgaacccgcactaatgagaatatatctcacttaaataactaattaatgaacataaagaaactcgaacacttgcttgaataaaggaagcatccgccgaagtacaagtgagagaaaaaggccgacaatcctggctttctctggaactccattgaaagaatgctgacactccgcactcctccataaaattctcgtaggaactccgatatttcgaggcactccttctggagcttcccctcactctctaccaaactaatatattaaatatgaaactacaagtgagttgtactctacttgagctcaaagttgtatttattgaagtgtgtgaggcatcctccttatatagccttcatatgacggttgagataatcccttatatgcgactccaaattaacaggttctcttatatgccaattcaaattggctcctcccttctatgccactggttcaagtttaccctcacttatatggcattgccttcactccatcgctaggtgaccattaactttatagtaaaaagactcatttccattgagagttggtatacaaccaatgataggtatttttcgtttgatagagaacttggttgatatgtatatgcatatagcattttactaatatagctactacatatgaaaattgatttttttggatcacgtgcaattttagccatcaccactagaaatgaactttcaacaaagagagaatctactccatgccactgacattgtctcttactataatataccggtgactttatccattccttacaatatgcctttgggttggacttttattaaaaatacctaaaataccttatagacatacaatgttaacaattaatttatctcattagaagtttaaaaaatttgaaaatttttatgtggcctccttacataacatggggacttgtatataagtttcaagttttttctaatatatttatttttagaagaaatatttttgtgtggtatatgagagacagtttggttacacaaaagataatacacaaatattttatgtagtgtatgaaagatgatttatattaagtattttatatagcatataatagataatttatattttataaaaaagtagaaatgcaaaaaaacttgaaacttgaatacaaacgtccatgttgtgtaaggaggctacatgaaaattttcatatttttttgaaacttctaatgagataaatcaattgctaatcttgtatgaccatgtattttgggtatttttgaaaagaaggttcgatccagtggcatattgtagaacaattgatgaagtcgttgacatattatagatattatagatagagacaatgttagtgtaaaattgttaaactcggacaaactcaatggtatagaatagattcaaacatgcatctcttcaataattttttagtacaaagagcatttttcactggttctaaaaaaattgttcactcaaataaggattcaaaatgaatcagttatgaatttttgaagtttaaacttacttcagttatagaataaaccattttatcatattctcatcttttactattccaacctggtcgggcccacctgtcagctgcccagaccagatgaggcatgggctggcttggtcaccagtgcttctcgccggcgccggcggcgaacggcggcgcgactcggtttggtcccaaaagagaaaacacagaggagtaaaaggcgaactctccggtggtggttttgtcgtcggatttggctggaggctcgctagcgactttgatttgcggtggccgtagtcgggttgaacatgcttgcatggctacgtctgtggagtgagcaaggcaatgcatgcaggagcaaacacggaccccaaggaagcttaccgagctccgagacaggtccggcgaggtcagggtagctcgagcgccggtggactagtctcgcagcaacagggcaatggcgaacggcaccatcggttagatgtatggacatccatcatatgcacgacgtcaagggtggtccaggttgctccaggtggaaggaaacatatcgaaactcactgggtcgacaggatcgtgcggggcggagctcagtcatagccgggaaagatgacgctgatctcccacctcgctgcatggatcttggggctatttagggcgttttggacctggaggggagttaaatgtgttggcgaggcaggtcgactcgagatggtccatggcggcaggaacacgagctcgatgccaaggccgcgcgctgggcgtgcccttgagctcccacggggcgtcggcgttcccaacgctacaaatgacgaagcaaagtgaggtcacagggagaaatgcttagcatgcatatttgggtacaaatcaattgaaagaaggagcttttgaagaggaatcgagaaatggcagcggcttgctctccatggctaacggcaagcaagtgaagacgagaatgacagagcgctctctttgatcggatttggatcctctaccttcacggcttgaaggcacgagcgtgcagtcggcacctcatccaccgttcaaataatccaatggctcacgtcgcctgtgcacgtctgaatggatatctgtctgtcaaagcccacgaagtactactgctatatttcagtccgaataccaatgatgtttgcattataaatttcgtaatttttcttatcaatcctatgctctaatcataatttttcttttgctttttatgatgtgacttgacattgcgtcatactccctccattagttcccaaaataaaaacttttcatctagaaaaaaaactaattacacagtgtgcgtgtaaattgcgagatgaatcttttaagcctaattgcaccatgatttaacaatgtggtgttacagtaaacgtttactaatgatgaattaattaggcttaataaatttgtctcgcagtttcctagcgaaatctgtaatttgttttgttattagactacatttagtatttcaaatgtgtgtccgtatatccgatgtgacaaccaaacccaaaaattttctccaactaaacaaggcctaagtcgcttgacttttttttagtccaacttcttttttttaatttttaacacaaaacaaatatattataaaaatatattcaacgttagatttaataaagctaatttgatattttatatattactattttttatataaattagtcaaacttaacgatttttgactagaaaaaaagtcaaatgacttataatatgaaaaaagatggagaactactttgtaatgaattagtgttgttatttgaaactttcggttttcttgtatttttaatttggtgatatcatccatttttttcatgtgtattagcactaatatagtttgtaagtttcttcagctcgcgtacacttcccagaccaaaacaaccatcgtgggattttttttttttttttttgcgatagaaccatcgtggtctttcacagacaaattcattcgtctgtttaagcgcacatgtgacgtgagccgttggattacttcaatgatggataaggggctgactgcatgctcgtgccttcactctacaaaggcagacgatccaaatccctctttgaactggggcagtgagggatgatgggtgagcttgctaggggaggtagaaaagacgagctggagccttgaggcttgggacatgcgggcgtcgacaagtgacattggactaaatactattaacagtcaacaagtagtggtataagagggtaatcaaacttaaaccaatgccatttttagtggcataaaaggtaactaactaatttggagtggcatataagaaattctctcatgatggttatgacggttgaaaatgtcgttaacacccccccctccccaccaccttcatttagagacaatctaggatgtacacgtggaagaccaggatcagaggcgctagtgacggttcggccgaaccctgggccctaggtcctagtctctcctttggccaagagactgactggtgggcccttatggcggttagatggtttggccccattttaagttggttttgactaatttgtgggccctccaatccttgtactcacacataattggccagaggttcattttcgtcttatgtcgggtgtattttctccttaattaacctgcatacatataattaccaaaactagcggaagtggttagtagtaaactcctaccactaagttttgatatcttttatacatgagttgatggttaaagtttacacttaacgaccgtcaacaacagaacattgattgccatgagagcagctctgttgccatggtcgatcacccacactggttaccgagaccacaaaagttggagccaacacatcatcggcattggcggcaggtgtagatggcggctcaagcaccgcacccaacactcccacagttgtatgttgcaccaccgatgccagtggttagttctctggcaccgttgttgtcaccgaagagttgtcgatatgtttatcgcgtcgccgtagaccacaagactgagcaatagcttcagcaacttatcctcatcgccgtactgatccatggggaacatcttccttttctgccccaatgaggagccaacgtcgcgcacaagcgatgtcacctctaggggcgtgcctaggttatactacccggtgtcacaggacatcgggtagattattcaaatcctatataaattacactatattaattaatatattagtcaataattagataattagtatgtattaaacccccggtaacttttattctgggttcgccactggtcacctctgtcctcatgacgagggagagcacagaggtgcccttgcccacttcaacaattaactcatctgtggatatgcaatcactagtgtagatcttgtgatattggagattgaggacacgaggctatgccatggtagtaaaacaagtagagattaaagcggctcatcaaaatctttcacgcagcgtggtatcgcgtcccctcgtttcaatcgtgtttcaccgaccggactgattcgatcgagtgtagtacactactggagaaatgatctttactgggtcggccgatttccacaatagtcccggttgctcgaaaaactgggactaaagatcatctttagtcccggtttatttgtgcaaggggactatgtgatctttatcaaccgggactatatttagtcccggttcaactcgtgtcaaaggctgtcaggtcctcagagatatttagtcccggttggtaacatgaaccgggactaaagatcctaaattcagtcccggttgttattcccaaccgggactaaaatttatatagatttttaccaaccaggactaaaaatcaatataccgtatataatacctttgcacttatcctcaaaaatttccatctcctattcctcctcctctctcacgcactcttatcctctcattatcttcctattcctactcctcctctctcacacagtcttatcctctcctttttctcacaacgccggcgaggagcgggtgggccgcggcggcggcctgcgcacgatagcggggccagcgggcggcggcggggcgcggaggcccacgcgcggaggaggaggctaggagggcggtgggcggcgggccagcgaattttttttttagaatttgtgattggatctgagatgtattttggtttgtctgtgatgtattcacgtgatgtatttgcgatgatttttttagaacttgtgatgtaattttttagaatttgtgatgtattttgagatgatcgatttgaagatttggagatttcttttgttctgtgatctatgatgatctatttggggatgatgtggagatggagtaaaatcaatattcaatattaaaaacaattaaaaaaagtagtaaccagtcctggcctggctacactgggactaaagatgtatctttagtcccgagtatttgaactgggactaaagatctttagtcccgagtatttgaactgggactaaagaccgccatctttagtctcggattctcccacccgattcgctacccgggagtaaaggggttgcgaactgggagagaagagggtttctccagtagtggtacatactggtgtagccatacagctgagtatgtaaggcaactgcgagggggcgacctaccatgcaactgactgcacgcgagtgcaggctcgaggtgagtccatcccctatagcatatgtacttcatatatactttatatacgtataaactttgtatacacacctataaaaaaaatttgtatatgtataaagtttttatgcgtacgcacacaaactttatacatacaggtataaagtttgtatatatacgtacatatatgaatagaatattccatgggccaagaaattggaaaatcgagaaattttgtagaaattttcaaaattttgaacactgctagcgtgtggcccagcttacgagttacgacacgagtagctaaccttatcacagcgactatcaccagccacagagtggtctacgcatgcagagatatatctttcttctctcccaggttaggtcaattcatgcacaactttctcaaagcgatcgaagtggctttttattttgtctgacgacgaaactgacgagacggccgggccaatcagcctcccctgcccgcatgccggccacgcactaactcccatcgtttgccggccgcaatttgccggtgaaatcaccgcacgctcggctcggcgacgacgatggccggggatccactcgggatgctgcttttttttttcgctaaaggcgacgcggatctcgcgtaatcttttgctcggcttgctgtgattgacacggtgtctacctggcacctctcgctgccactgattagcattacaagtgtggttagtactagtactagagcttttgtttccgttaattagtgtagcgtgagcaaggtatgaggagaagtgtggtttgacccgggagggtgatcgcaaggggtcaactcttaggttgggagtatttatcactttatcagggttgagaaatcgtcgaaagtagtggtgtttgaatcttctaaagatgaagatgaagataaagatcgagtgtttcacgcaaaacgatatggtaataatatgtgattaattgagttttaattattacaaacatgaaaaatcgattaatctgatattttagagcaactttcatatagaaagttttcacacaaaacacatttgttttggatactcgtggcacgattttcaaactgctaaacggtgcgttttgtgtgaaaactttttatataaagatagaggtaatcttatcatcattaagaagatatatacatggttgtaccatatttttttctactgtaaaactttgcatctccagatagtaaggtttctcgaggtattaaaatttttagggtgaaatttcggtacctacatataaataatgcaagcataatatcgggttcattaggagcaccagagtattgagattaactacgtgaaagagttggtagtcgaatggtgaaggcatactcgtgtgcaacttgcttgatctttggtgtatcaaattatttttcctatactttatgctaccatcttttaacttgttattggtgttttcagctaaatcaaattgttgagatgaattctattgtcaaaagaagactgtaattagacgaaatttatcttattaaatcaccatgcaccacccggcctgaagtgtatggcttaatccttctctggtatctttatttgtcccttcatttcggtcattttctcatcagtccctaattctatcagcatcattgtcccctttcagctccaacatttttagtagaccatgcaagattttttgcttttgacctctaaaattttctgaaacaacgttgttggttatgcccactgtactcatcgggacaattgattgatgtcaatttggtctggaactgagctttcactagctttatacatggagtaatgcaatgacctaattacctaactaagagttgccatattctactcgatgcactcgatccatctctagctaagtaaccaataattatgatgaactggcgactgatgtgaaaattcaactttcaggtaggaaattcagatcaagagaacacaagaattttctctgttcccctactaatgaactactgataaaattcctacaaaaatcatgtgaaaattttcgttcggaacggggctaagtttcagatagaaatcaaattggaatcaacatgagctctccgatgccatttcctttcttgaggttaagggaactatgaaatttaagaaagtattgacggccttgaggaaaattggactataaaataattctaatgccacaatgcaaattttttcctcttttcgtgttgaaattgatcttgctgtgaaatttctccagaaatcatgtgaatgtcctcctctcggaaagggagattaggattttgaagtttccaatggtgccatttcgtttccaccgaccaactggagacaggagtcaaaacaaatgaacatgaactgcaagaagtatcatcggccttgcggcaaaattggacggtcaattaattcttcaatttgccaatttttgcatcaaattttcatctaatttgactgtcttcaaaatgagctagaactaaatcaaatccgtatacttgtctccatccgtatctatgcacaaatccgaactcttttttggcgcggccgccaatgctatcttgacgccgccttcgccagcgcgaccagcctcaccggcgaccgccgccgccgccgcttctcggcctccgatatcgtctcgagccccggcgaccacggccgctgctgccgcgcgcccaccagctgcatgtagtgcttcctcagctccggcgtgctgcacagctggtcgtcggccgccgcctcgccgcccgccttgccgccgcccgcgacgcgggccacgcaggtgatcgccctctcgatgaactccgggaggaccctgatgagcgccatgccgtcgtcgcccgtcacgtactcgaacggcgacgacgcgccgccggcgagggacaccttcgcggccggggacggcgacagcgacgcgagcgacgcggcggtgagcgcctgctggcacgagaaccgcgcggcggggagcacgaagtacgtccgccccgccgccagctcctcgccggccggcagcgccgggatcgggaggccgatgaagaacgagtcgccggcgcagacgaggtggccggggagctccgccatgacgtcgccggccgtcgtcgccgcggacgccaccagctggctcgccgccccgccccagaacaccagcctcgccgccgccgcctccgccgccgcctcctcgccgtgcacgggcggggagcacaggcacggagacatgccgttgcccatggatgcactaaccacgatctagaatattctagaagcttctggactagaagcgaggtcgcggaagaggcgctctctcttcgatttcttttccacaagatttgaggatttgttggtgcgaagatgtatatatagggggagcgttgaataaaaaaatggaatcgtgggggttgacatttaaaaagtcaaaaattggggtttgaattttttttttggttagttttacgtggggttgaccagatgggtgttcaaaaatctaaccaggtgtgtcattaattaattagtggtgagtcttgtcatgtcaacgaccgattggagcttggaatggaagcttctagcgttaatcgtgcttagtgagtggttcttctcgtggaaagtagcttaattaggtgggggtgctgataattgggtcaaatccccgggtccatcattagcaagcagggttatatatactcttgggctgcgcttgattgtgctataattgtaacctaaagctaatttaaattttttaaattttgtttttttattaattttaggtgctcttttactttccttgaatagcacaattacatgatttctagggaaaaaaatgctgaaaaatatagatatgttgttaaaaatcaatgtttaaagtttaaaattgcttttgatccaaagcacaatcagcgctcagcttttttttatatgtcaaagtcaataagctatatggagtagtagtatatgccacacataaatgggaagagctccttttgtaattgcgatgtccggcagaaataaaattagcttaaattaaaagttatttactctatattgggcttaaaagacgatggtacctgcagatcaaatatagagatgtgttacctagccactattttgttgcttttcaatgtgtgagtaaagtgctccctccgctttaaatttgtatgaaaacgctattaacttttggtatgaaatttgtccattcattttataaaactatgtattatgagaaaatctactccccggtatcccgtggtgtcgggatagctcttcaaccttattcatccgaccacccgcatcctcatccacccgacgcaatccccatctcactctcatctcactcccctcctctctctctctctcaagaaggccgagtggagacgaagccggccgggaggaaggggtcgtcgtcgtcgtctccggcggccgaggaggacgacgacagcactgcgtcggcgaggtcggccaaccctcagcggggtcgccctcaagctcgcctccccttgctgcgccgctctggctcgccgccctcgtcggtcgggtctgcgccggggactcgtcaccccggggagggcagaagtgggagctcccctcgtcctcgccctcggcctcggcgtcaccgtcgtccccgctgcagcctgccgctttgcgcctccgggatggacgccagcagcctgcgtcaacttacaacaggtatggctgtcaacctcctcctcggcttctcctcgagacttctcacgctctctggctcgggcctcgaccctcaactcgccgttcctcctcgatgccatccttcgccgttgcggccctccctcccccacatctcctcctctttttgacggtaccctctgataccccacaagtatcaggctgatacctaggtaccacccaataccttggcaccgggtatcagatatcagtcgatacctagtcggtaccaaaggtatcaggtaccaaccggtacctaaggtaccaggtatcaggtatcaggtatcggtcgatacctagtcggtaccaaaggtaccaggtaccaggtaggtaaggtaccagatatcaggtaccagggagcacacgtggacataccaggtatcaggtaccagggagcacatgtggatatactaggtatcaggtaccagggagcacatgtggacagaggaaaggaaaagagagagtcacttaaaatatcccgttgcaacggtatcccgttgtgtagctgccctcatgttttatatagtgattgttgtggctacattgcagctatagccgcaacgccacaataatagcagcaatacaagcaatgttgcaacggctggaaccatcgcaattgctttcgaatagggcattaaaaaaatagtgcaaatataaaaaatatacttaaagtgtatttaataataaaacaagtcataaaaaataaatattacttatattttttataatacaaatggttaaacattatgttcaaagtgatttatcatatttaaaaacggatgcatattttatacgaattacactaatatcaatagtgagaaagtcttcccaaaaagccagaaacagagtacttcctgcagatataatctaatacttaaaattagactccacacatttaaataaagtttatgcatgacaaactgaaccatctaattaatacagcaaattgaaagagagaaaacaatactcgtagttgtttttcaaaacagagaaatgacttttctttcagttctagactactacgtacgactgcgttgcattacaattagctggtgccttgtgtagacaacggttcagtagaggaaattttccatccattgttttgatatctgtcagctaggtcattagtcaatcgtcaatcagcttccttcttcaagcggtgtatcaaccaatacaagctagctatcagctggccgacatgcttgagaaaaaaatggaattgcatatcgcatgaatgatgaatggtcctgcgtcaccatcagctgcatcaaaatgagcagagatttcctcatttcgtgcatgtgtacgttttcttgtgccatagaaacaacgataatacctttttgtttgaacaataatactttctgcataagctaaacccgtgtcggtgttgactgtcgcattcaagaaaggtaggcatttttttaaggatctaaggtaaccaatttaccaaagaaattaaaccacttggcccaaccatggtgtggattattattttaactgatgcaacatctttgttcttgtttcctaagttgatttatctatactactttaaatgttgatggtagttctgccagccatccaacatcactgtcgggttctcatcctttatcgtaatgccattaccattatagatacttacgtgtggggcaacagggtgggatccatatgcagtgactgtaatagtcaactatcactgtcatatgagcccaaggccccaaacaatggggttggtgggatgtatctcaaactaacaactggaaaatatgatggcatcttcgattagacaatgaaaaataattttatgtaatgtatgtcagcctaatttctaacattcaactaatgcaagtattatcttatagttagataatagaaaatggtttaagattgaaattttgttgcaacgcacaaacatttagctagtactagtagaatcacacagaatcacaggtcacactaaccaaactttgaagaatgtcataagtaatggaattactaatgtttatcaattgaaatgaagtctttatgggcggagatagtacttatggtcatttattttaacgggctataaacaagactttaaagcctaaaaaaatattatcattataaaatcttcacatcatattatttctcatcaattttgcttcacttaaaaaaattcttattttatggcttgaggttgggggatccatatggccgtggtggtggatggtgacaattcccccctcaccacaactattgggaccttttaaatgagtatagatatggcagttataggaatattaggatacgattgatgatttgtttagaatcattcatcatatctaatctttttctcttatctctattgttatacgtcatctcttgaggctcaatacaattactcaagttacgcaatatatgtctcttgtataacagtgaacactaaaaaaatgggtacttgtgcctctgtggagagcctatttttccgtgttccaaccaaatttaatttgttccatttgattaacttcatgattcgtactccaacattcttcaggcatcgaccccttcttcattccaatgatatatctgttctctctgtaataggaatattgttaggctaattggtttttactcctaggcttcgtaccatggcccaggtgcccaggaggagtaggaattggatttgtcccatttgtgctcacatatgtcggccgcccatttgtgtctgacgcaagatctcagtacagttgtaaggaaaaggaatttcaaataggctgtgtttagttctataccaaaattatatgtttgactaaaattggaagtttgaagaaaaaagttgaaagtttatgtgtgtagaaaagttttgatgcgatggaaattaaagttggaagtttgaagaaaaagttaggaaataaacaagcgcataggttacttttacataccaacctttctttaaaacatatactctattttttttataatagatgacacgattaacctattatgtttgaccattcaccctattaaaaaattctatataatattatttattttgttgtgatatgttttatcatttaaaaaactttaagtatatatgatatatattttagcatatttatagtatttttagtaagataaatagttaaatgttatttaaaaggttatcgacgtttgatgtcgcgattccggtatttgcatagtatggggatcgttggtactagaatatatgcgagattatagtaaaaaagatggagacgatgatttatatacaggttcaggcccttgaattgtcaggtaataaccctactcctgttggccgtagccggtcgttgctcttatttaccataatcacaccggtacaatatttggggtagcctatctatctattgtcaacatggctgtctgaagtgctgacacgtagtcgacaacagagtagtcttcctcctcaaatccgtgtccggcgagatcagagatagcgttagatccctcttgacggtagtcgtaggtaccgtatggagactactaggcttatctccaatgttgatatctggcggcttgtcttggcgtatgttggcttgtatattgatctattgtttcgtctcccctctcctcctaggaggccttgtatttatatttataggtgtcccctttacaaatagaactagggaaatcaatatggatacaatccgagtagtccttgtcatttccatgtagaactctagttgtctttccttatccagaactcctcctatatccgaaggttgtttccgtataagacatggtacgtggtgggtcctgccgagatttagtcaactactattaggtacgtggtatccataaccctgacaaaagtgttgttcattataaaaaaagagaattactaatatttagagcaagtataatagtaggctataagccggctaaatgctgaggtggaggagagaagagaggagagagaggagaaaatggctgtaaacttacagccgacttggacataagaaccaagaaactctgtgagagagataagtgggccatgtattaattataaagagctaactattatatgggtaagctaagagaagactacacagaaccttatagctaataggtcggctgtattactggccttgctcttaggagaaccatgcactcgtagtcagggacgaagccaggatttgagattaggggggtgtggggtgaagataaaccatgagaccgaataactagtcctttaagaatagtcaccgtcaataacaagcaatgcgtaaactagtcctttaagaaaaacttaaattttagctctttaataatatcattggaaatttaaaactagtctttattgctaaattcttttaatgtaaactattaaataatctcacaaataagtatcatctattttactttgaaaaatatgagaaatcacaaactaattttgtagatcatgtttcttgctaatattttttagacttgctaactaattaaattgataatactttcaagctacacaaaataaactagataaatacttatcttagctaacttaatatagagtaaaatacatgagggtgtagtggtggtagtgtttggataggggggtgttggcaccctttggcacccccttaccttcgccactgctcgtagtgatccatatgaaccgataaatctctccacgccacatcaagtcatcaacctttgggcatacacagtaattggaacaggtcaaggttcattaagacaatacccaaaccgtcctaaacaccccaaccgaattattccgttcaaaacaagggaaaataagtacatatgcccttgatgagctagctaagcacaaaatgtacggattacatgtcaacctcgatgaccatttcgatgaactaggacgacgtccttgcagagtttcaaaatataaacatgtttagatactgatacggtcttcgagatgttactttgacgaacaatatctataaaaataaaaatattttaaataaaaagagttatatattatgatagtttgtttaatgataaatctagtaacatcaattttatatgattgattttttaattttttttctaataatggtcaaagttaaaaacatttaacttgtcactaggcttaaaaatgtttatattttgggacggagagagtacttgtcactatgcttaaaaatgtttatattttgggatggaaagagtaataatagcactaacaatttaaataataatcacggttgaaacttgaaactaatgctaagtctgtgtttggctcccactttttctcctttgttttcgacgtgcatatttcccgaatggctaaacaatagtatttttttaaaaaaaattctatacaaaaattatttaaaaaacatagtgatccattctttaaaagaatttagctaatacttaattaattatatactaataattattccgttttacgtgcgcgagggattaaactgaacacaacatataattcatcttgaatctcgtcagctatttcctccgtccgaaaatgttactcccttcgtccacaatagttgttgttataggttgtttaataccacctccgttttttaatagatgacactgttaactttttctcacatgtttgaccattcgtcttattcaaaaaatttacgtaattataatttattttgttatgagttgttttatcactcatagtactttaagtgtgatttatatcttatacatttgtataaaatttttgaataagacgaatggtcaaacatgtgagaaaaaattaacggcgtcatctattaaaactcaagagcaaaaatgactacagcaccccctattaaatgttatgggaatgtaaataagaagatactccctccattccaaaatatagggcacaactactttttaaagttgcttcataatataaggcgtgcatatatgcataacaattaattagcatctcttctctcctaaattagtactccctccatactcataaagaaagtcgtttagaacagcgacacggtctttaaaacacaactttgacttcttgtttctataaaaatatttctgaaaagtgatatatatatatatatatacttttatgaaagtatttttcaagacaaatctattcatataatttttatattttcaaactcaacaacttgagagttattcatgatttatattcccaacgtttgacttaaacattatcctaaacgacttcctttatgagtacggagggagtattttttaaatcatacactcacaagatgtttaattctattgggtgcatgtattgtattaattggattgattcaaacaaagaggtgataataattgtttcttggtgtttgggtcagggtggttatgccttatattttggaatggagggagtaattgggagtagaatgaaaaaaaaattgaattgaaggtgattgatgcgacaaaagttactctaagcatgtgtttgatttcgggactaagtgggatgggatggaaccatccctgattttttggttgggatgattccactcacatgtttggtttgtaggatgggatgatcccaattttttgtttgattaaagggacaagagagagatgggatggacgctgtttgcaaccaccgtcaacgatcgggcgggcgtgcgggcgagcatgccggcggcgagcaagagaaagagatggtctccgagcgggcgtgtggacgagaaagccagcggcgagtaagagcaagaggaagagaaccatggcttgctcacctcccacatgaccatggcatgccgctgcccctcaaccttcgcgagttcctccccgcacgccaccgccgctcctcctccgtaacagtcccctgcctccggatccgccgccgcagtcctccccatcgccggatctgccgccgccgccctccccaccactggatctgccgctgccgccctccccaccactggatccgccgtcgccgagccccctaccgccaccgtcgcccaagccgtatgccactgctcccgagggcgagcagggcgagcgcgcgagcaaggcgtcgtcacgccgttcgctcgtcccaggtgggatgagttcgcccgcgagattttcttatatcggttggtcccgggtctgagaggaatattcctctccaggaaccaacccatcccactcgtccctcaaccaaacacccctgaaagtgggttcgtcccatcgtgtcacatcccatccttgtaaccaaacactatctaaagtgataaactttttgcaacaaattttaaatcctaaaacaacaattattttagaacgaaggtaaaatatttttagatgaaggtagtactcattcgtcgtcagtcagtcggtcaaaagtaccaaagagcggcgctgagaagggcgttggctaacttaatttgacatgcaaaacctgatggacagaaagcaatgtacgtaccactcccctttttggtctttctaattagcacgtgcattaggcaggtagaggtagtaggtagagctagcgtgctaattaggtcacgtgttccgtgtgcccacgaggaccaaaacgttaacgtggttgaagggcagagaagaccagtgcatgcgatgcgagtagtaggagtatatgcttggaaaaaattggaatgctgctttggatatatattaagaggacaacggagccggtcgatcggtcgtactccgtacttgtacaaggtttggttaatgttccactggaaagaatatgtgtgctgcagtgtactagtgtggtgataaacaaggggatatcacgttgggaacaacatagcagagtttcgtcatgttttgtccatgcctgtccagaagggagtaatttgaacgtgtgtgtagagtatcagagttccaagtttattgaattgttaatcacttgattcatggccatcgcataaaaaagaagattcataagaaggaataaaacatcaaggtagctagcttattcatcgatcctaagtgtacatgaatacctgatagtcgtaaaatcaattgaagaaccaagtttgaaaggtaaagttcaacggatttaactgcaggctggtttcagtagatttatggtacattcacaaagattcagctaaaaacaataacttaaaacgaattcgaaaaatggattgcaaatcaggcttagagccagtggcgtagttaggatttagagtaaaagtgatccatctatatgtaaggtcaattaaatggatggtccactatataatttttattatattaacttgcatatataatatagttttaatctcgattaaatttttaggtagttcatggaccacagtaccacctagcatgccactgcttagatccttatatcatacacaccatccgtaactagtaaatagccggtggctatctatcactctgtaacacaccatagtctaggaccctggagctttggcccattagagtcgaagcagctgggccttctctctccctcactccgtactaattgggctttctgttgggctgcattctaatggaagtatatgcagctttgggcatactaatgaggcaatggcaattggaagcaaagtggcaaatagttgcagattagacatgtcctctaatttttggcctttggccattatgtctaaaagaattcagttagctaggagtatgttttttattccattttgtccttttgatctgtatctatttgtgcatatccgctaatccacagagggtcccttccctggattcattcggtttgtatataaatccaagcatgacaaattggcgagtgaatagacaaaacatttttttgcacgaaagtatatgaaactgaagttgatgcgtcacactgtcgggaggaaggctccgaattaaacatggcaaagcctgacaagtgacaagtgcgtaagtgcctctcgctatcgaaactaaattttctgcggtgaactcattcaagtatgcacgacgctgttgtctcttccgggctgcaatcagcacggcatgattgcagggctcatgaatctcgcaaagatttgtcttcccttgtttcatggctcatacaatagtacagtctctccacattttcagagcagctcaactgctcaactgtctttttaaaaaatgttgagctaattccatctttcaggaaggacaagttaggccttattcggtttgaagaattcctaaaggatttctcaattccttaggaataaacactattcatgcattcagttagtaggattcaaaggaaagttttcataggaacaccatgccaattctccaaaaatcaacatccactccaaaatgacagtttttttttacatgaaaaatatgctgtcagtctcatatttcatatctcaatttttttcatatatcaggtttaatattttaaggtttttttctgaggtttaactatatgcattctagatcgtcatttatttcgtagcttgttcataacaaaggctatgaaacccgaaaccaattaacaaagtcaggggatgtacgtacatgcgtctttggaacataggaatttgaaaacacaaaaaacaagaaaaatgtagtaatagaatgtcgtaccacaataaatcctacttgaaagaaacccacatgatttcgaaaaaaattgtatggtaatagtataggaagagtataggaattgtgagttagtaaaaagaagagaaaacatgaggcctagccttatgttaatgtttctccaaaactcatatgaaatgagccattccatgagattttcaaaggattttgtcagagctttttctttgctccaaaggatcatgtagaaatattttctaatcaataatttctacagtttccctttgttccaaggaagtcctacatgtttttgactagacatcaaagacaaaaataaaagttataatgatgtttacttacaacacatgtagattatcggaggagtacgagatactctctccgtccttaaaaaaagtcaaactttggatttccgtgtccaattttaactgtccgtcttatatgaaatttttttataatttgcattttcattgttgttagatgataagacatgattaatattttatacgtgacttgtctttttaatttttcatattttttttaaataagacggacggtcaaacgttagacatgaaaatcaaggtttgtctttttctgggacggagggagtaagcctttgcacatgtaggccctttagtatgggttggcaggaagccggccggcctaccggcgttggccgctagctacacaaactccaccgaagcacaacatccttttacttacagcggggccatccaaacaaacgccctggccagagctactgacacatgggcccctgcagtaggctagccctcactcccgtagaaaagcgcttcaatggagccttcatgtagcagatagatcctgtacttccgacgtgttccaggaaagccgtgcgtcaagggcgtttggtcctaaacacgtgatgtgttggatgagatccaattttaaaagtttcgttatcggtgactgttcaaatatactttcctccgttaaaatataaggtaatactccctctcccataaaaaaccaacctagtaccgaatgtgacacatcctagtactacgaatctgaacatatatgtccagattcatcatactagaatatgtcacattcagtcctagattcttttttttttgggcggagggagtatttgattaggaggaattgaactatttcatgcaaagatcctgtaaagtttatatgttccaaaggattattaaagttatgtatttaggaaattcgatcatcttgggtaaaaattttcttttagaaacacatgataaacgttgaggttcacaacgcgcgctctttcagctctatataaacatacacaccatacccttataaacatatcggaaagaatggaccaccgtgtattaagattgacgaagtcatatgtatcttgaagagtatatcgtctaccactgaaattttagttaactataaatacgagcacccatgtcaagtctatgacttgaaccgggtaggttggttctatcataaggaatctaatcagttgaactacactcactttgtaacttgggtacttttgttaacagttaagttaagatcgtatatatttggtgtgtggtgtcatatgcatatgttatcgatatgttcatgattaaaagtattttatattatgctagtttataattattaatgataaatcatcaatggattcgtaattgttgatgaaagtttatcgaagatttatagttgtttatcaagattcacgtatagaaattgatttgttcgtctaggacgcagtgtagtccgattaattagttcaggcataatgaaaacaagagtgattctaccatatttttggaaaggtaccaacagatatcatattttctaatataaaacttattttcagataccaagtaacgcaagataaaagaaaattagtgcaaaattttagtatatacagttaccctcttaagtaccgtacaatttgtttacaagcaagtcttttaatttcttctttttgcgcatcatcgttactgcagaagttaattaatgactcttactagaagcatttacccaatgacttgcatatatattggtactaatacttagagaatttgacaacatcacatttagcctatcctactaaaacttagtaatattgccaatttatcaaaacgattgattttgaaatcgtttcaccgcaatgcagtcgtcgactcgtcgtacacgttcattggacgctgacaagcactagcgccactgcgtccagtagagcataacagcgcatatctgccatcagcatcgacgtccacaaaacatcaatactaacagccacaaacgtacgcatgcatcagtggacaaaaggccagatcagacgacgcacgccctgcgctgcgctcacgcggcagctcgcgggttacacggccgcccgagccaccaaaccaccaccaccccccgatcggcatcgctttccaggcttaccgcttagtacctgttacgacaggggagttcggtatctgtatctgccggattgtcgcgtgtaccgacaaaaactgattaaggactcatcatgaatcatagtactaccgaattacggagtacgagtatcaaagtcgtagcctaccgtgattaattagcatgctaattacagcttccctgttctgttcatatgtggtactcccttcgaccacaaaataaccgtcgttccggaaatggaaaaaaaaagttactatctaactttacataaaagtccacctaattaaaaccagatatgcaccccctaaattttttaacactgttttatgcaaccctttttacataaaacaccttacgatggttttacaaaatagttgctataaatttgcatatatgttaaatgagtttgactatttcacatacacctcgaacgcatatgttaaatctacacctttttatcccattttctctcttacttatataaatgagtactaacataatacaacacaatactagtatgatataattactgtagagtataaattaaggactgatgatttgtgtatgtaggtatgttatatcaacatccgaaaccactttaggagataatttaaatggcattgcaaagtttaggggttagatgtctatttttaaagtttagagtgttatatggagttttatccaaacttcaggggttcctttagaaattggtgggtcaccaagacacacttgtctcattattaattacaaataaaatacctataaaaagataatttttgaaagttatagtattttaaaaatagttttaaaacaaatctaaccatataatttttaaaagttggatcggaatttttttttgcgggaggatcggaattatttaaggacaaaagtataaacttgttgatagtacatatttcaaaggaaaaagtacaaaatactccttgaactatcgcggtcaaccgaattaccccttacccaaaaaccacacattactcactctgaactttcaataccgaccgacttactcccccttgacccaatccagagcggttttatcctacgtggcatacgtatgtcaatccagccagtattttcttttaaaatattggtgagacccacctatcataccttctattcccctcttcccctctctcttcactctctaactctctcttgcacgcatggcacgcacggtggcacggggacgggcgatggcgcggggacgggcgggcaggcgccgcgcatggtggcacgcacggcacgacggtgcgcatggcgacacacacaggatgggaaagggtggaggggaaggggtgaggaggggagggagagtgtgttaacgaccaaatttggtaataccagtatcggagacgatgattagatcaaagcggaatcaaagatgaagattgttgcggaaatagagtaagaatcagctggagtccaaatcggctacgatcgggatcggctaagtccgagtcaggctgggttagacgatacagccgattccgacaatacgacttggtgtacgtcatcaggttgagttgatatgcttcaagatgattgccacgcatggatagagtcctgagaaagcaattgtatctattaattagatattttatgtaatttccttagaaatatgtttgggcaaaagtctgccgcaaagacttatggtattttagagtttgttagagataagagtcgtgtccgatatggacatgttgtgtaattctcgggtataaatagaccccgagccctatgtaatcaaataaacacacgttcaatataatctcggcgcatcgccaccctttttgctttcgttttatttcgacgagttcttgctttcaggttgagctgcatcggtttcgatcttcaacaaaaggtaaaacttgttatggcggcttgcgttctcgggattagtgctttcatctttatgatactctaatcttgtctatgtaattcgtcgagttatcatatatcttatataatctctggcaatatcgctatctaatctacaatcggctgacatctatcaatagagggcagctgattaggttaaatatcgacgttggcttagattatatatgatatccaccactctatgaaacttccaatggcttgattgtctagatattgtccttcttttcatacttatagctgcatcagttgattgatcttatgagtcgtgattagaatctcaatctctagcctgcttcttggttgccgattagggtagtatcggggtttcagccgatcttacctgatttaactatatttgctttatatgctttactgacatgttaaatctaccctttatattaagatcttgttgcacctaggtatattaggctttcgtttagtatattctgcttgctttaatatcttaatttagagtggtatcggagtattagccgatacatgctagatctatttgatcggctatgctatgaacatatatagtcttgttgttagtatatatttcgatctaagtgatttatactgtctcgccatggcgaccaatctatcccaatcactcgatttaagcatatattgacatgaggattatatattgttaatatctacagccgatcgagtagatttagctcttccttacctattcatgactgccgatcgatctatatatgacatcggcttaaagataaatgatacgtcatcggcacttagccgatcggctatcgtttatggatttaaccacggtttttttgtctttgtttttgttgattgcaggatcaaatcaactggcacgctagcatacccgaaggtgaattttggacctgcactggagttaagcagatctcccaagcctcgtgttttcacatcaacagagtggaggtggatggaaaaagggaggaggtggaggtggaaggggaggtcggcgtgcacggcggtgttgccaggatcagccattgggggctgggaggggagggagatcagcagggaagatgaggtagcccctgttgatgcgaaaaacacacacaaatttggtcattaacacacccccacctctggccgccgcccgcctctcagccacggccccttctcgccgccgcctcctggcaccttccgccatggccctgcctctggccaccgtctgcctcgccctccacgagcgctaccgtgtgcaccgacctttccttccacctccatctccatctccatgccacttccgacctgtcctgttgctcccgctgccgctcgccgccagctgaagccacccagccacacccccatgctcgccacctagctccattctccgcctccgcgtctcgcgcgccgccctgtgagagagagagagagagtgaagagagagaggaagaagggaagaggagatatgataggtgagtcccaccattttcttaaaaagaaatgttgactggattgggcgagagggtaattcatctggtttaaaagcttagggtgagcaatatctcctcttctggagtaattcggtcgacctcgatagtgaggggataattcgtactttttcctaaatcattccttatttgtgactggttggattttttcttacttacatgacattgttagcggttccacgttaacaactcttttattaatgtcttaattaatattttaatatttactataatcaaagtataacgcacgataaatataaccttagaacttacggcaaactctgtcaaataacatgaacaatgtagtactattctacttacacttgagtagatgttttcttaacaagttggggaaaactatatacatatacatacgtcatcaaataaacctccgtaccaacattttataaagaaaatttagcgttccattccatgtggtttggattaggagtcaaagtggcaatcagggatactggctggtacctaattaagctggcataatgctaattgggattagctagctcaccggcacactccggagatctggcagtaggcggcagcaaccagcagcttctgcacgccctgatattctacgcgacgcccgtgcgtgtcctggaaaggcgacagggcagttgcaaccgtttgcctggctatagccaggacgcattggtcttttctgtttgtacaatcccaaatttgtataatgaactgaattactttacatgaagcaccaatttaacttgaaaataataaaaaaatgtctacattcatttcaactagtgccggatagtttgtacacacgcgtgaccgttaccgaggatgctatagggaaaagatcagatcgccgcagaagcaagaacacactcgagagaagaaaaaaagataacatatggagtgagtacaagagtattagtattaggctcgcaccaacacaaatgagacgtcgagaagatatagaaggatagggatgtcatggtcatgtaaaaagaagtacattcaatttatctctcattaataaggttgtaagatatgacctcactatatggttaaaattcatgcgaaataatgaaatatcatgtagttctatccgtgcatgacatttgactgaaaaacccaaagttcttttttttcattagagtgccatacaaccaatggctcctatgcaattgcagtgcatgcatttagatgcacagccccatcttggtctaaccgtaccgtctccacagtttgccagcctgcaagagagccgccgccccacgaatgagtgaccacctccagcacataccaggcagcatatgcatcctccaattaccatttggcaccaccagtagtccggaaaaatatgtagtgcaaaccacatatgtagtggaaacttggatactaccgttggatcgagaaatggacgcccgagattcatccacgtcaccatgagttaaaattta

SEQ ID NO: 6576 - DNA, 69911 bp, Oryza sativa
  unsure (1)..(69911): unsure at all n locations
gcccagaaatcacaccccccttgctgcaagaaaaaaccccacttcaaaccctaaaaatgcaaactcaacaaatccaactcgtaataccaaaatccctcacttacccgagcgttttggcacttgtaataccggcgcccagggttgtccgtgctccacgagatccacctcgccgccttggctggtggacggcatcggcacatcactgcgggctgatattctagcggaccaacccgataaggcacgggatatgccttcgactcacgggtagacgacgagccgtcgctcatcgagctcgacatctccgcgccgccgctcgccaccgctctccaagtcactgccgccgccgccgccgccccgctcggttcctgcttcgctagggtttcggggaatggggataacctaaccgcgtgccaaacatttcgcccattatatcctaactaccgccctgctgactcagcgctgaagaccgtggtcaatgcgccacgtaggacaaaaccggacacaatactgtcctgggaccaacactgacctggttttgatagttaggggacccccgatgtctggttttgcggtttgaggacgttttggtaactcgatgacaagtttagggaccttcggtgtactttttccaaaagggggccatgaaaaggggcaggctagacctgaacccaataacaaaatgtgcatgggaggagtttggtgcagcgcttgcagctgccatgcagtggctgagccagtatagcacatgattcgagtgaggaagattaatacgtttttttatcaactaaggctctgtttagttcacaccaaatttctcccccaactcctaactttccatcacatcacatcgcatccaaaactttcctacacacacatactcctaattttttttctaaactatcaactttcctcaaacttctccccaatttcaaaaactaaacacagcctaatttttttgtaaatattaataggtgtcaatagagaagacggcagaggtgaagttcaggacacggtcacccaacctactcgcgagctggcttcgctgctgcctcgatgttctgacggctgacacgcgtacaactgaggcgctccccttcctttttttcttgcaaattcaaaatctccttaaaatgtgtctgccttcaggttgaacgtataattgactgaattcaaatcctcttcaaactaaacacgacgtgtaacggaaatgcagaatccggatgttaacgggaagcagagtccggttgttcatgggctaatacatgtgcatcttgacttctggagcaagaatatctgagcagccagaaacacaatttactgactattaacaaccagaatcacaagacgtcttcttgatagttactactaactacttcatctgtttcacaatataagtcattctaacatctctcatattcatattgatgttaagaaatctagatataaatatggaagatgttagaatgacttacattgtgaaatggaggtagtagctagcaagaacaaacaacaaaaattaaaaaggccgataaaaaataatctacatccggagaggctgcaccgttgtagcggcattacgtcgaacgccaccgccgccggccggtgcaagctagctagcctcaactcagtgagcgccggacggcttcgctatccacatccatcgccgccgcattgtccttcagatcacatccccggaggcccggagtcagggggaaaagaatgaggaactccggcgtagggaatcccggcgtaaccgcaagcggcggcggtgcctgtgccggtgcctgtgcctgcttctggtggtggaatcccggcgtcagagggaacagcgggaggcacaccggcgacggcgtaggttcctctttctccccgccgccgccaccgatgatcgggtcgtcctcctccttgctccacccggccaccttcgagttcttcgacgacgacgacgcctcctcctgctgccccggtgttggcggtggcggcgaacgattgccgccggcaccgcccgctgctcctccctctaacgccgccatcgcgttcgtttcgattgcttcctctccggcgatgaataaagtggaagatgaactaaccgaaagtacttacacattacattatctctacgacgtggaaggagttttatatagttatctttgcgacgtaggagtttgagtcgagttagagaaagtatagtgtttgagattaattcgagtcaggtttaagatagactttgactttgattttcacttggttaagtttattagcttctgcaaattaaattgaatttgatattgcaaattacaaactgttcgtagattttattttcaatttttgaatcttttagttttcaattttaaaaatcaactctctcaaattttatttgaaaattctaaactttttgatcactagcttggcgaacaacatttgttttgtcacgccaccattactggcatggcaaggatttttccatgtcggctaggttggtgtggtaaaataacactagcacagtcaccattggtggcaggggtgaagctaggataaatggtcaccggggtcagtattaaccagggtttatgtttttgatcaaaactaaccagaaatcatgtaattttgatgttttgccgtgggacgaaaagtatattctgagtgaaatttcgaatgttttttgagacttcacagtaaaactagatcaaaacttattaaaatttggtaagaaaaatgtcatatcgctacattggaatccaacactaaatcggaaatatgtcatctagtttgtaattaatgatataagaatatacataatacaggacaaaattaatgacaatacattatgataaaatgaaatgtctacaaatctattaaaaactatacattattaatttgtaaaagacatcaaatgcaccaaagatcatcaaaaccactaatttcttgccttccgttctgctagaaataagatgatactccctccgttttaggatataagatgttttgactttggtcaaaattaaactactataagtttgattaattttatagataaaagtagtaatatttttaacccaagataaatatattataaaaaattattcaattatagatttaatgaaactatggtgatgttgtaaatattactaattttttctacataattagtcaaacttacagtagtataagatatcaagatgcgcaatgccggtgcgggacaaagtgctcgaaggaatacgatgacgcaacaagagaaactcgtggagttgtgggcttccaatgttatttttggatccaaatcccaatcgtatatgtatattcggctaatgtataaattataagtgctagctaatttattgtttgttagtaccgttcctagtcgctatttgggttttgacggaagaatcaacaatattaccggggtctagtttttctcttcactcaacaatattaccggggtctagtttttctcttcactggggtcatggatggcaaaataaagaagggtaccagaggttcgcaaaagatcgtcagggtcaactgacccctatgaacgagtgtagcttcgcccctgattggtggtgtgacacagtaacaacgttgtttcgttatgtcaccaaaaccagcatgattaaaatgtttagaattgaaaataaattttagaaaagtctatttctaaaatttataaaaaatcagggtacaaataatatatattctggattgtattcacgtccttaattagaaacttaaaatccacgcccccacaaaattaagtctatcagcacatccacatacagagcagagctaacagcagcagaaccagagtggcgatgaggatcgttgcggcagatgacgggaagctcctcgtggccgccgttgctgtcgtcgtcgccgtcaccgccgccgtcttcttcttccgcttggtcgggcatgggaggggaggatgccggaggcggatgcgagctccggggtctctcatggccaccttgctcctgaccagcaccgagttggtcaccccctgcacgttgttgttcacgtagatgttgatgctgcagcagcagctgccgctcgccgccactgacatggtcgcccccgtgctccggttgctccgctcggaggagcaatcgtctgcaacacccatcgccggcgaggtaggccggtcggaacggacggaaggttgatttctgaagctggagaaaacaagatctgcaacctgcagggatgcagtgcagcagcagtttcagttatatttggcatagttagtacgttgctgcatcaccaagaaaagcatagcatatgctactacgagcacagctggggaatcacactttgcctctgcggttgggctactccccaggctccagcaatggatgtcaagaaagagcgggttaattacatgtcgctttgcgcttatctttgtatagcgtcctaacatgacataggcacatagcaaatcaacggtcatttttgtgttctattgttgaataagctgcgcgatagaaggcccatttcagttgtcaatgatattactgggctggactgtggatttggagaaggtcagaaggctataagaaaacgccagcccattctgctcttctagtcctttctttccccttcacgacgttaagaacattgtcgttttttattcaaactttgaagcatcgccagtaaaatctcgaagcatcacacgaataaaaataaaaaagaacactttgaagcaccaccagtaaaagtttggagcatcaccagtagattaagctcatgcgaagtgcaaactagggtcggcacaacattaatatactttggatccacatctgtaaataaaacacgaggctatcgactcaaatacttagtactcacatgctgcagtcatacgggccgaacggctagctgatactaccagtaaaccgtgttcaacggaaggtagtactaatgcgttaggatgagggcaagcaagttgaacttaattaatcacagtactctacattttctcaattcatccgtgcacacattttatacttgaattcaaacagaaccaaacacacagcagcaaacatttgaactaaaaccaaaccaaacggtacatacatatgattacgaacgtcgatacagagaacagaagtttacatacggagagtatatgaacagcgttgttcgtgcattgccattgcatctagcagcaatgcacgagcgggaaacacaaagtgaagaaattacgagaaaatcaaagctcgatcacaccgagatatataggcagtcgtgtgcatgatggatggcatcgatcgattggccggtgtgtcggggtcaaattcagttagaccctggccgcggcggcgggcttgtggtggtggtcggcggggtagtcgccgccgtagccgccggcgccggcggcgtggttgccggagaagaggccgccgtggagcatggcgacgtagagcagctgcgtgaaggcgaggatgatgacgaaggcctcgagcacgcggaggcgccacccgcggtagccgccgatgtggatctccttgcaggcgaggccgaaggcgagcgcggtgatggcccaggcgatgagcgccgacgcggcgccggcggcgaggctgtgcgcgccccaggagcggacgtggtggacgccggcgagcttggaggcggcgccgaccacccccgcgaggatggcgaagacgaggaagtagaaggtggcgccgttgccggcgacccccgggtggttggtctcgccgttgatgtagtggttgagattccagctcgcgaacccgatcacgatcaagtacatgatcagattcagcaccagcagcggcgcgatcatcgtcctccctactccggccatctcgtatcaaaatcacaaatcaacacaaattagcaacacaattagcactggtttagctagctagctgagagctactgtgattaagtgaggagaaaacgtgctggttggtggagggatatataggcggggagaggggtgacacgtgtgggtggatggggatggcacgtgtcggcgtgtggcaaggggtaggggggacacgtacgcgcggggccacgccacggacgcccggcttctggtgatttccggagaggcgcgacgcgagggagacgggggtaaagaaagcgtaaaaaagtgcagcgcgcgcggcgtcggcgtgtgcggaggtggcgacgcgcgggcgggagatcgaggggaggagaagcagatggttccggactttcgccgcaagcgcctcggctcggggtcccagaggcggcgtacgtggcgggcgtggttagagcacccgcaatgataaagtaaggtgctatctataaaacatgtacatctcagcaatagattcgattaatagtaaaccaccttaatagtatatctacattggtatctataaatctctcatgcattgtctcgtttttctctatagactatctctaagttagtagatagctttgctctctctcttcatttaataccttccaagtagaaaaatatgctgacatggatctcttgtagagagcttatagataaccattgtgggtgtccttagcggctaatttaggctaaagtgtgcgtggttttacttactctggcgggtgtggcagcaggaggcagggttagctgcttgctttaggtttgatgatgatggtgttgctgcctcttttttgttcctcctttctttgacgcctagtgcaaatgtgcttccctgttttgggtttacgctgatccggcctactccgtacttcttatcgtctgcctaagtaatgcagcaatctggagtctgtactccctgcatttcaaaatgtttaacaccattgactttttaagtacgtatttgaccattcattttattcaaaaattttgagtaattatttatttttttcatatcattttattcattattaaatatacttttatgtataatgtatacatatagttttacatatttcacaaatttttttaataagacgaacggttaaacatatgctaaaaagttaacggtgtcaaacattttgaaatagagggagtacatcgatcctcagaatctttcgagcgcacatacgtggatgcagatttaaccatggtcgatacgcgccactaggccagtcagtactcccccatttgtgcattgacgaatttaaattaagaccttcaaccataaaatgcctaatcccttgtttgctgggttttaaatcttactcctctgtcaaaacaaaccaattatagatatgtatctggacaatatttatgtccagatacatcctttaggattagaatttttagatggatggaatacactatactagtacgagccaagcataatgagatcttctatccccatggggctgtcctgtcaaactggctatgtgatgtgcctatccttctaatcggaggctgttgcctctttgatattaaaaaaaaaaaccggtcagaggttcgttgctcacaaccacacatgcgtgcaatttgggcagtagtgggctagtggcgtacgtaagctgccaatttgggcccggccttttcgcggtggctcctgccgccgtcctgcgtcttctgccagagtgctgtaccatctcgacatccttttttgagaaatgacaacaatctcgacatctcgtagtctcttaggcgtgggaactggcatgtgtacaacaaggagtacgttgtgattttggcctcgatcagttggctggtgattactgatggccgttatgcggtacggagttacaaagttacaacaccaaaattacgctgtcatattgtttgtaggggtagcaaacaaacaccttggctaaaatgttgtccaacaaacttcgctgtcacattgcccaagttcgatgaatcggtcacgtcctcctgcatatgaaattgatctacttaatctaggttgcgagataactactttccataacaatggataccagttgatacttttccccattccataatataagacttgtttcataatatagagcatgtatgtatgcatgccattaactaggaaatttttttcactaaaatattattatttaaatcttctaccttcgagatatctaattttaatgggtgcatgcattttatttattaggacaatccaaattataaggtgataataattatttcttgattttttggttaaggtggttgtgtcttatattttcgaatgaaaggagtatctaacatgtatcggctgatatacatataagttactactcccactgttcatattataagccgtttaacttttttagtcaaaattctttaggtttgatcaaatttataaaaaaatagtagcatcaacaacatcaaattagttttattaaatttaatattaaatatatattgattatatgtttattttgtatgaagatgttcctatattttttataaatttgattaaacttaaaaaagtttgacaaaaaaagtcaaatatataacttatgatgtgaaatggaggaagtagctctaataccgatagtactctctccgtcccattttaagtgcagccatgagtttttatatctaactttaatcgtcctttttatttgaaaaaaaataaaaacataagtcacgcataaagtaatacttatgttttatcatctcataacaacaaaaatactaattataaaaaaaatttaaataaaataaacagttaaaattaagcacggaaacttatggtttcactaaaattggaacggaggatgcagtagggtgataggtataccaacaaaaatcaaacgttttaccgttctgttttttttttactgaggaaaatatgagaagcggataacgaaagcctacggcctgttactactgccgtactgcgacggcccacctagcaaacccgcgcttcacgactggctccactcacccccggcctccccgttctccgcgccgaggaataacggataacaaacgcttggattgtcgcctaccgcgacgccgcgaaccaatggccgcctcctcgctcctcccctccaccaccacctccccgcgccgccgcctccccttcccccccacccgcaaaccccactccgccgccgccgccgcagccaagcccccgacgacgctgaccaccaagccactccgcctcgcgcgcccgctcgcctcctcatcctcctccccgcctccgccgccgccgcccgaggaggccgagccgaaggaccccatcgcgctcgccttcgcccgcgccgccgcctacaagaaggagagggacagccccccgccccctccgccgccgcctacccctgcgccgccgccgcagcccccggcggctacggaggaggactcgaggtccagcaaggagtccttcgcgcgggcggtggagtacaggaacggcaacgggggagggctgggcagcggcggcggctccccgctgctcggggcatcgcctagatttggtgagtagagaggtgacgtcggtttggttgtttttcactcccgttggtaaaaatcattccaatccactaagatgatgaatgaattgatgattactgcattcacggatagaaatgaggaatagatggagacagacagaaaaactttttcaattcggatgatagcattctgagtctgtgtgtatgcaatgtccccgggtgatatatatggttgtggtttgaaaccttttgctgattgatgcatatccccgttgtgtttttactagaagcatgtggagtaatgcagtaatggtcactgtatataggtttcaattcctggaagccttttttttttctcttttggaaagtaggcacaaactccgttgatcaaatgcctagaagcactttatttatctgtggaaacatgtttaggaggattgcgagatggttagtccaagagttggtggatccctttgtcattgtgatcttgtgagagtatgtatcttttttttctctcaatacattcttgttttgaagaatgttaccgtttgtacttgcaaacctacaacttgaaaactttcgcatgttcatttgaaccatgacactgtttacttagtttttatgtaagaatagcatagaatcctcactgcgaacagttaaaaaactttttacattgtgcgagtcttcattaacaccatcatttttattgagtgttgtccatgacacttgcttttcttttaggtcaaagtacattttctactgaagatggtgcatttggtaaattcacaaataagaaagaagagtatgagtacgatgagactgactttttgggcctagactttttcgagaaaaagagttataaggggcctccaccaggtttagctccagcagctgatccttttccagataaagattttcctgaagtggagataataataggggaccctagtaaatttgggaagactcatcgttcgacagaggttcaaccagcagatgatagtgagcctgaggaaacctcacgctcaacaacagaagaaaagaaggaagaaaacaagcctgatgaaacaccaccttcaactgttactgagccagaagaggatgaagacgagtacaaaccgacagttagatcatggggaatgtttccacggccacaaaatatttctaaggcggtgatataccatattttctgtatctcttaaagcgttccatgtatatctgctttcagttattagaatctttttcatgtttgcatggtcattttattgttatatgttgaactgtgttcggaggacaatgattttttaaaatgaaactctaatatcctttttgcatacttctgttaaaaaaacaaaagattattgtgcaatcctctctttatatttagtaacttctcctttttgaattcccgtatgattgtaatgctacatttaattctgcaaattatacaacctagtggcaccaggctacttatctatagggaatcaatcaccacaagcttgtctatttgtactgcagagatccagcacaatccttcagaaaaatgtttcagttaaaagtttgccttaacaagggacaatattgacatatccaacatggctgcagaagctacctgcatatgatttataggccattatccaagaatgactgcatgtagactgtagagcgtaggagtgagtacataatatgtatgtgtttttttttaggttaatatgtatgtggtttttatatggactagcacaacctttgggacatacatgaagataatctgtgaaacaatacatttctgacgataaaaaacaatgaagattattcaagaagatgatatttggaactgcatttctttcccttgtttgattgagacaatgtatgtcgaccattgctgatgctatcataatgtatttgatttgataaaattagattagaatgcaaatatgcttacggtagtgccatgtttacccagttctgaattttcctctatttcttcgttattagtatggtggcggaagaaatatacgccttggtggagagactcgaagtgctgaagagaaggcagccaaggataaacgtaccaaagagctaatagctgcatataggaatagtcagaacatgatagttgatgcaaagacaaaggcagagtgcactgaggtacatgaaacatcatgttttgttaattatccttcattgaaaggaattgtcatttttattttatactactgtactagtgtactttatgattgacctagttaattccaagatgatggtcatatctacagacaggtgacctgataggtatcttatggacttgaacgtgctgattttaaaatcctttctgttagaatacccaaggaaaatgctttccccagatcacattcaagttttgaagtttggtgttagtgtagtttagagttgtctctgaatatatgcactgcgttagtatgatctataacagcgaactttacatgctgaaggccttgaaggaaggtgatgagctgatgaatactggaagacttaaacaagcattgccttattatgaaaaagtgatgcaggctgtggacttcaaggtattccattacgtaattggtaatctatcacatgagaaacaccatgataggatattttgtcatattgtcctgttagatgcattaattcggatacattttatttctcaagtatatgcagttctaaattttttgcattgctgcttcactgttatgtcctttcttatttttataccatgtttttttactcatgttgcgcaaaataaattgcgcagactgaacttcatggaatggctgctttgcagtggtccatctgtctagattcactctgcaggtattttcctttgtttttctatgtccttcccctgcattgatgtttttcaccacatatacacctgttttgacttaaatgcacagcaacatactgaatttcataatccctatttttactaaaactaggatttttccactctataaaattaatggcttctatggtttgtaattgtacgtgtgtgcgtgcacatgttcacatgtagctatgcaatggaatgggttaatttgcatattttcacatgcatagttggacttaagttgcatattttgatggaaacatcggtgccatcagtctgcttcactgcattttttaaatttgtgaagcatcttgtgttcataaactctctattttctggacatgtattccatgaaatatcttgttttgataggtccaaggaagccatgagcatgtacagcaaactcaaaaatcatccaaattctgaaatcagtaagaaagcaaacatgttcatgttcagctttcaggtaagcatctcaaatgcttatgcattccctctattgactaaagcactcaactaggctgaggacaatgcagaagttagatatatcatcttgacccatccttgaaaggcactgactatgagctaatcgtttttgctgtcatctgaaggcgatggacttcatgaaggtgaacagctcccctttgccccgtaacacgggctacgagaagtacttcgacaagtttgggggccagaagaactactacgctgccctagacgaacctgagatgggcatcgatcagatcatcccgtacatgctcttccttgtttccccaatattcttggttgcttttgttgctttgagaaaatccttccagttataaaagtcaggaagcatatgcttgaatgcttcaatctttgctccactgacgaattgattagtatgttcctcgaaacaaaaggctgaagaattgatatttgactagtatgcagatatattgacttgattagtatgtagataaaaatcaaaacttatttaatagtattgtcttttgggccggcgtaagccagctgttaggcaggctagtctgagagcctgtcttcagctgggctaggcccatgtcaaagataaaaccgtttaccaaatttctaaagtatttggaggtacggatacatatggcattctcattaagtataaagggttgtctgaatttcattttttaaaaaatcgaaatatctgaaataatctcgaatttatgtttaattctttaacttctaaattgttgtttcctttttttttaatgtcgattttaccactgctttatatatatatatatatatatatatatatatatatatatatatatatatattactagctccacaaagcaataaaagggggaaaatgcaaacaaaaaccagcgtgatacagtttgtatagtactggttttgaaggtacttattaccatttacttttttacagaatgtcaacactctgtctgtaattttctatgccacaattggttgccaattcagaccacgagcatccatccccttgattctcccctcccagtacagtatctgtgtcttttttctgtgcgcgtactagggctaccaataaatttcatgcatgttttttcagaggctaatgaatacatcatgttagtactctatgtgtcctataccgtattaccgtgttaatagtgttgttagagcagcaggcatttgagaggtgcgcagcacatgtacgtgcaggccggccggttggttggatcaaatctggcgtgagcgcccaagtctttgacttgaagaagaggaataatgtgccaatacactgccatgtgtaggaaaggctgcatagctttcagtaggcataggtatgcattgacccaattgagtaagtatatataaataaatggatagaatgtattagcactctctttgattttctaatatactatgatgttgttaactttagacatacataaaatcacttggtttattaaaaaatacataaatattatttattttgttgtgatttgttttatcattaaaaatctatttttgcgtatatgcaaataattttctaaacaagacaaatggtcaagtgttcataaaaaaaatcaataacatcatatattaaaaatagaggaaatattagaatttcaaactgatttaattgaactactgtgaatgaaataaatacgcataatgctcaaataaatacgtataaatgctgagaacggaacagtgaagaaagttacgggagttgtaaagtcaagggacggtttcaggacggttgacaatgccgcaaaggtgaaccgtggctgcttcttcttctttctttccttgtgggcacagcatctgccgaaaggcgtctaaagccgtcgtcatcgcaatcatccgatttgacgccctgattttaatatggagttttgaggctaatgatcctcgtgggtgctgagcctaatctgaataaattagggaggatcgatagctgcttggttgctttgactctggtatagtggatggaattttttaggagtttttgtattgatcggagccgttagcttttgctgtgctagcctcagcttcgtgtcctttgtgagcccgcttggatttgttaattttggttttaaaaccttgagtgaaagaataacttatactccctccttactcgtagaagttgttttggacagcgacacggtctccaaaacacaatttgacttcttgtttctataaaaatatttattgaaaagtgatatatgtatacttttatgaaaatatttttcaagacaaatctatacatacaatttctacattttcaaactcaacaacttgagagttattcatgatttatattcccaaggtttgacttaaacattgtcttaaacggcttcctttatgagtacggagggagtactagtactagtccgcgggactaaaactgttaagtccctatcacatcggatatttggacactaattataaatattaaacgtagactattaataaaaaaacccatccataatgttggactaatttgcgagacgaatctattgaggctaattaatccatgattagtctatgtgatgctacagtaaacattctctaattatagattaattaggcttaaaaattttgtctcgcgaattagctttcatttatataattatttttgtaagtagtctatatttaatactttaaattagtgtctaaatatagagactaaagttaagtccctggatctaaacaccaattgatagtgttccacacagccgaggaagtagctagcttccgaacatcttatcagctattaggaaaaaaaatgcaggaaacgaaagggaatgaagaaaattcctaaaaccaatcatagaattatattctagaaattcaaaatcaataacttatactagtagagcatatactccttccatcctaaaatataagaaattttagatgaatgtgacatattctagtactacgatcatatcctaattcttaatctgtgatgaatagccaaatagacagttgatttgtgataattattcaatggtagaaacagatgaatctttcgtaatattattttaatctatttttcaatttttcaatatatttttttgattttaaaatattgttataagaaatccatatatagaacgttttttttaaaaaaaatcatactttttagagacagctgttagggtaaaaaaggaacaagctattttacctggattaatctgagacagctctcggctctcaccaacaaaagccacttgtttcagcggacctactccgtacacacacaaattctgtctagtcagactgagacacattattactcgtcactgacacgcagtagtagttccactggtggcgttaaaaagaaaaaagggagagaaaaacagctcccccccggagacatcagacaatagccgttggaggtcgactcggccagcagaagcggacagagcgcgcacgagcacgaggccaccaccccagtaccccaccccacactctccaaattccccgctgatgaaaaaaatggccgcctcgcgctcgcccccaccgtgccgatgctgctgctgctggtgtcagggctgaggggagcagcgacgacccgggcaggtagtggtagtaggagccaaactggagtacggagcacacaaagcgccaggtgggttttgaatgcaagctgcgtcggtgcgtgcgactagccgttgcgagttgccttgccccttgtccaatttctcccgtgcccgtgcgcgcgagcctccgccttgtctcggcgggcgggtggtggcgcacgggaaaaaccaagcgcgggtgtcgctcgcggcgcgcgcggcgcgggggttcccaccggatcggacgcgtgatcgaggtgtcgtgacggcgccaacgggctaggcggtcgggtggagttccgcgccgacgagacgacgcgttggcttgggttgggttgggtttgcgtgcgggagccaacgcccaacgggagtggacgactggtgggtggagtcggtgtgtgtgtggatcgctcgctccagggggtggtgcgaggcgagtgcgacggagacgcggttttctgcgcgtgcgcgaaagctccaaggaatcgaaaacgggcagaaacatgacgggaaaaaaacgtggaaattggtgtgccattttataatcgggattgctaaaattatggcatcatattttcacttaatttcagttacttttacgctcctatttctcctatctactctttaaaataaaaacaacaaattactttaatcatatataattctcttatatatcatgtatttataaaaagagaatccaagaaatgacattgacaagcgtccaaatctaagaaatgcaatcaactacaaatatgagttttaaaaaatgctatcgtacaaacgattttgtcccaaaaatatcatcgttgttagggttccgtccaccccatgccattaaatacattgttcatcatatagcacttaacgacgcgggatggatggaaccctacggtgatggcatttttgggacaaaatcgtttatacgatggcatttcttagaactcacacttattgataatatttttttagatttagacgtttgccaatagcatttcttgggttatctcttataaaaatcatgatgtaagtattgaaactaacaatgtaaattatagtgtaagtttcaaaatttgtagtgtaattacaattgtaagaacgatctaactatttttggtgaaaaatatatcatcataaatatagctatttccccatcaatttttttcttttaccaaactctcccaaccagttttggtagtagtatctgtcaggagttggtcatctataagaccattattccacatgagtttccaaaagtcatgatccttttttggaggagaagttttcaatgattcataacctattaaaaaaacgacctcaaaaaagaatactcgtcctagattggtctaaatgaggccgaaggtgcgatgctgcaggatcaggagcacgtcctttgcgtagctatttatctggttgttggttggcagcagttagttggtnnnnnnnnnnnnnnnnnnnnnnnnnnntgaacgaggctttactacggcggatgtgtttgttgattaggacgtgcagtgcaattgtacaagtgctccatcaattccataatataagagatttcgggtggatatgacacatcctactacgcctatccagattcatcattatattagtctatcaagattcatcattatactagcatttgtcacatccacccaaaatctcttatattatagaacggatggagtatataaatgatgtactctctccgtccaaaaaaaaagataatttctggaaatgaacctggacaagcatttgtccacattcattcttagaacttgattttttatgggacggagggtgtatgcactaacggtccaccatcacttgttattttcaggagtacagattaactgtacagagccatcattttcgctcgtatatcagcagttgggaaggcagggcactggaccctctccttgtcctgggtagggatggcaattgtacccgtttgcccatttacccgtgggtaaaaactctattagagttaggtttgttctctattttatacctacgggtatcttattggatcaaaagttatgcccgatgggtagatgggtatgggtatgggtaatcactacccatgcccgctttgaccgtttacccgcgaagtctaacttacatgtaggctaggaacaaaatccactagaatacataagccacgttcttctacggtttcccttttatttcccttattatttctcttccccttactctatcgccgtcagaggagagacaccacaccgaggcggagaatatttgatgttttaagttcaattcaaacttagaagcttgtagactttttgttccactgcttttgttgtggcgggtaaacaggcacgcccgcgggcacaaggcgcccgcgggcaatgggcatgagcaaccatccttacccgtcatgtagtaatgagtatacccacgggcacaaataatctcatgggcatgggtatgggtagacactacccgtgcccgtcgcgccctatttccatccctagtcctgggtgttactttggtccttgaattttactacagcattttttttttgtctaaatcagtccttttaagatagcttttggggttaaaatggttctaggacgcacctttacgttaagttacgttagtaacagtgtaagacgactcagggaaaaaaaagccttgctaataatctgataatctcaatgatgaaaagactgttttctcatcgtgtctccatttgagactcaaaatcagctagctatgaatagggtgcagggccgactacgagtaaaattttattattgttgttgttgctgctgcaatggaagatgtatatgtgtaaaataattttttcatcatagctagacatcaagagcccaggcttaggtggtgtttggatcaggtacttaactttagcctctgtatttagacactaatttagagtattaaatataaactgcttacaaaattaattacataaatgaaagctaatttgcgagataattttttaagcctaattaatctataattagagaatgtttattgtagcatcacataggctaatcatggattaattaggctcaatagattcgtctcgcaaattagtccaagattatggatgggttttattaatagtctacgtttaatatttataattagtgtccaaacatccgatgtgatagagacttaaaagtttcagtcccatctaaatagggtcttagctttttcaaattagttgctccacgtttcaaatatacattttatcaaaaaagtttcctctaccgtattgtagaccacttattttaaattatttattaagtttatttattaaaatacttggtttatacaagtggataatctgtaagaacaatccgttcactaatctgttttaatatgatcccagacctttgctaaattatctggcatgtatgaaaaatgaataggtgaaatagtataattaaagacagaacaaattattgccaatagcaattgacaaccagattgatccagaaggcaaaaattcaagatctagtaaagtaaataaagttggttattgtcacaaatatgtttcaatcgatcttaaggatcattttgccaactagcattttttctttaacattgatgatcgtttcccctcaagagacctaacaatcgatcgaccacctcgagcatatctgtcaatgttatacctaattaaaccatgttttttaattagctggtttcattaggtaccactgcttgaatatgcgggtagtgtttgtacttgcgcaggaggtatatatgcattggttccccaagcaactgatcacacactgaccactgatgatttagtgatcagtggtcgcacgcaacttgggaacaaatactagactactcacatcacacaagctgctcgatcgttacggctcgtgaaaacgacgtcacgccatataccaagcaacagctgattaatcaaaagcttgtgatgagtacctcctaatattctctaaatcatcttaatgccaggcttgatatatataagaagattgctgaagcgataaaatattggcagttgcggttttggcttgggataagttagctgcacgtgtgtgcatctcacacgtactccgtatgagatgcaacgaacgattgatcaatcattctacacgcccggcctgcagttgcagagatgaggatggcgatgggatttgttagtgttctgcttgtccggttctaatgatttgttttatcacccctgtttagattccacattaaaatttttcaccctatcacatcaaatatttgaacacctatataaagcattaaatataggctaaaaaataactagttacatatattacgactaatttacgagacgaatcttttaaacctaattgctccatgatctaacaatatggtactacagtaaacatttgctaaggacggattaattatacttaataaattcgtctcgcagtttataggcggaatctgcaatttgttttgttattagtctatatttaatacttcaaatgtgtgtccgtatatctgatgtcacgcaaaaacttttcacctctaatctaaacacagcctatgtcatcaaacaagcagattcaatcatggagaaaacagaccagagaatgcagtactatggtcttttggattagatttccagttctttatgggctatatgtatacgtacgtgtaatggataaatgtccttcttccttctaaaattaatactccctaagttccttttaaattgatacggttgactagtttgacttgtttactgataaaaacttttgaaattacgatgttttgatgaaagcaaatagtgtagttatatttgtcatgcaaagtacttgaacaataatatgatatcttcttaagcatttataaaccttttgaaagaaagatgagatatccaagtttatatatgaatagtatttggtgtcaaataaaaaggacaggagctatggagggagtaaaaaaattttagcctatgaaaatgtttttaacgtcggtgcatgagtgtgtcggtgttcatgggtccataaaaacaccgccggcaaagttagtgttattttcacatgcaggtatcctaagacaaccagtaaattaatttttacaagcgtgccttgactggaggagtcctatgcattctcacaaggatacattattttagtatgtttgttaaagtaaggatgatgtatctgtcaaaatggtattcttagtgaattagacatgttatactatcatgaccatatattgtatttagaataatcagtgttaaatcaaacatgttatatattgggaatacaatgaattcattttttagcatttctaaaatgtaataattataaattttagaattaataaataaatggagttgtacacatcttggacactcaatttaattctaaaactccaaattaataattaacaagttgttattgacatagaatcttccttttaatttaaaccatcacaaaaaaatatatacttttaacatgttattagaattttcaatattaatttgtaatatcagtaacaatggcccgggcaacacatctagatgacgacttgcaaacatcaatgatgttaaggctctgtttgaggagaaggagatagaaaagattggaaagatacgcaaaacgaggtgagccattagcacataattaattgagtattaactattttaaactttaaaaatggattaatatgattttttaaagtaactttcctatagaaaatttttataaaaaacacaccgtttcgtaatttggaaatcatgcgcgcggaaaacgatgtccctttttcacccaatcccccagaaacgaacgcacctagaacaaacacataatactaagataacttcaggacatcaacaaaagatatagcttattagcttgtgcttggttaaggaatcagcaacaacctttttgttttcagaatagctaacaatagacttgtggaagattagtgtaactagatcagatatatgagtatatgatatctgaaaatcattgcattacgacatttccacgatacacaacagattaattgccgcacagccgacaataaccataccctttctgtttagtgaaagatcgatgacaaaagttgaaagttccgaacaagttaacgacacgtttgatatcaaaagcaaaagcaaaccattcgccaaaagataaagagatacatgacattaatttcttaaagaatattttcaaaaataaattcatgttgattgcacacggaatttcgctgcggcacggctgcaataaattaacgtgaagcaaatttgtgagctgtgacgctacagcatcatcaagccatcaaatggaaaaaggaaaagaaaataaaattagaggttgcattgggcccctatgtgctacataatgaaagaccaataataatccccgagaaagctactactaaatagtaccccaaatctccatcggtaaagtggatttacgcgtcagcatcttgcattgacgccccaataaagctctggggatcccctgagacgaacgttcgagagagggcatttagacctgcttatctttttgttaactttgtatcagtatcagccactccgtaccacggtaccaacggctaaaccatgtgccattagcagtaagatttatgtgtagaacaggtgaagttcgaattctctttaattaagtaaaattgtttactctttgtaggttgtcttaattttacgattactaccattatactcgatttgtaaacatagatatagttaaaagaacaataccagtaaaacttcagtatcagtagttattatcaatagttaagatgttactttttatctaataatactgttcattaaattgtagcttcaaataaatttgcttctagacttttgtcaaaccaccacgacaccgaacgtacgaagtagatgaatacgacacagcactaccgttcgtacaggaacaaaaccttcatccctgcgtattctttttagccaacatcaccatacccaaaagtcttaacgtcttaactgtgctcgatagtacttatcatatatattcccaagctgttaaattacaacaaactttaggaatgagtttatgaccaactaaccaaccaattgccctcttaaaatccattcaattaccagctcacaaaaggataccctccaaggttcatccacacgcacaaagttgcacacagagtttgaatccactgaagatccacagattcaaaacaaacttttgtgttttgtcagtgtccaagccttcccctcaaagatgccacctttgagccgcccacccactctccctccctccctccccttgctttccttgtcaattttgtactcccatctctctttgttattatcccctccactaatccatcaacaccttcttcttctttcttcttactccatctccatccaaacctctcttcttcttcttcttttgctttgcttttctcgccgccgccgtccaacccaagagagaagccaagagcgacaagcaaacctgcaagtctaacaagccaagaaatccgagagaaatcgatccaaggaggagggcggtgagccatggtgcggagcaaggaggtgcacaagaagcccaaggacccgctgatgacgccgccgccgtcgtcggccaagaagaggggtttccgggacgacggcggcggcggcggtggggggagcaggccgaggaaccgcgagggcgcggcgacgtcgctgacgccggcgtccgtgcctaactacatgagggggacgagcagctccgacgccaaggtcgggcgcggggcggcgtcgtcggcgtcgccgcggcggaggccggtgcgggtggtggcgagggggaaggtgctgttcccgaaggtgtcggccgccgccgccgccgccgccagcgccgggctgggcagggcgacgtgctcgtcgacgatgaaggaggccaagttccccgacgcgctcgacctcgcccccggcgccaccgacgccgagggccccgccgcgacgcgggtctgcccctacacctactgctccctcaacggccacgcccactcgccggcggtgccgctccggagcttcctcgcgtcgcgccgccggctcatcaagacgcagcagagcatgaagctcaggggcgtctccgccttccgcaagggcgccgcccaccagaggccggaggacaccaacggcgctggcggcggcgcgagggtggcgccgccgccgccgctcatcgacgaggaggcgctcggcgacttcttcgtggaggtgtacgccggcccgcgtgtgagcacggacatgagctgcagcgacatgtccctggacgagatggacgccacggtgaggaagatggagttcgtcgtcttcgaccggtgcggcgccgacgagtccgacgagaaggggaagaacgacctcgatgtctgcggcgacggcggcgacgatgacggcgaggcgaggccggaggagaggtttggtgccttcagagacagcacgtcggagtgcagcgacgcgtcgacctccggcgaattcgtcgaggagttgccgtggatcaggtaccaggggtatgaggatgatagcttggatggtgaattttcagacgaacacgggatcagagacgaggagatcactagagcagttgtttctgaatttcaagaagatcaagaagaagagggcacatcaggtagattgggagatgggtgcgaagatgaggctgctcaacaacaggaagaaaatgatgagcaaaacatctcagattttgcctgtgaatcggagatcgcgtcggagcatgaaggtgttgatttcagagttgaggcttgtgaggagcaggagagagtcagtgaagacaacatcctggatgcggcacatcaaaccgaggtttgtagagaacaagagatgcaagaagagaaaaactttgctgctgtctgcaaattggggattcctgagcaggaactagcagagacggcggataatatccctgatgagtgctgcaaagaggagacttcaatggagcaggacgaaggcggcgatgggaccaacatggagtctgaaagcatttcagaggttgccgagcatccgaatgtggaagatgaagagaacacgcaggatgatggtggatctgaaatggagatatctgaggagatcatctctggttttgggtgcgaagaggatttctccgaggaagtcacttcaaaatatgtctccgaaggtgaaatttctgactccggtgcgattgtttccctacatgttgaaatgcaaaaacaaccagtggagaaccatgcctttgagcaagatgacagcagcactgcagacaatgcatttcatcaagatgacagcacagcagacagagcatttgatcaagatgacatccgtgcagatggctatgatgactctcagaaggaattggatattggaatgagagaattcagagttgcctccgaagaagttggtattcaagaagctaatagtgatgatcctgtggactgcacagaagatgctaacatggaactgggtgtattcttgtgcgacttgcaagatgcttctgaaggttctggtatcgctcaagaaagcagccaagaaggtaactcggcatgctttaatgatggagctcaaatggtaccagatattaccacacaaacaacagaagatgcttctgaagaatctgataccgctcaagaaaccactcttgatgataactctacaccactcgctgctggtgcccaaatggaattggggattggcacaagtgagttgattgaaggctcttctgatgtcactgaacagtctggtattgctgaagaaacctgtcaagatgataatgctggatatttcagtgatgatgattctcaaaaggcaaccgtgataaccacatgccaattgcaagttgattatgaagaaaatgttattgctcaagaagctgatgataactctacaggtgtcagagatgatgctcaaaatgaacctgagcaaacatgtgaattggcaacatctgaagaatgtcattttacccaaaaaactattcaaaatcatggtgctctagaggaatccgtggttatcgcaagtgcatcagaagatgctcatgaagaatcagatcctactcaagatggtcatgaagaagactattctgtaggtatcaattctggtgctcagaaggaaggagagcttgacacaagtgaatctggaggtgcttctgaaggaactactgtgcatcaagaggatgatggacacgttaacaccacagatctgaatggcagtgctcaaaaagagattactgtctctatattagatgactctgaagaactttgcagtagtgaggaaaataatcaatcatccaatatgctaataccagagttcagcgataacttcagtgctgaagagccccagaaccaagattctgttgcaaaagaatcgtcccttgatgacatatgcaacgcattcagcgggatgcacctcaaaggagatgcatatcttgatcctactgagtccatgacttgtccggggaatagattgatcattgctaggaggaggagaacaccggaagaggaggaatatttgagaggttttaacccaagggctccaaattttcttcctcttgaactggacccagaatcagaaaaggtggacctcaagcatcagatgatggatgagcgcaagaatgctgaagaatggatgattgactatgcacttcggcgagctgtgaataatttaggccctgctcgaaagaagaaggtggagcttcttgtccaggcttttgagaccgtcctaccgcacgacgaggaagagaagaaaggcatcacaccaacaaggcctgtccaagcttgcaattgataattgtagaggtaagaatttttgacgagctctaatagttgtaacaaattcctaaatacattggcttcttacatgcccttttttgtttgtctattgcagttagtggtcgaactaatcaagatcttgactcgcgagctactaactcagtggtcgctgcagtattatcgccggagacctgcttgaagttgaatgagagaactacttactagtttactggaaatctctagtttgggttgtttttactgaggatctctagttgagtttcttaggagctcaaaactgctccacagggaaagataaccactcactgaatcaaacagattcttatctagttactgagctgcaaggtaacagctcaccagctaagtactgtaacgtgtgtataaatgtctcttgtgctagtgtctgatatttactgatgagtgatgactgagactagcaaaatgtttagggtggttgatgccttagacagagatgaatagaattcttctggagtgcagattggttctggagtatgatcatacatgtatgctagtactactaatgtgcatttgtaacataagcagctcctgataatcctgggattgccatgagtgcacattcatccattatgtccctactccctactcgtatgtgcttatgaaccaaatttctgaaatttggttaccatcgtcagtctacttcattaaccaaatttctgaaaaaaaaactaattccaatgaaaatcttgtaaaaattctgtgtttcaaaggacacagaactcctgtaaaattccggtgttctaaaggatcttgcgactgtaaatgtaaatgtttctccctgaaggccatactgttgttcttttgtgctcttgaaaggatgcttcaaccaatctaacaattgcagtctaactgtacagaaaaaaaaaatccagaccaagtcatcggaatctgaatgagataaatccatttcaagcagtctcaatctgcgttgacacgacaacaacagatgggcctaaatcgtacaaggagaggcgcaaacggcagccgaccatggattttcctgacgtgacacgaaaccaaatatcggcattactctctactgtacgctgcttatccaaggtcaccaagggcgtgttatactctgcacaatttgttttagtttcaatttgcatctattttgctgtcagatagtttacttacatcttcagtaaaaaaaaaaaacttgtaggtagcaacatcatcatactacaatctagtttgagttatgacccgacttgagcatttttcatgcatttcggatgcattgttcccctaaagaaaaggcaaatactacttttgtattgtgttatttcacatcttggtatctatcgaattgaagatatttgacctacacctcaaatccgtagtgagaactgagcagcagactattacagcctcgtgatgctgaattttcgttggcgtattacagcagactattagcattgttatggccaaagaaagaaagaagattcacctttcaatcgaaaaaaaaagagtatgcttgtaatagtcacaggcaacagaaaaaaaaaatctccaactgtctcaggtagatttgctttctcagtaccatgaagaaagctcatcagatcttggcatcatacatggacttctgctatatatttttcaggccatctcaaatgtgcaccggcctaaaattgatgctatgcaggaacaaaattccttctgatttactgtcgtttgtgtctttcaagccaatcatctcatgaattcagcatcaataggagtacttgctaaacctgaatatacttggcattcacgcaacaacgatcttagttactactccctccgacctataatataagaaattttgaagggatgtgacatttttttaagtactacgaatctagagaaaaaatatgttcagatttgtaatactagctaggaagtgtcacatccctccaaaatcccttatattaatatattatgggacggagggagtacatatctttcaagaaagctttatatagccgaccataatccagtcatctacagctttacatgtcgactgtctttcctctcctgcctcctggatgatacacagtgcttatcctcaaacatctaaaatgcaccatccgcggaattttcttgcacagggctgtgcaaatttcagttttcctttacaaagatacaagccgacggttcgtgatccatggtcggtcaaaaaaggggaatttaactatttgccactttgcagttattttttttctcttcttaagagatgatttcttaactatttgtcacttttacccacgtgacataccaacatggtaacctagagtgaaaaatggtgtgagactcacagacccactcgtcagtttctccctcccccttcatctctcccctactcgtccacggcccccatcgacgccagcactgccccgccgctgaccaccgatggccccacctcgcggtcgagtagaggtgggagtggaggacgacgagggagatgagaaggaggagcaccgtcaccatgggcggacgcactggaacgggtcagggtacgtggcgaggacgcgagatacggcgtttgcgacgtcgcaccagagaatttggggcggccgccgccgtcgtcggggaggaggtcagcgccgttgaggatgagcggcgtggaggtcgccagcatggggacaacacggcggtgcgggcgccgtccttgacggggaggctgcttatgcggtcttccccctcctcctccttctcgtcatccccatcgccgtaggcccaagcagcggccggtgacgacctctcacacaagagttgccgaggggttccaatggtgggaggtgacgagaggcctcacagcgtcggctacgaggtgacgccatcggtggtcggcagcggggcgacactggcgtgtagagcagcggatcggtgttggcgtcgaaggcagcgcaacagggagtggaggcctgcgcctctgtagctcggggtgggtggatgaggcggcgccatcggtagtcagcggcgaggcggtgccggcgtcgatgggggtggtggacgcggggggtagggatgaaaggggagggagagactgacaagtgggtcccacaccattttttactctaggttgccatgttggtatgccacgtgggtaaaagtggcaaatagttaaagagaccactttttaagaagggcaaaaaaaattgcaaacctaaaaagagtatttggataatcgccaaactaaaagtggaaaatagttaaatttcccgtcaaaatatggagcgacgctttggaaaggggaaaaatacaaatacccctttatgaatcactggtcttttcgatctcccccctacaacttaatttggtacaaaacactccctacaagttttttttttcacttccaacttcccatctcaggccccataggtctctgttgtgatgaacgaagttgttccttgacaccaaatgggtgtactttgacctcctttcaccttttgctctttgcatgcttttattccaccagtggtatgacggtaaaaccacgacgacaaacacgtacatactactggtgtattaaatcctattcctaacaagagaaggcacatgggacatctttggtcaccacactagagatccaaaaatcacttaggctgagttcggatgggggagatggggaacctaactctcctgtgcacggaaaatggagcggtccattaacacgtgattaattaagtattagctatttttttttttaaaaatggattaatttgatttttttaagcaactttcatatagaaactttttgcaaaaaacataccgtttagtagtttgaaaagcgtgcgcgcggaaaacgaaggagaggggatgggaaaaggtgcatgcgaacacagccttagcgtgatgagaaaaatcacccaaaaaaactagatacaggtgggaagtttgaagggaaaatagacttatggggagtgtttcgcaccaaattaagttgtagggggagattgaaagaccattgacttgtaagggcttatttggattttcccccagtgaaaaccatcgttcgtattggcttgtatcttgggtccgttagcatgcaggtaaagaaacaatggtaattcgtactacctctgtcttaaaataagtgcagccatgagtttatgcacccaactttgatcgtccgttttatttgaaatttttttataattagcatttttgttctgataagatgataaaacatgaatagtactttactcgtgacttatgtttttaatttttttcaaaaatttttaaataagacgaacggtcgaagttgggcgcgaaaaactatggctgcacttattttaggacggaggacgtatttagttaagtccacaggctaaattaaggcatgtatatagttgagtttgggttgttgacttttttggggcccatgtcgttgacttttttctccctatcttagccgtgtttagttctttagccaaaatttttgtaagtatacgtacacatatttgaagtattaaatgtagactaataacaaaataaattacagattccgcctgtaaaccgcgagacgaatttattaagcctaattaatttataattagcaaatgtttattatagcaccacattgtcaaatcatggcgcaaataggctcaaaagattcgtctcgcaatttacatgcaaactgtgcaattggttttttttccacatttaatgctctatacatatgtccaaacatttgatgtgatatttttggccaaaattttttgggaacgaaacacacccctaatcgaacaaccagctttcttaatccaacagctacggttcaactaagggcctgtttagttgaagggactaatccattagtccctaaaatcccaaacaggtgactaaaatggactaaaagtacattagtccattagggcttgtttggatctatggactaaattttagccctgtcacgtcggatgtttggatattaattagaagtattaaatgtagactaatgataaaacctattccataaccttagactaattcgcgagacgaatctaattagtctaattaatccatgattagcctatgtgatgctacagtaaacatgtgcgaattatggattaattaggcttaaaaaatttgtgttgggaattagctctcatttatgcaattagttttattattagtctacgtttaatacttctaattagtgtccaaacatccgatatgacaggaactaaaatttagtccctggatccaaacaccaccttagtccctgtgggaggagcttataggaattaaaatcgtttctttcccccactgctcccgcgcacaacctatcctcccattcctcgtctctgtctttgctccactcgaccccacgccgccgccgccgccgccgcctccctgcgcaagctcccgccgctgcttcgcgcaagcccagcctctgccccacgcaagccctgccggtgtcgtggaagccgccgctgctcgtgtaagccaccgcgagtcgtgcggcagccatggcaggcaatgaggaagacacagtggatttcttctcccagtcgtacacacatcacctggcggccgccatcgacgccttcaagtatggcttctcgcaggggtcgtcaggccaagctggatctggcgccggtttccatttttgggggaggggatctgggggcctggatctgtactctcagaccgacgccttccccgagttcgcctcctactagcagatctttcaatcggctggccatgggttacctccgattcacctggcagcagatccaccgtcgccccgtcgcgctctccttgcccgggggtgagacgcgatagaagtacttatgttcatatttcgggaacttgtgatttgtatttctgttttctccacctgttcatgcgtgactgacctggtagagtgatgatccaaacctgttttgcgatgaggacagcagtgatgttctgcaacttgttttgcaacctgatagaatgatgctttgtaaagaagaaggcggcagccatgggcaggagatggtcttgcggtggcatagttttagaggtaacatagtctttgtatagtgtatttaatgacctttagtcacttttagtccttacatccaaacagatatagactaaagtttttagttctaggactaattttagtctagggattaaaagatccaaacaccctcaaaatacatggctcattctaattgcatttcaggattcacttttccctaggtaagatatgtaggctggtaaaataactcataatccagatttattatagtaggatcgatgtgtctcatccaatcaaattttcttatattttaggacgaatgcatatatatggtgatggagagtgggttaagtagatgtttgcgacacttcacgctttagggccccatatatcatgtcccaccatatttcactttcttttttaagtaaccaatcctctagacacggattagtcttaaccacactgcatagagaagccactacatctattttaaaatgcagctatttttatcaaatgaagttctatttcttcacatatcattccttacaaccaatcacaaccattctccatttatttttttcacatacttttccttttcaaccaatcacaattattttctaataagttttatttacttttattaatacccataccaacctagaaattatttatattttagaacagggatagtagtcatgggcacatctggcccttttctttcccgtgagtagataaaagaggcgcagtgccagtataactttgacattaggtaaggcatatgtgctacgacgagcagtgatgttcaagaagcacctagcatcttttgtctgcagctcgaacattgccaattacaagatcaattaatccaacaatgtatactaatgtcgtactccctctgtctcataatataaaacataatataaaagacacgatcaaactcgatacagatcaaaactattctttagcttatagtttctcatacactataaggtttatagcaataaaattatatatatgaaattaaattcaaatatcaatccaatgatattattttcatcaaataaaattcatattatatcaattgttggtcaaatattttaaaacttgaatttattagataggatggagggagtaagagtaagcgcatccgtaaatatgtgcacggagcaatgctactgctactactcctcatgcacccatgatgatccatgatcattaaagcattgacaagcgttgacaagaaaggaataaaggttaacttgccaatgcttgctgtcagctgccacatatattctcagagaggacatcataatctgcctatataataactactactccaaggagtaatacataggcgcagatccacgtatcaattaattccaaagtatgcggatcacttgaagagagctgacacttcaaggtgaattacgcaggtatgcctccatcgagttccatggatacttccacttccacgagctctcccaattttaatttcatatatatatatatatatatatatatatatatatagtagtattatttaacacacacttgtgtgtacatcttgcacatgtgtgcaccctgccatcccctctaccttaacccacgctcaaagtgacgtaattagtgatgaatactaaacttcactagatttctactccctccactcataaatataagcacccttatcgccttttagcaaagattaaagtggaaggaaagccaaacaatttaggttttattttgcaacaatgtcgatcattaaatgcggtcctagtaagaagaataatataaggaaggggtcgatgcaaagtatgaacagtaaaaatgtgccatgaagttttatatttatgccatgaatttcacatacttgtctttactagatacctctcaaacctttttacacgcggatcgtcttttagtctgtttgtaaaaaaaagcaagatgtaaaaaaaaattcattttggagtagcgtggacaaattctagtaggaatgcctatacttgttgatggggagcatattgtagcagcgaccagaatattttattgatattttacataataatattttagaatactacctctgtcctaaaatataggaagttttaagcttaaacgtgggtattaagaaagtatatggaattaaatgtcaggagtttgcgattggttgagaatataatgtagatagagaagttgttataatttggagcaaattttgaatgttagaagttatattttgaaatagagggagtaatttgtatttcaaatctttaaaaaagattttcaatacagaagtacatgatgatggctccttaaaaaaaagttctacttgtttcacatagagatatttcggacgtgtcgtgggttttattctatatcactgtgtaacccatgaataaccaacatacatgttcattggtgatttttggaagattgcgtgtcaacactaaataaaacattcaataagtgcagcaaagtaataggctaataattatttgatgttgaactaacttataggtgtagaattatggattttggtatatacttaatagttacgaattacagtaacttatgttattgattgtttgtggttttacactagctagtaattgtgatgttctatacctatgaatagatgtattacatgatgttgttgaaaaacccataggtatcagtaaatgcgtaaaaagaaaacccacctgtacccaatggataaccggtattcaacgagtgtaggcatgcatggttaaaattttaggcatggatgtgctataggtgttttgagtctcagattgggtatgctctcactccacccgaacttaatctgaccctatatattgctagttccaatatatagtaatttctaaaaaagcatcatttttcaagtatttcttggaatgaaatcttctactatattttcataattaatcttctccagcattagcctcaatatctaccgcatcatcaccatgaccatcatcaacactagcatctggtttgatattggttgctgcttctagtctatctcttctaacgcttttcagcaataggatcatacttcttatttctagcaggcatgatatatataataagaattgaggaaataagcatcttcctgttttataaataaaagaaaaataatttaatttgaatcaaacattcacattacttttgattcaatcgaccattcaagttatggcaatcgtaatttgattcaaattatgaatttacgatctactcacagtctcagctctcaacttacagtcaaacgagtcgagccgtcgaggaggcaggcgctcgacctagcttggcggtcgctgctcgccggccggttgggcggtcggggtcagggcgcgcgtcgtcattgactgcgtctcatcatcatctagtcgaacggaaagtcgagacacaaactgcagctagacggtttgatgaatgtgttgtaaccccttcagcgattttacatattttaattttaaaagtcaaactttgtaacatattttaatcaaaagttagtcaaatcccaaaaaaattatcgtatccacattataccaagggattcatcgtatatatttattgtgcgatactagaacaactaatattatactccctccgtccctaaatatttgatgccgttgacttttttaaatatgtttgaccgttcgtcttattaaaaaaaatttaagtaattattaattcatttcctatcctttgattcattgttaaatatatttttatatatactatatagtgttacatatttcacaaaagtttttaacgatcaaacatatttaaaaaaagtcaatggcgtcaaatatttagggacggagggagtatattttatagaaatcaatgtcaaattaagttttaattctgaagacctttgaaatcaaaatacactctatagaatcaaaagatggtcctattaataaaatagtaatatgtcatgaacgtatactttaatgtgcatacgatagaaaagtttgatacgccatgctagaggaattgtcccattttctcaaactatttagcttgagcacttaaaccatttaactattaatgggctcatgttatccccaaattactgaaaaggccaacttatagaagcatattttaagttgaatttgtgtacaactatagtgacaattaacatcctgtgtacaaaatggttttttaaaaaagattgcagtttgcacacatttttaaatcttgatttttaaactagaacctatgcaaatagtgattaaaaactccaaaaataagttgagatttaagatatgatactataatattgcaatttatgctacttgtaatgttgatcttagaatataacttgtatagagagaaagaaaaaagatatttttttagggaataaagtgagcaatttattattgtattattgagagagggctaaaatatggcacacaattttcactttgagggtgaaattactacattaattaatcgggaaaaaaagagagtaaaatacatggatgccatgttgatcatttgggtccatattacagtaattcatattagtacatattgtagcgttgcaacaacagcataagagatacaactgtgcagaagtgtataagaaagacataaaagttgttgaacagctacaaccctagcttgaaaactattacctaaatctatgcatgtatgctggaaacgagctagttttattaattctggagagtaaactgatccggaaatatacgtacattatggggtcatgtacaggtctaagggagtgaagtggatttttttcctaatctgaatcattgctaggagaggtttttaatttgaacaaagtacatagacatgaattaagatttaattgacatgcgtgatttataggtgtatataccatcatatttacacgcttagctaggtaacatgtttagctagctcaaacacattcatatatggtgcactaattgaaattaaacctggttaatttacagattcaagtatacagagtgttttggaggcatggaacaagttgatactaagaccattgtgcaacagttcaaagattgggaaatccagatattggtgctcctgagcttttgccttgcaattgctcctcttcttttttggtggccttcgccgccgtaccagccgagtgtggcttagagttttcctatggttgacttacctgtcagcggatttcatagctgtatatgcactaggctacctctcacggcatctacccaccactacaaatgaccatatatgctaccaaacatgccttggaaaaaccttgttgccaagccaaagccatcatgatttcacactcttgtgggcaccattctttctcgtacacctaggtgggcaagacactgtgactgcatttgccattgaggataatgagttgtggtcaaggcacttgctaaatatgatagttcaggtatgcttagttgtgtatgtgatgtggtattccatggcacataacctacctgttgtcccggctgcatttttatctgtcgctggggtcatcaagtatggggagaggatatgggcgctcaagtgtggtagccaggaaagtctcaagagttctattagtagctcttatgtcgcagctttgaagaaattagcacatgacgaagaagacggaattcaggtaaccaaaccggcatcgactgtgcagcgtgctcttaagtgcatgccaggtcttcgggaggtattttctagaaggtaaccatctggaaacttttctttcaaaaagtctctcgatgcacaattaactttcaagacggcagaaatggagcttagcatgatgtatgatgagctctacacgaaagccaaagtgattcaaacagggaagggcaccatccttcgttgtgtctccctcacctccacagtggtggcttttgttctcttcatcctgatgagtggcagcaagcaaaggtattacaactcaattggagttgatgttgcaataacctatatgttatttgtaggagctttttgcttggaggcttgcgccatcatcattgccatggtttcaccgagagcgtgggcatccatggaagctcgaggtggaggatgcaacagcagtttgctcacccgagcaacctgtaggtcatcatgttcatctatgttgccgagtatccatccagagaaaaggctatggtggtcaaactcattagggcagtataactttatgagctcccgcctggctgatggcaagtcgaggataaccgaggagatgatggccattgttggagctaaggaggtgtggagtaactttcggcacactaggcatggtccagtcaccgatgaaatgaaggagcttatccaccaagaaattgataataacaagtagaagaaacctctaaacttgtctcctcaattgttttttgcgcaagctgcttcctcctttgaggaaaccttgttcatgatgcacctctacactgacatgtacttgtacaaggtaagcatataattagatacaattaggagcagcgggagggatgatgatattcaagagaaagaggtacattccctgatgcatacatgcgaggtgatatctgactacatgttcttcctgctggtcacgcagcctgccatgctgcctgttcaacgcaatgtgtatgatttgttagcattggttttgaacgatgccggctatgcacgtacctccagcaaggagcagtttcttgagacagtggctagcggtgagtactcgtgggaccaaccattcatggacttcagggcagcacctcctgatgacatgttgcagcagggttggaagggtttgcatgcagcgctgcaagtaatgttgcagatctgggtgcggctgctgatctacgcggcgggcaagtcccagcacgcacggcggctgagcatgggaggggagctgctcaccttcgtttggctcctcatggcgcatcgggagcttggagacatctataatatccagttccagcttgtggaaaaagagaaagacgggtcagtccgtactggtcctaattcaacaataaccaccgacatatatactcttttccgtttaggtcatccgatcgacatgatcaaatagtactggtggccggtgatcgatggtctctttggactctgattatcttaagccatcaagggcatgtatgcccgcaccatctcgatcgtttccttcatgtggatcataatataatcgatcaccctcggttattttttttctttcttttctttttggttgtgtgctatctgctattatctaataatgtcatttgtattagttgctggttaattttgctgtaattaaatatattgtttttaattattcaatatgcatgtaacggactatatatgtatgtataattaatccatgcacatatttttgtaagctatatatacatttgtaagatttgcttctatactcctcgaaaaaataaatgcacggatgtactagacatgatccacggcgtatattggggtggcccaatatactcaacggcgtattactatttcaaaggggtaattttatcttaggaaggagttagtccatactccgctctgtcccaaattatttttatctttaaaattcaaattttgtcctaaaatagttgtcacaataaactactacttgtcccggtccatcaatcacttctaattcaaatttctcttttctctgcccctaaccaccctcttatatccaaccatataatatttaatagagggtacaatagtttttttctcaaatcttaacctatgctaaattatctagaacgacaactaatatgggatggaggaaatatctatctattttctctcaccgcactagctaatctctcgacaagagtaccgtctcttaatcgcgtcacctgcctccctttcttgctctggaaatacgttcctcccggctggcaaccatgcatcaagaggagcaattaatcaccttagtttcactaattaattagcctccagcgagttgtttgcctttgccatgggcgagtcagatatgatcgcagtcgaagcccagaaggccagaacgaagtggccgaaagcccgaaatccgtccggtttattagcctcatcaccgatttcagctgcaagcaacataacatatatacatatatacatgacccttcccccacccccaccatgactaggacacgtggcgtgcgtagagcggacggcgcgccttttcctttttttttcttttctgtttcttttcataatttatttcttgtttttttttttagtttttttaatacgtatatatacaaactttgtacatgtgtatatatttttttatacattataactgtatacatataaaaaaattatatatatatatatgtatgtttgtttatatacatacgtataaactttgaaactcttattctaatgtcctagtaaagttgttggatatacaaagcttcgcattgggacacaaaaatcatagatggagccaaaactgagagaaacgaataacaatatatatgacaagatacggagattaattagaacattttccttagctgcatcaaagtatttgcagagtacaaccatgtcactcttctctaattccacgaactaaatcctggacaaaagagaaaaaaaataattctgaaaccttgattttcttcctaaagcatgtctcacattttaccttctcctttggtctatatgtacccatcatgtatctatccaaatcgaatttcacatcaactttgtcttgatcagtagtgcttcatcccgctgacgccatgtaagagttcccttgaggccttgaccttgtcacaacgactgtattctacaatatgtttacaaattttgtgttggatttcacgatttagatgaaatttttttacggtttgaatgtaaagaaaatatgccttttttaatggtaaactctattttttagcccttatatgttatttttaatacattttccaccctaacctacaaaaattagtagttttttagacaacacagcgcacccaccaccccccaccccccgcgtgcgcaaaaaaaaaaacacccacccacccaaaaaaagagacaaaaacctttaaaccgaataaataacaccctattgtaataaaggtttaatttagatttttattatgcatagtttgttatttattgggtccacaaccataaaactaatataatcaaaaccatcatgaaatttggtttagggaattatttatccagttttaaaagttgagggtgcaaaacaaaaggcactgatattataatgtagggtgaaaaatgaaatcgggcaaagtgtagggagactttacaagtcataaattactcatagcaaatctgttggatttttctacggtctgaacacccatgtcatcaaattggttgccccaaatttgtcacttgatccaatgcatggctgaaaaattcacaggtgcctccgcacacgccatggcccagcaaggcagacgatgtgaatcacatcatcctcccaaaagcttcacagcctattcttggccagttgcttcgccctcaaccgaaacaaagaaaaaaaaagggagaaagaagagggaaaaagaaaaaggaaaaaaagggaagaaggcacgcacagggaagcaatagcaacgaattcaaccaaccaaccaaccaacccttctgctgcttcaatcgatcggcaacaaatctttctgggtggtctggtgctcaactcccccatcgccattttatgcccgaacctgtttctccagccaatttgatgaggattaatttccaaacgggctccgatcgatctccatgattaaccatccggcgtggtgatgagccgccgccgccgcatcgtcgtcgtctcccgatgcatcgccaggacgtgaggacgaaggaggccgaggaggagaggatggaggagaacaatctcctgcattttctagatagcccaaacgcgcattacagaaggtgccgcattttatcagtatatctgtcgggtttccttgcgaatttctctccgttttttgttcatgcaagattcagtaagaactttttttttctctcttcctctttttttttttataaaggaaatgtgaagaatacgtatccgcgcatgatgatgaagcccattgcgatgcatcaggtttttccccttgctccttcctttcctcttcacgttcatcgtggttaaactcattggggatctttgaaacgaatagattatagatctacgaaaagcttcacatgtatactgaatatcgcacaatgtcgaattttgttggaggagatttccatgatttttaactcttgttattaacattgtgcgaaactagctcaaacgggttaaatggctctcaaattggcattgcatggatggttcttccttggagctgcaatggctcacatttgcatggttaccaaatgccaagtgccaatccaccgaaaaatggggcttgcagagcccaaattgtgatctgcaaattcaattccccatgccatcttattctttatttgtgttcatgaccatcgtttctccaagaaatttgtctaatggtgttcaatgtcgatcatcgttgaaaattaggcggatctatatatgagcataatcttctgtgtttgtttgtctttaatgattcgcgtgtttccgacaatagctgcaacctgcatacaataacatgcaactcttaacagatgtagatctggccaatgcaagggaaagattggagcatctgttgaaacaacctgccaacaagttctgtgcagactgtggtacccctgatccaaaatgggcgtaagtatcagccgtttcccagacatacaacattatccctatatttttgtttttttttataaaattaatgctccttttgttatcctaatagctgatgtggttcttgcagggccttgccttttggtgcgttgatttgcataaagtgctctggaactcatagaagtcttggagtacacatatcaaaggtgcacacgattgactctttgtagttcactttgttctcccatctgctcatctcaaatttggtttcaactcgacttattctgattcaatggttgagatgttctaagagaccaaaggttgtcacgatatgaatctatttgtctctacagtaccaataaatttacactgcaggcaaacatttcgttactcaaaagcatggacatatatgatctagtttgtaaggcataagcatatggtaactgcaaactaatagacctcatactgaagtaataattattcaacaattcactgttcaattgagcacaggtaatttccgtgaatctagacgaatggacagatgaagaggtcaattgtttagctggttcaggtggaaatgctacggtgaacacaagatatgaggcctttttgccagagaactttaaaaagcccagacatgattgcacaacagaggagcgttgcaatttcattaggtataaattacgagtaagctagtatttttgtcgttactacttctgtagattctgctacggaaagtaggattctgatcgttactccttctgtaaattctgtttgacaaaactatgctttctctccatctacgtatatgcaggaaaaagtacgagtttcaacagtttgtgactgatccacagttttcatgccctttacgattgaataccaaacacgcaccagacaagaatcagcagcagcaaaactgcagtgcgcgacatggttttggccatgcttttaggaatagctggaagagaaaggacacagataacaaaggactaaagaaaatggtggggaaaacttacatattctacgtattttaagcgggtattgcactctatgaactgtttttactgcaacatggtctaattttttttttcagacggatgtgggtatggtggaatttgttggattaattaaggttgatattagacggggcacaaatcttgctgttcgtgatgtgatgtcaagtgatccatatgttatgcttaacctaggacaccaagtaagctcatcttgttaacagatgccagttatctctgaaaaaatatgcaatatatatttttcttactgccaaataacatttttcagaccatgaaaacgaaggtgataaagaacaccctgaatcctgtatggaatgaaagactaatgctatcgatccctcacccggtgccgcctcttaaattggtacatgctctttagtcataacaaatcatctaattttaatttttgccttgcccatcaatggagagtattgatcagtatctctatccagtgttgtagaatagctatgttgtgcaactttgtgtggcaagcaaattcttgatctttagtattcaagagttcaagactctaggttgcttttgaagtatagaaatttgctggctaaattcaatctgatttattgagttacctacttatggatataatgatctgaactcattttgcgtcaaaaaaaaatgatctgaacttacgagagcagagtgccttatttccccttaagaacagcaaagagagagtagcaaaagccaaattcaagcttgtgcttacatatatatagcctatgacaaaccgcatttttgtttggttggttctgaagtgagaattcttcgatcagatccaaacacatttgttacagataggatggaaacatggattacccactgatattcaaatttatgtacaaaaaagaaatgttctacaaactcacacattgcatctctatctgctcttctacctcctaatttaacagcaagtgttcgacaaggacacgttcagctccgacgaccggatgggcgatgtggaggtggacatccagccgctgatcgccgcggcgcgagaacacgagagctcggccgccatcgccggctcggtggaggtcacgaagctgctggcgagcgacgacggcacgctggccagggacagcgtcatctccgtcgtcgacggcaaggtgaagcaggacatcgcgctgaggctccagaacgtggagcacggggagctggagatcgagctcgagtgcgtgccgctcagccagtagtatagctatagctgctgtacacattttattgctactatagctggccgggatgaaaaatgctcgatctgcattcgctgtgggttgtgtgatcatatgcatggagcttaatttgcttctgtgttttactccatgcctgtatactttgtcaagttgtgtcatgttgagggcttaatgttcatgtcatcgtgtattaattagatatggtttgtataggtaggaaattaagggggaaatggatcgtctaaaacaactctaattttaggcttcaatgttggttttggctgattctttgttatccttatactattactgctagtgtgtgtagctaattttggtagttctcaagcatttccagggtgttaaggggtaaactgccagacatacagtgttcacaaactattactccctccgtttcacaatgtaagtcattctagcatttctcacattcatattaatgttaatgaatctagacatatatatccaactagattcattaacatccatatgaatatgggtaatgctagaatgacttacattgtgaaacggaggaagtaccttataagactaccacgcaagaaaaaagttcaatagaaatttagtgaggctagagaattactcctagcctatgcctctttaagcatgtgaaaagggaggacttgggggtgtgtgatgtgagtgttgtgtgtttcttgcttgtaataaaaaaaatcaaaaggataaaaactggcattcaattgagaaaaagaaattgaaggaataatcaaatttgtaaacagatgaaaatcaaatggaacagacatctactccccaaatcaaaaaggtaattaagtaagccaagaagcaaagcatcagaatgaccaaattaactaggaataagtctactttgactctcttaactagtgaccgaatctgattcctattcttgaacagcaataccagatatcttgaccctcaactattaaaactagtccaaattaactccctcagcagttttggagggtggtttcactgacgtggtgcatccgtgacggtgttgacttagtctatgtctcacgtggtgtttacgtggtattagaactaaaaaatatatatggaacccatttgacatccacacaaaaaaatattgtggggcccacatgtaatcttctctctcctttccttcttcatcctccctttctctcccttctctctctttctctttctccccccttccacttccccttcggtcgtctgtagggggcgagagctggagcgacagcaacaatgggcaggcgaggtcctgggtggcggcgggcgctcgagggccaaagcggtagtgggcccttgagggccggagcagcagcgacagtcggaaggacgggagctggagcaacagcggcgggcgggcggacggctaggattgccgaagcaccgccgcctcctcctttgcctgcatcgtgccagcaccacccctaatccggtaccaccaccaagctccatccgccgcaagctagcttcttgccacccacctcgccgtctgaggccgtcactgggggaggagaagggagaggggagaggcgacaccgcctagcttgtgggtgcactggcgtggggcagagagagggaggagggagagagaggatgacatgtgggctctatgttagggtcccatatatatgtttttaattctaatcctacataagcgccatgtcaacgccatgtgggatgaggaccaggtcaacactgccacgtagacaccacgttaacgaaatcgtcctccaaaaccaccgagtgagtcaaattgtagtggttttaatagttaggggtcaagataaccggtactgcggttcaaggatacgaattagatttggccactagtgaaaaagtgagttaaagtgaagttattccgattaactatcactcgcaagcaaagtgccatccatcgagaatcgatgcggcccaagcaaacgcatcctcgggccatcacacgtttaggcttcatttcaaggaggaagcaattgcacgcatgcgggaggggggggtataagttcactttaggtctctcaatttgtcatcgagtccgaaattcgtccctggagcgcaaacctgttacaacgcatcccccaacttataaaaccattacaaacgaggtccttcacctactcgcgcggttggcctccgccatgcactacacaaccatccatcgtcgtgggggtcgtctccgcagccgtgcggaccaacgccaacaactgctcccgtgacaagggctcggggggctttggcgatgtcccccttatcgtgccgaagctccgaggagggcatctcctggtggtggttggtggtggtggcagtggcggtagcctccgacgcgttgaccgaagatcgagcgagcggcgcgaaggggaaatggatggagcgaaaaggagcggcggtgggcgaagcagaggggcggcggcgggcgagctcctcgctctctccacctcctactcctccctcttctgtctatccttctctctccccctacactgcaagaagaagagcggagcagcggcgggcttccgttgccttcctcggcaaaccccaactctgtcggcgacgccgaggtggccgaccactgcagcgccatcgtcatgacggccacggtctccccgtctcgctgaggttgctacctaccgccgacctcgctcgccttctctgccgttctcctcgacgcctagccgccctccatcgcccgcccttccagtccgtgcaaatccaggctggcgccctctctgctgccgtccctcttctcgctgcagcccccctgctccaccaacgtcggccacacacctcgcaaagctcaaagaggaccatgccgcacacctcttcgtccataccagggatgcacttgaggccaaggcggcggagacggttcagcgtgttgctgagtgaggatgaggaagaagaaagagaggagagagaggggatcaaagtttttatttcgtacgtgcaactgatatgtgtgtcccattgttttttttttaatttttggggatcgcattgccacgtcaatgccatgtgggacgtagacctagtcaaaggagccacgtaggcgccacgtcagctaaaaccaggcataatactgccgagggacctcgtttgcacggttttgtaagttgggggacaaatttcggactcggcgacacataagggatctaaagtgaacttattcaattgcggagcgtacattcttgggccaaatcattttgctggcttctttttgaaccgatccgataacaaggtattactgacctgtttcagcccaactactatgggccgcacgatcctgtttccggcctaaacataaccgtcatgacccaattacggccacgaagggcagcatgcaggggacgtgcggtccgtggaattttttttatttatacattttttattaaaatatttacaaaaataattttttgttttgaaaatttacaaatctaatctcctgcggccctcccaaaggacggcaagggacctaaatgtaaaatttttatttgtgttcaaaccctttccaccggttttaattgcttaaaaactaataatgcttattcgatacttcaaataattttaaatggaaaagtaataaactacaaagttatagatctcatcaagatctataatttttatataaagtttatctctatccaatgtcgtttgaaatgtagatctgagattttttaaaatgtgttttatattttgtaacgaatatttggatatctaaaacatcttaaatgaaaaagttgttaactacaaagttgtagatctccttgagctctacaattttgatataaagttttatttcatctaactttatataatataattttaaattataaaagcatagagctaacaagttgtgctggaaaatttgcatttaggtcccttgccgccctctggaagggcgatttttaaaaaatcgtcctcccaaagagcggcaggtgattagatttgtaaattttcaaaacaaaaaattatttttgtaaatattttaataaaaaaatgtataaataaaataaattctccatgcgtagcgggctggtttgcaaaaccgccggtaaccgcttaccgaggaatatggttaaaggaaaatttttgataaatttaaataaatttaaaaaataatttaaaattttgataaattttacatggtttcgtacggtttgccacggttaccgcagcaaccgtgcttaccgcctaggcgcggtaaccctggttccggcgatttgggaaacccttcgtggcatgggcttttgtttgcgtgattttacagcacattcccacattctaaactactattatttatctttcattaattccaaatatcaattgtcccctagttctccggttaccacaaccccacggtttggccgttatcgtgaggtatactgttgatttaaaatttgagaaggttatcgcacatgataaccgcgataaccatgtggttttgtaaacctacaattaaatccaaaagtaaaattttaacttaaagtgacttgaacaaatcttaaacatccatttttagatgttacccttcatctacttttgatagtcatatttcatcttgacacacagatcaaggataagtaattctacttatcatctatttaaacatgctattagtcatcgctcataaacaagcgatccattaatatttacatttcttgatgcctatgcaaccaatcttgcgtggaagaatggagagtcacgcattaaattcgagaaagtcattaagatgataggttattggattggaatatgcctatcaagaataaatttttcagatttaaaaatataactatcaaaagtagatgaagggatagtgcagtggtaacggggtgtgtagtttcaattctaagatcatgtgctcaatccctactataagcttacaattttttattaaaaaaattggagagacgactctaaatacaacatgttaatagagtagtctgagagtcgtaattctacggtagattgggcagattaatttacatgaacaacacaatacagttgtacaaacaacatttatcacaaggattgatacatgagtacatgaacagtggggtactattaatcagcagggattgccagccggaacacacaatagtgtaatgcgcacacaagcaaattcaccttagctagctaagccggacaagcgtcgccaccattgagctccacgtcatcgctctccggcgtggtcgccgtcggcgtgcgccggtagagcgccgtcatgaacggcgtcgcgagcaccgtcgtcgttagcgccatgatcacgaagatggcaaacgtcgtgtcgtccagcacctgcacacacatatatacacgcgtacatacgtatatttgtacgtatcgaagtacatggacacatgtgagacgtatacgtgtataaagaagacataccttcctctccttgccgatgttgagcacgatgagctcgacgagccccttggcgctcatggccacgccgagggcggcggcctcgcgcctgggcatgccggtgccggcggccaccgcgaacgtcccggcgaacttcccgccgatggccacggccacgacgagcgcgaccatgccccacgcggccgcgccacggacgttgtcgatgtccgtgtgcaggccgctcgtggcgaagtagagcggcagcatcagcccggacaccagcggtgccaccttctcgcccgcgcgctccgcgaggccgccctcccgcggcatggccagcccgaacacgaacgcgccgaacaccgggtgcacgccgatggcgtcggtggcggcgccggcgaggagcacgcacgccacggcgccggtgcacgccaggtcgcccgcgcggtcggggccaaggcggcgcgccaggcgcgccatgagcgggcggagcgcgccgagcatgaacgccacgaaggcggcacccgacgcgaggatgtacaccggcgcgagagggggccccttcggctcgccgcctccgccgccggagacggcgagcgcgagggcgaggaggacccaagcgaagacgtcgtttacggcggcggccgccatggcggtgtcgccgaagggcacgccgaggaggctgagctccttgaggatgcaggcgagcacggggagcgcggtcaccgagagcgcggcgccgacgaacacgcagagcgggaggaaggacgcgcggcgcggcgccgggacggcgacgtcgaggagcggcacgaggcccgcggcggcgaggaacgggggcgcgatgcccgccgcggcgatggccacgctgcgcggcccgacgcggcgcacggagcggaagtcgagctcgaggccgaccaggaagaggaagagcagcaggccgaggccggagacggtgtccagcgcggcggcgctccacgccgggaagagggtgcggcggaaggggccccaccggccgagagccgacggccccagcaagatgccaccctggcgagcatgcatatatgtataagtaaacaatcagatcatgtactcccttcataccattctgtgtccaactttgatcgtcggtcttttaaaaatatcttatttaaaaaaaactatggttattatttttgttgttattagatgataaaacatgaaaaatactttatgcgtgacttatatttttaattattttttaaaaaattaaataagatgaacgattaaatttggtcatggaaactcatgccctgtgtttaaaatggagtggagagagtactgatcataagtatactagaacactttatatataggttatttgttatgaggcatgcatgattcaggaaaacaagagcaaatgcataaagcatggattatctatttatcttggacatgccgtacgaatgaatgttcattgttacagtatgtcattagttttctggaaattaatgtgttctagatagctaaacaggcatatttccctccggttttgcttaaaaatatgtagccacagtttttcttagtttaggttatttttaaaaaaatgtgattgctacctcttttttaatatttaagtatgtttttacctctcccatctcccttttcatatagataattaaattttttattataattttctgatatatggtaggaaaaattatacagtaagtattaaaatttataatatagctatcaacatttgcatgataattgaagtgcaaatatatgtaatttatcgtgtaacaaatgtgactgtttctaataaaaaaatatgatgtcataaatatagctacatcggtcatctccctttccatgtaggagagttaagtgttttgaccactgaacagatacacatgcgatatatactactctctccgtccccaaaaaatttaacgggaaggatgcgacatcacctaagacaacgaatccggataacctcatgttcagatttattgttttaggtgatgtcacattttcacttatgctggtttttttttggacagatggagtacctcctaaaattttctaggtaaaataagtactcgtactaaatacagctatgcgggacttagtttgtgaatattcatgtcaattctagggcttgatcattagaaaatatgaattgtcgatcagttatgccaactacatgatttgaatctgtggtaaatctaaaactcaaattctggtgggaataactgaactgttgaagttttgtcctcgtggcttatgcataaccccaatcaaaaagtggacttaactttttttgctgtgtacaagtacaccatccaacacgtcaacatctggctgaatatatagtcaattatattcaatgacaattgggagtactttcatgatctcaacaatgttgtgcctcttctagaaaatgcggctgcctagctatatactctagtttggtagtcccttgtgttgtgtgtacattaggagaatcctagattctcgggagatatatagagaacacgttcaagagaaataatgccaaacatgtgacgcgcattattaaagaattatagggccacttttgttttttttatttatgcgagacaaatctagctaagcatgtatgcactgacttaattagtcactactacttggggctgtttggatggaatgtaagttcccggtggagggactaaaattttttttgagggattaaaatttttgtaagagaaatcaaaattagtccctcccatctaaacatggccttcatatcgatatcgctcatgttggtagagaaaatgacctcattatatatgtagcaaaagttttcgtcctttcgctaacatatatgcatttcttaatccggtctccttatgatctcctaattattttttaagagatacatattgtcatagaaatgtgaacgtagcggttagcaaattgtcatagaaatgtgaagaatgatatatattaatctatcatatcattttttttagaaaaaaagttatatttatttggatgacatataagagacgaatggacatgtctcaatggaaaaaaaatatttttcccagaaatatgaggagtagaatactcctcatatttttataggtaagcacatgcatcagtttaattccaaatataagcacaccaaacccatatttcaatctgtaggcaagatgctcaaggtaggcgttgttccatcgaatataatatccaacaaaataataggccgttgaatttagttttgtaataatgtttgacatatttattaagtataatttgaatatagcatgatgctaatatacctaaacaattgctactagtttacaattaagtgagtttacatcaccgggtttaaatgatctatttattttgttaggtattagatatatcgagggattgacgtggtccagtacacgtacatgtttaggaatggaattacgaatatgatgtgctcatatacgtaatcaaagggttggatgcgttgcgactaaaacaaaatcgggaatactccatccaggagtatatatatttcagtacgtaccaggatctcggcgaccaccctaggctggcgcaggggcttaagcgcgagcgcgaggccctgcgtgatcaccaggatgacggccacctgcagcgccagcagcggcagcgcgaagtccagcgggttctccccctgccacatcccgtccgacgccatcttcacggtgaccgccgccgccgccatgctagctctacctatagctcgtacacttgatgagggcgtgcgtgctggcttgaggttgagggcgtacgctgtggtttgatacaaacgtaacgctgctgtactgcgaatttataggcgaggagaaatggatgcggtgatatgatatgatgcgacctggccggctagctatagctcgtgcaccggatgagccatcgatgagtataacgttagtggttgctactagtagctcgatcgatcgatcggtgcgtttctccatcattgtgggagggggctttgctagatttggacggacatgtgggtgttgttgggatcgatcgatcgaactctcgtatagtattgcgctgcctaccgcccctgtactacgtgtggctagagattaatccaattaatgggatgcacagcacggttaaagtcaacgaatgatcgagtgatcggacacatgtgtgaatatattggaaaggaataacaagtagccctgcatgcatgcatgtggcttcgatctcaccacagcccctagtaaatatcattacgatcgatcgtggtcataactgtataagagaaatgggccgggatttgttaagaaatagtaaatcaatgttgcttccttaatttgttctaaaatacaagcatttttatgtgttcctcaaaatgtatcgatcgatggacgacgatcgcctgcacggagatcagactccagttagcctctccttccttgagatcgtggcaccttccttagctgcctgaccaaactatggcgactcgggcatggtgtctcaaacgatggtgggggtgtatagcggctcatggtgtcgtggcggcgaggagctggtggcccggctgattcggagctcaagcatatatggaggcttgctagctgctgaatgtttgtgttgttttttaatttttgatttggcaggtaagtccgtgttcatcgctgtttgtgttcgtcttgttcatgttgtattgatgttttgtgatgagtttctagttcttatatgtgatgaggttatcttgtgttagagacttcgactcttcaagcaaagttgagtgtagatcattttattgatgcttgcattgcctcggttaattggatctgaatttctttcttttttttcagaaaaatgcatcgacatctgtaacggctcaagacaagcagccgttacagatgaaactcgtctataacagggcctccaaccgttacagatgattggtcacatctgtgactaattctttgtaacgactgaccaagcttacatgcagatggcaatcttgagtcgttacggatagacaaatctatactattttaaatgattaatgtctgcatacgatttgaataaatctttaaaattctgggcattaattctgtattagaataaattagtgatccaataaatttacaatattatgatagtatttttcaagaaattgtgtgcacaaaactgattatatatattgtgcagaaaatcaggataacttcagctattatatatgctgttgttcatgcagttttcaacatatgaacaaagtcagaaattagaatgccgcagaatccctgcacccccactaacccaggcagggttagtgagtgtccagtggccaccttagtaatgtatctatcaaaagctagctagcaagatcaccaaagcattgcatcacgcatgcaactatctcagaagcgtatatgtatgtactccgggcctcaaactttccagaaccctaatcctgatacgatctcgagtccatggctgatacacaagtcaatcacaagacgttactccctccgttttaaattacaagatgttttgatttttgtcaaagttaaactaatttaagtttgaccatgtttataaaaaaatagtaatatttttgatcgaaaataaatttattcaaaaaatatatttaattattaatttaataaaactaatattaatgtaaatattcctatatttatctataaacttagttaaacttaaagcttaaagcagtttgactttgaccaaagtcaaaatatcttgtaacctgaaatagagggagtaattattaataaccccctctcaaattgtatgtgtgcgtgcatgcatcaatcaaatccccttttcggccgtcggttaatcactatgccgaaaaaaggcatggcagcagagcactgaatttatcgtgccgtcgacaggagcaattgtgagagaaagatgatgcactggttggagcttcttgattggcccagccaccgtagtgcgcttagcctatatctctccctgatcacacaattagggttttagggtttagtttaattaatcagtgagtggttggccggagctctgattaaaattatttatcgcaagaatctgcatgcatcaaggtaataataaacagagaaaagatgaagaaagtttgtgctcctgatgctggggtttgatgttgggagtggcctctagtggtctgatatgtcattgcttgattggcgttagttcgccacatcagtccgacctgtcaatgaaccaatggagatcagcaagcaagtgtcagagacacagaatgccaattactacctccatattttaatgtatgacgccgttgactttttatctaacatttggccattcgtcttattcaaaaaatttatgtaattatcatttattttattatgacttgattcgtcatcaaatgttctttaagtatgacataaatattttcatatttgcacaaaaattttgaataaaacgaatggtcaaacgttggtcgaaaagtcaacggcgtcatacattaaaatacggagggagtaacatcatgtctctttaaactagaactactagctattaagaagcgtgattaagctgaacagagagtgaaagcgggacatatcgatcaatcgaaactactgatgatcaaataagaaagaagacaattatatcaaattttgatcttacacagttaattacacaccgttatcaaaattattacacacagttacgttacacagtgatgttgtgagagggctttggtggtctgacctgtcattgcttgattggctggttgcatcgtgttcggccaccacatcaacccgacttatcaacgaaccactggtcgaggtcagcaaatttgtgccagcagtgccagagatagaatagtagtttcgttctttcccttgaagaattatacttatctcttttttaattgacgacgcgttaaccatttattttagtaaagaaaatgcaattatcatttgcttggttatgacttggtttatcatttatgatattttaaacctgacttatatttctatatttgcacaaaattttatctctactacttaaaaataagagatgcttctatcgtccgtaaaaaaaaaccaggcgagcgagaaaaaaaccgggcgaaaaaaataatccgattcttccctgaaaaagaagggcgaataaaaaaccggtgaaaaaaccagacgagtgagaaaaaaaccgtaacggttcgataaaaaaaagggacgaaaaaaaaatccgattccgtgccaaaaaagggcaaaaaaaaatctccatgaaaaagaagggcgaaaaaaaaatccgattccatgcaaagaaaaaaaaggccaaaaaaaatctctacttctctatctctacttaatgtttccttcgtcaaaacaaaaaaatagcgaaaaaaataaaaaaaagtctgattccctcttagaaacaaaaaaaaaagttcgactatagatctgattcccccggaaaataaaaggcgccactccttccgagataatagccaccactcctctcggtttcaaatatatactgtgatatctctcacatcttggtgaaacaaaataatgtgccagattgaagatctgtttacaaaaacggaacctactggtcgagagcattccatttttatagtattttaatttttaggtttgtacttttgcatttgagtccctgtaatttttatatttacatttgagtccctataatcttacaataaggtacttgaggtcgtttttgttaaaataataataaaagagagagaaaaaaccgaaaggtgcataaaaataaaaacaacaacaacaaaagttctgtttctcctaagtcatgtattggaaaaaagcaaaaaaaagaacattcaaagaaaaaacaagcaaaaaacacgcgagaaaataattgtaaaagaaggcaaaaaacacacgagaaaagaaaagcaaaaaaagggagaaaaatatggttttcgttgtaaataaaaaagcaaaaaaaatgctaaaaaaacttttagaaagaaatgcgccatttctgaatggtttgagaaaatcgtgcaagaaaaaaagaccgtttataaaaaaaaacaagccgctcattaaaatacaaacattgtcattgacatgattattcatgaaaaacgtttattatcattagaattttttcacccgttgcaacgcacaggcatttttgctagttaagaaaagatataaccaaaaatcaaattgtgtcatctttttttttaaaaaaaaaggatggagtacaagctagtaggaaatgctctgattaagctgaacagagtgtgagatatgtcgataccgaaactactgatcaaacaaaacaaaagagtttgctccgttcggtagtggaagaaagaaagaaagtaagtttgtttcgttttccgcgggtacgtttcccgaactattaaatggtgtgtgttttgtaaaaaaaaattccgcgggtacgtttcccgaactattaaatggtgtgtgttttgtaaaaaaaaaactataggaaagttgctttaaaaaatcatatgaatccatttttaaaatttacaatagttaatactaaattaatcatacactaatgacctacctcatttgacgtatcttctcaatcttccaatcttctcttctcgcaaacagagctgccctggtgagtagtatttccctggcctgcagccatccggagcagcaagtagcagtgtttggttgcttccctgaagaaggttgtccatgctcaggcatggttgccggagtcacgccaccaaaaatgaacgcctgatccaggcgtgggcgtgtgcctgatcatcccccattgattcttaacggatgtgactactactacacttgtaaacatctcactcaaacaagcatgtttttttttatggccgtgtttagtttcccccctatttccaactttccatcacatcatatcacatcaaaaaaacttttatacacatataaatttttagttttttttccaaactcccaactttattcaaactttcaacttttttttaggactaaacacaacctatgttcaatatattcagccaggctcatgtcttcaaccaaacaacagaacatcatatatgcctgctaggcatgattcaacacgagcttttctaccacagtacaggcatagatttttctcaggcaagtcatccagatcaccaaccaaacatgcccttgctaattgtgagtgcgagcgttgcagacttgcagttcgatatatttatttatgtttcaatttgggacgtttcctgtatataggactgtaaacagtttttttttttcttttgcaatattgcatcgatttgcaccatgactaaaaaagaagtttgaacatttttttttttggcggggggtgggggggtgggtgtaatgtaaacttttgaaaagtcggcaaatataccagaacgcacaaaacttacaaaaatagagttggtataaaagcgtaggcaattaagattattatgaaatgcatgacttacaaaattccgactgaagttgttcactgtaaaatttgtgatacagaaaaaatgacggaagcatgtttgtgatcattacaaattcattttattcgcgaacgcgtaaaagaattgcattagtatattactctctccgtcccaaaatataaggagttttggttggatgtggcacatcctatctgtctgtttagattcacaaacagacataatactatgatatgtttcatacaaccaaaactcttatatattttaggacggatagagtagaagaaatagagtttttgttacacaacgcaatggactagattggtcgttgccagtgataggacactgctattgtgtggtttagttgtggaacactgcccaaactcactttgggggaaaacactccataaacatggtaatttgccaatggacaccgtgccgattaaaataatgatttccggttgaggaggagagatatcgcgtgaaatgtcaaaaatgcccttgggcccacatgtcagctctctatctctcttcctatctttcttttctttctctcttctcctggtcgcggcttgttcggtgacagcggcgacgcacagagcgcgcgcggcctactcggcaccggacctcctcctccacacctgatggcgtactttgccaccgccgtcgccggagttctcgacgacgctgacgttcttcctcttcctcgtcagcctcgagctcgacccggccttactctgctgcaccgccctcgcagtcgccgccgccggaatcttgctcccaacgtcgcatcccagatgccaagaatcgggcgccgacgccgttccgcctctgcaccgccccgcaccacgtcgcgcgttgccgccctttgccgttacaccacccccacggtaaaaccctcgtgccccgagcctcacctagtgacctagaagccggcggccccctcgatttggggcgggcgccgccgtagccatgccggcccggtcgcccttatgccaccaatgagcttcctgtgggcaaacgtagtcccaatgcaacataggttatattatcgtgaaattgacatccctatgaaacctagatcgtgtagaagtagccggttgtgcccaaatttatcgacattgcgccgccgccgtgcttgtgtgctcggtgccgccgcttgccgtcgcgtcgtgcgccgggtggccgctgcgcctcgtcgtcgttggcggtgggtcctcggcggtgagccatcgcttccccgtcagcgcgccatgccgtcctggcttgggctgtcgcgctgaccatgcattgcgctgttactcacccgcgacgagaggaggaagaagggagaaacaaaagaaagagaggaagagagatggagagctgacatgtgggcccaagggcatttttgacatatcacgtgatttctctctcctcctcaaccggaaattattattttaatcggcgcggtgtctattaacaattatcatgtttatagagtgttttctactaaaagtgagtttggacagtgtcccacgactaaaaccacataatagcagtgtcttgtagcaaaatttgtctagaaaaaggatttcgaataaaaaaaagataaaactaagaactaaaagttgtttctcttaagaaaatgatttcgaataaaataaaggttaaaactaagaactaaaagttgtttctcctatctagcaggaggggtggtggcagaggagcctcctaatgttccaataggtccccaaatgatacggcacgagcgagataatttggttgatgaaagagcccaagcgcagattagagcttgaaagtcgaaaaaactcatcatacctatacagatctgaagtagtagcccacatcgttttttttttccctgggacttttccatttgacttgaattattgatggtcgtcattgctatgcaaattttctctagtaattcatactttattttgtatcatcgttgaatacaagagcacgtgtagcctcaaatagtcacaagatgtcttcatcgaagaaaattgatggttccggttaaatgaatgcaacaaaacagtaggagtattcttgttggcaaattgcacggaatttggatggaattataaaaagcattaattcctcccgtatgaattcgccaatctgaatttccgggaaaattgagaaaccatggagaccgcgcatctagcctacgtgctcctcttcctcgtcaccgccgtcctcctcttccatctccggcgaggcggccggtcagctccggcgaagctcacgacggcgcaccgcccgcacccgaaccccgtcctgggcaacaccgtcgagttcatccgcaaccggcgccgcttcttcgactggtacaccgacctgctgcgcgcgtcgccgtcgggcgccatcgaggcgtggggcccgttcggcgccggccacgcggtgaccacggcgtgcccggccgccgtcgaacacctcctgcgcggcaacttcggcaactatgtcaggggggcgagcttccgcgccgcgatgtccgagctcatcggcgacggcctcttcgccgccgacgggcgcctctggagcgtccagaggaaagtggcgtcctacgccttctcctcccgcgcgctccgccgcttctccgacgacgtcctcgccgtgcacctccgcggagggctcctcccgttcctggacgccgccgcggcgtccggggaggccgtcgacctgcaggacgcgctccgccggttcgccttcgacagcatctgccacgtcgcgttcggcgtcgagagctcgacgctgctcgagacggcgagggaggactccggccgccacgaggccctcttcgcggcgttcgacgccgccgtcgagatctccttccggagggcgctggcgccgttcaccctcgtgcggaagctcacgggcctcgtcaacgtcggcagctcgcgccggctccgcgaagccatcggtgtcatcgacgactacgccatgtccgtcgtcgaatccaaggaggcggcgtgtcgcgatcgcgatagcgaggacgtggacccggacctgctgtcgcggttcatggcggccatggacgaggaggacggcggcgagctgggcgccatgttccccacgccggaggggaagcgccggctcctgcgcgacgtggtcgtgagcttcgtgctggccggcaaggacacgacgtcgtccgccctgacgtggctcttctggctcctcgccgcgaacccgcggtgcgagaggcgcgtccgcgacgaggtgtcgcggtcgcccgacggcgacggcggcggcgacgcgaaggggatgcacacgcactacctccacgctgcgatcacggaggcgatgcggctgtacccgccggtgccgttcaacgggagggtggcggtcggcgacgacgtgctcccgggcggcgcggcggtgcgcgccgggtggttcgccaactactccgcgtacgcgatggggcggatggagaggctgtggggcgagggctgcctcgagttctcgccggagcgatggctccgcgacggcggcgagttcgtggccgtggacgcggcgcggtacccggtgttccacgccgggccgagggcgtgcctcgggaaggagatggcgtacgtgcagatgaagacggtggcggcagccgtgctgcggaggttcagcgtcgaggtggcggcgccggctccggccatggaatcgccgccggcgtacgagatgacggcgacgatgaagatgaagggcgggctgtgggtgcggctaaggaagcgggaatagtcagtgtgagtgatttgatgccacttgttgttcttgtttgactaagtgaactcttgcatcaggtgttgacgggaaaccgttttaaacactcgttggacattcacccgtttcttacatgtcatctaaataattatggaaaatttttaaaaaaattgacatgataggttaatatgtaatatattacttcacaaatatacaagttcaaattcgtcttctatgaattgtaacaaaaataacaattttgactgtgaatatacgtatactaattagagtttaatttcttatttttgttacaacttgtagaagtcgaatttgaacttccatgtttgtgaagtgatatattacatattaacctatcttgtcaatttttttgaatttttttcataattatttaggtggcatgcaagaaacgggttgacgttcacccgagatattagaatccatcctaggtgttgaccacaattgccgtaggcccgttggagtagcacgccaagagagtggctataaaagtcaatattttctgtggaatttggggatctggttgacgatgatatgtagaaagatatcaatattgaacgtgctatttatttgtagaaaaaaaacatactggatgttatctttacctttatttattataaaaatttaaggtgtttttgcatttgaatttcatacgtcacatcaatcctagcgctcgatttttttgttgtccgtagtcacgtggcacgttttactggctgcccgcatccgattgcaattccctctttccacgccgcgcaccgcgtccaggccgtgcgccagccctggcgcatgcatgcatatgccctcccagatcacgtgaaacaaaactgtttctgatttctccattcacacacaactttaatttttatagcacctacctcattcttatgttcctatacaatttcaatttttaaggcacgtaccctaaacaccagaaaaaaattgaataagataaaaatctttatctttacctttatccatatatatatctatactatagccatctctactacttaaaaaattgaaaacgtttctgtcatccgtaataacgaaaaaaggacgaaaaaaacatgaaaacaaaaaaaaggaaagtcaaattcaatttataaaaaaacgtaaagaaggggaaaaaaaagaagtccgattcatcggcttggtccgttgccgcatcacacgcatcccctctccaaatcccaaaccatcaccatccaacccaaaaacaaaatcccaatccaaataggaatcatcacaaaatcatccaaaatagatcacaggacaggagataatcaaatcggatcacaaataaatcacacaggagaggaaagggcaagcgagaggccgtcgctgctcctcgccgcctcgttgccgggatccaccaacctgccactgcgccgggaatacgttgcgccgccaacccgcagccgcgcagccacgccgtcgttgcgccgagaagtcgctgacccatcgctgcgctgggcagatgttgagagggagagagaggagccagatcccaagccgctgcgccaccaacccgccggatatggcgacgagcgggacagcggcgacaccccgacgaggaggaaaggggccaccgcccaccggtggggaagggacagcgccggtagggggagagggatggggagctgcgatgctggtggggagaggggagagggaacagtgtcgccggtgagaataaaaggcagtggtgctgccatgggagaggaagtggcgccgccgtggggagagggaagggaactagggttagggatttcgggtacgatccgagccgtccatcaaaatgaacggttcagatcgatcccgacttgggccggcgacattcccaggccgccctgtggctgggccacctcatgggccgcaagttcgtgggccaggcaaaaattattttatttctctgtattttaagtattttctatttttaggaataatattagtaccattttaattgtttaaaattgctaaaaaatcatgaaatttcttttctttcttttttctagaactttgtttctttaggaatatattttcttaaagggctcatatcataaaaaataaaccctaatcagccaatatttttatatttttgtataattatagtttacctgttgcaacgtacgggtatttttctagtaatataaaaaataaaagaaaaataccggggtagatttcaagtgacggatctcttcaaatctaagtcacgagccagtgggagactaggagagacaagaagagaggagaaaaggagggaagtgtaagatatatcgactggggatatccgtaaaccgaatgataagggtattgtggtacgtttgtacggggatcaacacgattcaacatcaagcaaacaaggagacaaggataatactggttcaggtccatcgtaaggtaatagctctaatctaaggccttgtttagatccgaaaaatttttggccaaaaatgccacattaaatgtttggacacacatgcatggggcattaaatgtggaaaataaaaccaattgcacagtttgcatgtaaattgcgatatgaatcttttgagcctaattacgccatgatttgacaatgtgatgctacagtaaacatttgctaatgacagattagttaggcttattcaattcgtctcgtagtttacatgcgcaatctgtaatttgttttgttgttagtctacgtttaatacatcaaatgtgcgtccgcatacttcaaaaactttacacccaatgaactaaacacaccctaatttatataagactgatatagaaaaccatagagtacaatagagaacaactagaagagggtgatgggcaggattggcagagagaacaggggcgataggggtgtcagagggatgcaagtgggtcgatttgcgaacccacttatttggcctataagtaggtttgcggatcgatccacttacatccctagttgtctcagcgatgtgaaccacatgaaaagggggaaatagacatggcggaggctttctggtgctagtgagagaaaagtgagaccaggggcagcggtggtgctggtgaggatgtgagagtgaggagtggcgagaggatagaggggttttagcaagcaaggataggaggtgacggtgtggggatatggaatgttgcagtggtgagttgttcgatctagtttatacatcttggagtcacgggagagggagaagataaggtttcctctgatgcgtgaatctcaatgcaatttgagtcatctaaaagtgatagagatttgtaggtatttttcatattactaaaacgcgatgccgcgccacccccaccccctcccccctcctcccggcggagggggtcgcgcggtgagcgcatgcgtaggggtggggcctttatttttgtggttttccattcggttttttcctttccggtttttttctttttggttttttagcatatacatatacgtatacaaaatttgtatacgtgtatacaaactttgtatacgagtatgcaaactttatatacgtcgtacataaagttggtatacttgtatacgaatatatgtgatgtttttttttggttttttgattttttaatatgtacgtatacaaagtttgtacacgttgtatataaagtttgtatacatcatatataaagtttatacacgtcgtatatacaaagtttgtacacatcgtatacaaagtttgtatgtgtgtatttttttatacatcaaaaaaatatacatataaaaatatatatatttatagtagtaatactagtagtagtatagcagtagtagtaatattaatagtagtagtgtagtaatactagtagactagaactgtagtactagtcggcggtcgggcgtctgaggggccgcgcgactagtcgtgcattagcccccccccccctcccccccccccgcctcgttagttgcaatatgtaattaaactctcccttctaatatattgataatatattgatgtgtaattattttgtgcgctaaactgccaatcaactcaccagcgggcagtgctgcacttcggcccgatttggagttagcttacgggttacggcccactcgagggaagtacaaggcctctaagcggcccagccgttcggccacccgccttcccctccagcctaacgcgcgggagacagcgagcgttgaaggcaaccgcagtacggtcccgtccagtgtgccccaacgcgtggccgtgctgggtcggatcatcatgatcacgtggtcatggtgtgtgtgttggatttagatcaggtgtcgttatagctgttactaaaacttaagaattacatgcaatttgattcgtccatttcgcaacactacaataaccgtataaacaatagccgtataaacagtactctactctaaagtgcttttgctaccgtataatgaacagtgcgactcactagtctggaccgttccatctgtatctgtgaatgagaaccggtgctgcctaaattgcagtgacaaaagtgactacacctgatccagattcgtgtgtagtggtgcgtgtctgtatggtttggtcccatatgttgcaatccacctatcagagcaacagcgtggtcaaggaccatgacaccatgtaccgatcaatagatcaccatctccaaaatcaaattcggtagccacaccatttagatcgccaaatctaaggacgaaacggtcgaaaaaaccttgtaccatttccatttttatattttttttcttgaaaacgaaatcggaacgataaaaccgaaaacgataacaatatcggtatattagaaacgggatcatcggaacggaatatatcgatattggttggaagtcaaaaattcatgtcggaattagcggagtgtggcatagcacacatttaactatgcacaaagatgacttttaagtttattcttgcatcatcacactccacataataccattatataataataagtttgacatataatataaacaaagttcaacaataatttaacattgataagttgaggagaccaaagtttagcaaaattcacttgtcacgtcatagggttaacaatattttctctaatcacttcttttttttatgggctaaaagcctaccaggcttcctttattcatgagcttctggtgggttgggtaggctgagccgctaggaactttcggaatttttttagaattttaatggaaattatcatacaaatacggttactgacaaaacggttggaaaaacatccatcctatttctgctaccatttccgaaagacattaccgtttccatttccaccatcgtcggttaccgatacgactgaaacggttggtggaaactgaaaacggcgctcggaaatctcgaaaatttccgtatcgttttct

SEQ ID NO: 6577 - DNA, 39985 bp, Oryza sativa
ttatgttttatggtgtggctactgctgcaaccagattgcaagaggatctggtgtgctacatgcaaaaatagatggtgattactatcaggtacgtactacttacaaaatttaggtgtaaaagtagcacatttgctgtgaaaattacttatggctctcaataacaggggtttctagagtaaatccatctaagctttgttgaactttcaattttaagatgcctgtatccgagcgctaattgcttttagtttctttctgtgctgctctaactatgaaggaccaagctaagttcactgtacaatggcatattaagggcccctttgaatcgcagggtagaaaaaacggaggaataggaaaaacataggattctgacaggaattgaagtgtaaaacagaggattgcaaaacacaggaaaaacacaggaatggtcgtttgattggagcgcaggaaaaacgcaggaatcggatgagagagatagactcaaaggaaattttccaagaggttggagctcttgctaaatttcctccaaaatctacatgcaatgtgtcattccataggaatttcataggatttggaaagcttcaatcctttgaatcaaagggccaaataggaaaatttcctataggatttgaatcctataaaattcctacataaatcctttgattcaaaggggccctaaggctgtgttcttttggaggggttggagaccccttccctccgcacgaaaaacggaacgatagattaacacgtaattaattaagtattagctataaaaaacttgaaaaaatagattaatatgatttttaaagtaacttttctatataactttttttgcaaaacgcgtaccatttactagtttaaaaaacatgtatgcagaaaacgagggagatgggttgggaactcatagaaaagaggtttgagttgatcttgatcttactgttctgtaccgtgtaaagtggaatattttggaactttgttttgttcgtagcatatttgctggaacggtgtagcgccctactcttacattccagtatgtcaactaaaattgtggtcttgttactcttgtacttatttgtttaaattttccttccagggagtgatctaagaggatcgttgagctgcaacaaaaggcaataattatggtggatttttttagctttaaggttagttctccatcgtgtgcttgaccaatagagtggaattctatgacttgaaacatgattttttgctatattgtcagaaaactttttgaaccagcttagttgaatttagctatgagattgttgcttcatttatttaactttatgctgcattatgatacttttaacagcattcctgaaacttttgatcacatcagccaaaaggatctgcatgaactatggtattgctacctttgacaagtgattagacaaatgcagatggctgaaccattgtttaaagacaccggccgtatggtctaagctgatcattttggccatattcatggctttgttgttgtcatcaggccttcgacatggaagattggcatgtttgctgggacggctatggattcttgggcaagttggccagagactacgtgacgttcatgatcctcagccactggaacacaatgttccttaacgcggatgatgccggtgcacgcacttctgctgagaggcagagaccaataagctcctcttccggtgagccggctagacagcctgcttgatgttgcccgtatctttgtagcctttgattgtctttttgtgctgtaaatatacatgtatcctgtaacataatgtatgcaatatgaaaaaaaaagggggggggggggggcaaaaccctactttttgtgcagcagcaatcacaaatgatcagcccccgcaaaaaaaaaaaagatcaaccccctatttgtttctagaatgatcactcaagcatttgaatgagaccaacgcttcggccatttttgtttctcttgattttctataatttttttagatgaaatccaggatttatttgagaagatatgggtgccacgtggcccaatcaaaagtcgggattaccgctggcttgagattactatatatatgtgttctaagtggcttgtttaagcaaagctgttggtctacatagtatcttttgaagaataaactgatatgagcctaactgctaatcacagtatatgagaaaaggtatcaatcaaggacttgagtgaaacctattcacatgaaattctgaattcaaggtatagttcattgttcagatgtggatagatgtagctcttgttataggtggatgttcattaatcggtctccaccgaaacactggtatatcaaagttgcattggaataaagagcattttcgtaagctttgaaatttggtggagattgttaaatttacttggacaattgatccatttaaatcaatgatatcaaataaattccaaggctcatatgctagtatttatgtgtattcattctctcatgagttatcaatggtaaagatgaagagttctgagaattaatccattcattgattacatctaattgatagttggttgatagtagtgcagtggaggaaggttgatggctagttgatgacaatcagttactctatttttcttcctattccatgagtctcttacccttcatttttcttttctcctataaaacgagaatggatttgatctcctacgcatgagagagaacatacattttccatccacttccacttctgttgcttctatggtgattccatcctggcgagtgtgtgtgcatatgcactaggagaacaaggctccgaaacctcacatccttgatcttgcaccgagaggaggcgaatcaggctttttgcaagcacattgcacgactgcccgcttgtgcttgagtgcgactacatcgactacttccttttaatcatggctggtggcgagaacaagaacagtaaaggcaacagcaatggcaatggcaagaatggcaatgacaacggtgggaacggcaacggttctccttctgctaccattgcaaccactattgtatcactgtatgctattgttctcttcttcccttctctgttggttcctttcatatgcgcaaatgagttagatatgcctattttcatggtttacactgatatcatgtttttttttcatattcctgttgttgagagtacatcgtttattgatttacgctatcataatttaaatttacatcgttatgatttactctcttattttctacatcaaatattaaggtgatttccttatattgtcaataattcaaaaaccttattatagccaaatatcatctacggttaagaggctcgtataaaaaattgattttcgcttatggttcttaaaccgttttcatagaaccatcttcttatagacaagagtagttatggtccaccactccacctacaatctaaggggcctcataaaaaaagatcgattaatctgcatagtggaccaagtcaattacgtagtcaatgcaggtttgtgtaccctgctatagctgagaacgatcgatcaccttttgagccagtcctcttaatcaattggcatccacagttgacaagatggcatgcaagaatctaaccatgcaagcggtactcgatcaacacgttaattcttattattaccgcgaatatggctgtgttcagttacacgttaaaattaaaagtttaaagaaattaaaacaatacgatgaaaaagttaaaagtttatatgtgtagaaaagttcgatgtgacgaaaaagttaaaaatttgaagaaaaagattggaatgtaaacatggcctatatctcccaaccaccactaggacgaaagacataagtgacattattttcagtgtcggcctgctcaattatacacaccctcttgacttcactcttccaattgcaagtctttccatgactgtatttatgtcagatttcagtctcgcctctatcggcatccccaattgaaatggaaattcccaggggcaataaaaaatttagcacgagatatatatgatacgttctaatactataaatctaaatatattctttttctagatttatgtggtaggatacgttacatctctgtattagcggcatcatcttttgacttgtgcttatgctttatcatctaaaatttgaatttttaaattaaatttggagttgattttggagttttttcatcgaagtttatttttcagcatttgcttttgcttttagatcgctaagaacatgtataaaaagctttattcataaattatttttcttaacgggctgtagatttattttctataaaacaaagggagcagaccgaaaactaccggaggtcaatgcatcctctacttttagttcggctgggtttagttccaaattatttcttcaaactttcaacttttctatcacatcaaagttttcctacacatataaactttcaacttttccgtcacgtcgttccaattttaaccaaactttcaattttgacgtgaactaaacacacgttaagaaaaattcattttctaagacatattactatgttttgggtaaattttgcatttgcctgcagataattgtcaaaattccattttgaattagatccaagccagtgccttttttatagaaataaaaactaagccataggattgaaacacggtaaaccaagcctaaaaaaggataaacagtagcgggtgcaaaacagcaaatcttatagaataaatattcaccgccaaaagaaaagacagcattattttcaacatgttaaataaattaaaccagaaaactaaaacaatatgatagagagcgaaattgcaacactttacaccaaatgttttccatagtgcatccgaggcagtcctctatattaatctcacaaactaaactctatgaaaaagaaagaagtctaaaaaccataatggtctctcgataaaggtgtcttacacaatctctctcctattctagagatgaataaatatcaacaagtcattcttctgatagaatagtaaatcggtcactaaacaagtttttttaggaaggtcagtaacaagtcggtgacctgtaggggtggcaacggggcggggcggggccgggttggcttggaatgcccccacctccaccctcatgcaggtatccccgtccccggcctcgcaaaggaagtcgggtgaaaaacttcacccgtccctacccccataggggacctggtgggtgaccgggtccccgcatcagctggatggagttaatactccatccaaatattgcaatacactaaataatagtatgataaaatttcaataaccctcgacagtgtgggtggattgaaggaaggaaagggattacgattgaggggactagggtattgagcttttatatgtcaactttgaatgggattgttgggtctatattattgtaatgggctacttttagagaagtaactcacatccgggacccctccgggtcacttgcgggttaattccgatccccatccccgttcctagaattttgtggggccccgtccccactcacccgcgggtgagaactctcccgcccctgtaggggcgggtcccctaccctaacggggaaattgtcacccctagccatacggcatgcgtctagacagatgcagactctagggtttaattgtcccttttgattcctatcatgttggggatgatgagattgagatgggctatgtcgcagtatgtaactcccacatcggggaagcaagaccccctttcgaagatttggacaaggggcgagtctaagcctgagtcaccctcaggatcaaatggacgtgatgaagtatacaggtttgagccatacggatgcgtaacatcttactcttgtgtgtatgtagactatcagtgatgaacttgtattacgatgagatataggacttatgtgagctctaattgctaaaagattcaaccttctattcattgggatagatcctccttttatatgccaagggaagtgcatagtgctaaaacttgcatctaagagcgggccctattccaaagagttgggtgtgtcttgtttcgtcgatgtcccctatagcaagatggcaggaagtgacatctttgctctccgattgacacacgatgcagaggcaaggtgatcttctcaccattgggcccaccagtcaactcttacaaggtggcaagattgaatatgctggagtgatatgggaggggcatgtccaccccacctattccttcggcagacatgggttctcgggaggctacatgcggcgtcatgtccctaagatgtgggtggatgagctgttctccaaacggctccctcctacaacggaaataataatattgagttggagttaagcccgttggcccaccaagcgaggtgaaaaaaaccccatagtgagcccggggcaatgaggtgtgctcgggcccctgcctagggccccaagtccattggtattgcgcattgagggtgcctccactccatggggcttgtttccatgcctggcgcactgagtttcccaggtctccagggatatttcctcttgcttctttacaggtttcttgttactttggacgagcttctcgaagatgtcgttaatgaacgggttcaaagtggttaccttcgtcaaagaagcaccatacaccttggagatattcttgtaggtctccaccctcttctcggtaccttggatacgtagatcttgtaggtttctacacttttcttaagatctgaatgtagatcttatacgtctcttgaagatatagattttgtacgtctcttaaatatgtaaatcttatatgtctatctcttgttgtgatacacatcatttggagccctgactattccagggaaccggggaccccattcccgttctccaaacaggccatattatagatcgactttttaagtcctatactgctgtatgcatataataatcaatacattttatgaacttggtcaaactaaaaaaattttaactgagaaaaagtcaaacaacttataatataaaatgggtaagtacctcttaagttcggccccactcatatcaagatgcgccactggttgacctgttctttgtcgaacatgttgccgtctgttagacttcttagagaaggactcagcaacttgtttatagcaattaccaattaacgtgggggcattttagcaaagctgcggagcatttaattattatgaagtggagtagataagttttcatttgttcaggctataaattgagaacagactctgccctctggtcacgcattctacacagaatctctggttttcccaactgtcagagaagtagagaacattccagcttagttgaacttctcacaaaaaaaaaaggtactccaggctgcctccaatggcggaccgaatccctgctgttgccgctgccattgccattgcctccctaatcctcgtcgttacgccggaaatggtctcctccggcttcattccacggttcaagctaagcccaaaggcaaataagcagatccgggacatattcaaggaccatgccgcggacttggccggcctcgccgcggacgccatccccagcaagggcgagggcgaaggcagcagcagtgacccaagtcaggccccggccaccaccggcggaacctacctcatcaccgtcggtgtcggcacgcctccgcagtatgtctacggcgcgttcgacatctccagtcagttcgtgtgggtgccatgcgaggagtgcgtgagcccctactcctgccccagcgacaaaaccggcgtttacaagacgctgccccgggagctttactcatgcggagaacagcgctgccggacaatcgtcgggcagccggactgcggcgcaccgtataatggcccatgcaaatacacctgcaggtacggtggtgcgggcggaacggaaacggaaggacacctcggcctccaaccgttcacgttaggtgacaacacgatgccagtcaatatgattttcgggtgtggcctcgaacccgaaacaaacttcggcgtgatcggcctaaacagggggagactctccctcatttcgcagctacaactcgggcggttctcctactacttcgcccctgaatacgacgacaccgccgccggcaacgcaagcttcatcctcttcggcgaatacgccgtcccgcagaccagcaatccccggtacactcagttttggtcctacgaaaacggtgcctacagctacctttacctcgttgggctctccggtatgcgagtcggcagcaacaacctcaacatgttgggtgcggggtcgggcggccgagacccactcgttgcgtacctcagcacctccgtgcccatcacctttctcgagaagaacgcctacgaccttctaaggcgggagctggtcagcacggtggggtccgacaccgtggacggctctgcgctcggccttgacctgtgctacacgagccagtacctggccaaggccaagttccccgccatggcgctcgtgttctgggacggcgcggtcatggagctgcagccgcggaactacctctaccaggacacggctaccgggctggagtgcctgacgatactgccgacggcggtggccggcgggctgtcgctcctcggcagcctgatccagacgggcacgcacatgatgtactacgacatccagatccagggccgcgggtcgctgtggttcgagtcgttcgaccagccgtccaagtcgtccaaccgggcgtcctcggcttcggctgccgcgttgccgcggatcatctcgacggctgcggcgatcgcctgttccgtgtggtctgtcgtggcgtgcatgttcgtgtgaactgcttgtgttgtgctacggatggactgagatatgtgttattagaactatcttaaaaaaaacttcgcaatttttttttataaaactttcaaatgtaagtatagtgtaactatattataataacttatatataactagaaagtaactacattgtaactcgtatataatttatacgtaactaaaataaaaatatccaaaaaattatatggcacggtggtagcatagatcctcaatgagctcaacggtgtgagatcaaattttagcagctacacttgctaatttattttttctcctatttgctagcacgaatcttaaagcaaatctaatggtctaaaattgaaagttttccccctaatctagcaattccgataagggttctcgaatgttggtgtgttctcgtatgagtttagatcggggcggtagccgcggtacgtctcacaggttgtgcagctcttgggacggcgctactacgagcgatgtggcttatgagtttgtctcgatctaacattccaagtctcgagttgcatccaaccccaatacgctgcaatctatactcatcgatttaagtaatagtaagagagagtgacatatggagcgtattgtgttattgactggttaattttcctttgtgatcagaacaaatcagatttttgactttcttttgtgatcagaataactcacatttttgccatccaaaacaaagtagtggacatacgcatgaatgaaccgataacaacatcaaattcaaaccgatgttattgaacatcctaagggtaagagcaatgtgtcactatatatatttagcctggggtgccaaatagactaaagaacttcaaaagccactacaaaatgcaatgtggcctaaaaccgagtcatttatgtttgaagacacacatgtggcatggcctagcccacggagccaagatttgtcccagcacataaaattacctatgtaccctcgaaatcaactagtacactgccctttgacgaggccggtacaaccatgtctcatcgcctcctcctaacagcatctccttcctctcctcctcccgcgccaccgtacgccagtctgacctcgccgacgatgaagctccggagtggcttcgtggctccggagcggctatccccaaacgcggcacagtctccactccctccggttccagccatgcacaggcttctctgaaactatctgctgctgctgctgaaagcctgaaatgtgagtggggctttgtttctttctttgctactcccgtgcatgtcttggatcctttcggtatggtctcttgctgcgccgtgtgagattcttgcatctgctacacatgggttctttggtaaagttggtttttgcctctttcagttcttggtctgcttcatctgtcttgttatcttccatttgctaatcctttgcattttatttgttgataaatggagacttgtgacctttcatctcttgctcaagtttcacctctcttcctgcatctcactacctgatttggtgcttaatctaatccaattcctttttggttcttgtgattgcggtgggtgattaggtgcttaacataatcccaatcctagaaaaacaggagagccggccatggctgtgattgccatggctgctgtacggcgagccactggggcaggggaagccggtcatgtcgccggagggcgtcgtgccgagagcacagactcctctggatcctcctccgattccaaccatggaccacgcggaaaggggaaaaagaaagcggcccgtgcgcgggagaaagagggggacgcgggaaagagggcgatggcgagggcaaaaccgggatgcggcgcgcgcctgggcacgagcacgaagccactcgccccacagcgcgccggccacgctttctcccagccgcgcgcagcttcgttttcacccaagaccgagttgcttcgttttcacttgcgaacgtggcgccgatttctccggatttgtcgacgtgtacgcctcaagccgaacgacaccgtgttgcattgtaaaggcctaatagaacgggggatcccaatgggcgatcgatcgtgggttagcgatcgatcccctctccctccctccctccaccggaagaaaattctctgcggcggactaccccaaaatcgaattcatcgcatcaccggagaggcagagaccaatatcacttccttcaaggctccaaccgaggagaagatatcaggtttcttgaagcgatattgaatattgatcctggcttctctttacaatggggtgctcattgggattggaattagtgtgctcacaagccctccgccgtttgagaaggggaatgcggtggatgatgccgaggaggaagcgaccgtcaaggatatcacgaatgagaagctgaagttggcggcacagaacatgccacgggagatggcggcggcggcggatgggtggggctccttggcagggggaacccgacgccccgacgggtgaggcgtagtcgtagaagccgaggagcgtcggcgggtggagcgcacgcacacggcggaggaaagcaggatcgttgacgatgcagcggaaccgaggaaggaggcgcagaccgcgcatgcgcggccgacatcagtgacggacgggaggcatatcaggacctccacgatgaggtcgtaggtgagaaccagctcctgggcgttgagtcgactatagagattggacatcggctcggctcgaaagaactcgggctacagtaaaaacttagacatgcgtcgctagactacgcggtgttgtacatgaagtgtcatgcggcatcgccgcagagaattttcttccccctccatctggtttcctttcttgggtaccacattactttcctattttagtaaatttgtacactaaagtttatacacctcaagtttacacatttaaggtttagagaccaaaagtttataagtcaaaagtttatatatccgattcaaatttgaatttgaattcaaatattttttttatatatagtatttctatatatcaaaagtttatagacctaaagtttataagtcaaaagtttatatacccgtttcaaatttgaatttaaattatatctaattaaaaattgaatttgaattcaaatattttttatatatagtatttatatacatctaaaatttatacacctaaagtttatagatccaaagtttataagtcaaaagtttacatacccgattcaaatttgaatttgaattcaaatattttctatatatagtatttctatatatataaagtttatacacctaaagcttatagactcaaagtttataagtcaaaagtttacctacccgattcaaatttgaatttgaattcaaattttttatgtataagtatttccatacataaatttgagtaaattgtatattggtcctggttttcttacctgtgttgcacaatggactggatgctaccccatattttcactttaatacatatgaagttaccaaaactttcatcttggactagtggcccacatatcatgtagaaagtgttttcttccatctctcccgtcttcaccgacgaatgcatcaatctcatcttgggcccgtggttagtgaccagcagtccagaatgagtgcagctttgttggtgtgatttgcttggggttccaattgaagtccgatcttgagcaacgcaggttggccaatggatggaccgagatcgatggagcgccaggctgtacgttgtacgtgccttcacctgtcaagctcgaggggcgcccgcactcgtctcccagtggcagcgccaacgacagagcccattccatctcgcgcattgcgtcagccggtggagcggtcgtcgacgggcacaacctatggagccgacgagcggtcatcttcaagagggagggatgcagggcagagctgcagaggacatgccagcggccactcgatgttcgtgcagcctgctaggctgctactgctgcattactggggaagagatgagctctgcccgatcaggatagggactaataaaagaggaagatgaatggctgaggctaacatgtgagtcaactagtccaaattgcatagtttggtaacaaaacctggttcaaagtgaaaatggttgtacgttcctagtccagtatgcaacttatgtaattaaaactagtccaaagtgtaattcactccataattttttctaactttttgttttttttaaaaaaattttatggtgtactgtagtaggaagataagaaggggaggagggaggagtgtatcgagtagtataggggagagggcaggcaggtgatcgctgggcggacaggggagcgatcacccgcccattagcatttccgtaatagaataatgttttatgaaaaaactaatgaactttttttgaacgaaaaattaatgaacttcaagtagcgaaggaaggtaaaatagagagtagctttcacgaaaccatgttcaccaccagcacgagtgcacaacccaccccacgaaacaggcgatcgtcaccgccgccgggaattaaattaaaggccaaaacaaacactgtacaacaaaagcgggaaaagcaaaacaagaaaaaccaaaattacaggagataagggggaagagaaaaaagaaagccacacagggaggatagctctattcgattgcttgaaccgatgaacccagagcttggcatcttggcagcaacatctgaggaggcggcttatggatgggagttcattttggaacacgacttcgtttctatggttccagaggcaccagcagcagagaagaaacaatgtgttgttcaacggtaccggggcaccagcaaggttgttggtgtgcagcatgaagagggttgtcactgacggagtgagcttgatcaaattccagaaagctgatgaaaaagggcaatcgaggaaaaagtgatccgtatcttcaggagagctctggtagagctcacatgttggggatgggagaatcttctttttgtgtagatttactctggtcggaagatggttgaaagctagaagccaggcaaagaatttgatcctggggggggggggctttgcttttccagatgtaagcccattgaggccattcctgaaactttgccatttgtagctggtagagagctgaagatgagatgacaccatttttgcatttggttttacatattagctcatcctgggtagccgagaggggggattgctacaataaaacctgagggtattgagctgattatgcgcttccattgaaagacgtgggacaagggtggcagccaggccattttggataatggcttgcactgtgcagtttgacttagtagagtgtgtgtagagagcttggaatcttgaggcaagaggctgatcatccagccaaatgtcgtgccagaaattgttgcgcctgccatctcggacaaccaaattagtttgagatctgagaagtggaaacagggcaatcaaggatcgccagtgggggcccagggctgaatcagcatgctccctccatatccaatttgtccagggtgaattctaggtgtacagtctgtaaagcatcttgatgagaaggcagatgttttgtgtgtgaaggcgtttgattccaaggccaccttgctttttgtctatgcagattaagtcccatgcaatgaagcatttcgagccgtgacatgattcctccccagtccataggaaagcccgacggccattgcataggtcggtagaaagtctagcactgagttcaccaagaccgccctgcctgcatagtttaagagagaggcctgccaccccgctaggtatttgttaacttttgctatgagtggttgaaaggcagtgaggggtagcttagtagctgatagtggcaaccccagataagtttgaggaaaagattctagcttgcactggaggatgtctgctaattctttgctggcttctggtggagtgtgaagggtgactagggtacttttgctgaagtttattcagagacccgtggcctgtgcaaaggagttgagaattgtttttagagcacttagctgggaggcttctgctgggcagataataagtgtatcatctgcatattgtagggtggctcctagcaggttgtgaattattgggtgcttgatagcactgcaattcttgatcatctactgcaagatatcagcaaccagaatgaacaggtagggtgagagtgggtcgccttgacggagaccttgagtgcagtttatccatcttccagggatgccatttagcaagacagctgacttgcttgaaattagcagagcttggatccacttctgccatcaattagggaaatttctagctctcagaatagcttggaggcttgaccattgcactgagtcaaaagcttttgcaaaatccaatttcaagacagccgtaggcagcttacatttgtgacaacactggagaatttctgttgcatatagaaaagtttctgagatgcttctccttttcataaagcctgtttgctcccagtctatgagactgccaagaacggattgtaggcagttagcaaggactttcgacagtagtttgagatggcagttttgcagtgagatgggtctataacaatatggggagtttagtttaccgggtttgtgaatgaggactatgtatgctctgttaagtctttcaagctgggcagagtggttgtgaaattcagtcaacaagttctgtatgtagggcttgatttgctgccatgctgccttatagaagcttggaccaaaaccatctggacctggggcattgtaattatccatgcagtccaatgcagactttgcttcttgaagagtgaaaggttccgagatctgctgctagctcgcattgtggactgtattctcagggtagagatcttggagatgaaaatcccaggtggtgtttgctgagccgcccagagtttcgtagaagaactcgtaaagcgcatctgccttggtgtcgtggtcgaaaacctgcgaaccttgtagcaggagggagtggatgccattgtttctgaacctgtgtgacgcgtgtgcatggaaaaatttggtgttctcgtcagaggctttgattctcttgatcttgctgcgttgcttccagtagattgctttgcatcgatggagatcagctaacttgtcttgaacgaggtcccgtagggtgaattccgcagtcgagaggggcctagcttcttcaatagagtccaggaagtcgatgagcaaagaacagtcagaaatgttgtcgttggtcaacttgtgagctttgatccaattcttggtggcgaaacgtgatttcttcaggttagcaacaaggttgccagccgcgtctgtggggtggtgagtgggtagttggcccacccaggcccaaaggatagtggggaggaaatttggggagcagagaaggtgattgtcgaaacggaaaacttgagttttgggtattgaagtggaaatggatatttttagggggacgtggtcagaggtagtgcgaggtagggaggagagggaggtgtttgggtgagataggttccaagcttggtttatgaaggcacgatcgattctagaaagggtggggatttctcttttactggaccaagtaaagagccaatcgaagagcgggatttctaagagcgcaagatcgtcatttttttcgttgaagaggtttgctaagtggaggtcgaagtttgagttgtttttatcataggggtagcgagtaagattgaaatcaccaaaaagtaaccacgggccagagatattggtggagagctcggagaggtcttctacaaagatggcttttgtttgtgggtctgttgaggcatacacattggtaatggcaaacgaaatgtttgagatattgtgggtgaagccgattgttagggtatgtttgcgggagatgaggaaggatttggttagggtgttggattccaaaccgtaaggagaccaccgctcgtggacattgcaggggtaaaatcaaaagcactgaggaaggacggcaggaaagaagaggtaatcgggtggtgaatagagtatagcttagtttattgaaataagacaacggagaaagcagcggagctaactgaattaaagataatggggcgcttagttaagtctccaagcccgcgaacattccaggacataatagatagagttctaacgttacttgacatatgataggaaagacaccaaaagcaaaggaagggggggggggggggggacgcatctcaacagggaagaactgcagggcacagcaccagcaccagagcgaagacccaagacagcaacagagcagcctcccttgaacaaaagattgtgtgattgactgattcatatgccttccgtgagcaccagttccagctctttggtggcagcctcgtcgaggttacagactttagccaggtctttgatggcagacggtgaaacatgcatcgccagatcattcaacaggttgtgtgtacggaaggtgtgttggagattgatcgaacatgaggctagctaatattgctaagttttggtatgatttcttatttatttcctagagtttagtaagaaactaaatagatgtatatatttagcaactttgctaaaaaatggtatggtttgaaatgacgtcaatctaaacaagccctattacagattctctgtgtagaattgacgactgatcgagactgcacggctatttatagcctcggtcatgagctaattacagttagtaaaacacgcagtatagccttttaccttaaactggaaattaagtaaagatgctcatacacatcgagggaagatgaaaggctgatgcgttgacctagctcgagttgcttccgccttccggtgatccagttcatcactggctcatagaaggacgaccgggtccaggcctccagggcgatgaacttacctagtagtagaacctaagatacaatcccaagacaaacacttccgaagagtgaagctaaggaggggatacttgagtagctacagctagtgataagtaaggctgaaacattcaaagcaaaagaaatgcttaattttatatgccacttgtctttcgttttacctcagaattcttcggtatattctccgcaagtcggcaacaataggaagatggacgtgctggccattgcatgcaagaagagccaaggttaggttcatgcatcgtgtcgattggggatgaaaattaataggtgaggacgcgttcaaaaaatgatcaattgctcaattgttctcggcaacataaactgtaactcgttgaccacgttgatcgtagcttaatttgatccaagttaatagggaagatttacctacatttgtcgacaaattttctctaaaaaattgacaaatgtaactataacataatcgttgtgaaattacactctaacttacatgtaatttgtatggaactttcaaaaatctctttgtaactgtcagggttacgggttcggcataccctttacccttcgatatacgttgcatatcgatatggcatacccacgcgcatgcggatatttcctgtatattctaaggaaacctttcgcgtaatttacagtagggaagaatcctacccggacagaactgggtcgttgacgtattgtatagggtctgatacctccaagttctacttggagaccaccagatctgcgatataaaaaggaccccccggggagggcttaagacatcgaatctcgaaaccaacacaacccacacagtctacgaagccggagcctacaaggagcaaagccattgagatccagtcgaacctactcgactaagatctcgctggatccgacaagttccatcgttctctttgtaacctgtgttttccaccatataatcccacatcaactagattagggctattacctatcaaggggcctgaaccagtataattcttgtcttttgtttgctcgatgtcatactacgtagatccttgtaccaacataccccaataccctctatatccggtctacgggtatcacccgtcgacagtaacatgctatttcgataaaaaccggaggttttgggaacgaatcctcccacatatgtacgcgcagtgacttttttctttctccactcatacaaatcttgaagaaatctaacggttcaaaattatgtgaaagttatatgcaaattatattatagttacatgcaagttaacagtgtaataacactacgattatacgattatactgtaattatatctattaaatttttaaaagaatttatcgataaatatataacaaaattgtttcggatataggtccactgtaataggttgtcaactgcgagccgatataaagcggcggccacaagacgacatccaaggcccgaggatgggattcgatcgagtcgtgggctgccgacctgccgtgctgccatgccatggatcttatttgcatgtttcgtgtggtgtgttcttggcgtgggaataagttcactttaggtccctcaatttgtccccgaaccacaataccagatatgtgcatctctcaatttacaaaaccagtgcaaagaagatcgcagggcggtttggatgacggtttcgactgatgtaacaccatacgcggcgttgacgtggcacgggacccacctgtcagtgagtatctaattaaaaaattaaaaaaaaacactgaggccacgacatctctttctcctctcttctccattcatctctctccatttccgattccgagtcgtggttggcgcaccgcgcacgccgccgctcttctggacgacaacgggcggacgggccccctctcctccttcttctcctctgaaacggcgagagcagtggtggtcgtcggatccgcgtccgtcgcgtcggcttccgccaccagcttgggcagaatgaggaagcagctccgtaccacatgtccttcaccgcaacatcgccggagttggacggccccaatgtaaggcagctggtgatgcgctcgccgtcggtccctgctactcggccacgaacgtcaccataccgtaggggaaggggaggagggtgccccgtgccgtccgccgtcctgcatccggccatccaccgaagtgtcaccatctcattcacggagtatcaaatacgacaacatgaagaagatgaacgcacatgtgatggaggagaacgccatggacgtcgtcgcgagctctgcgcaagaaagaacggcacagttgcttacagttgtaagaagcaacgagtccattgattaactgatgataaaattggcaagaaacgtaatgccaagatcattaattacgtcattctggagttcatgtgattcccagtcaattctgatttccctccaactgaaatctgcatgacgaacagagccaaaggtgagatttttacaggaaaatgctgtctttttctgaagaactaggtgttggtttgcaattactgcccatgtgaagagcagtgctactgctatatctacaggtgtgctcccagaattatgtaactgcagccaagcaacaaaagtttagcgaaaaaaatgaacagatcatttggtgtcattttcatctgcagcagtaacgagaaaaaaaaaaagaacggatgcaggatggcggacgggcatcctcctccccttcccgtccgggcgatgttcgtgaccaagtcgcagggaccgacggcgagcgcgtcaccagctaccttacgttggggccgtccaactccggcgatgttgcggtgaaggacatgtggtacggagccgcttcttcattctgcccaagctggtggcggaagccgacgcgacggacgctgatccgacgaccaccactgctctcgccgtttcagaggagaaggaggaggagagggggcccgtccgcccgtggtacaccttcgtctagttgctctctatttatccggtttgcatggccggaggtaattcgatcgcgaccgggacggtaaatccagctctcacaagaaatacgcacacgccttggcagcgcgcgcagccaacgactcgaacgtacttacgtaccccatcgtcggcccttggatcgatgccgacgatattacgccgtacacgtacgtagttgcacgtgccaactgccattctgccaaccgtggtatatatcctcgtacgctagactacagctgtatgtgacaccgtacgtggatatggtctcagttttaggtgttgtggccaccggccgcctgttatcggcgtcctcgcagactctcagttgacaatatagctaatacaatggacctgtatatcacggtcaacattaattaataggactagctatatttatggcgtcatattttttttaaaaaaatagttggtatgtatttaaattgtaagtctctaaattacatatgtaattttagtatatttacaatgtaagttctaaaattacatatgtaagtcttaaaattatatattgtcagggttacggataaggtataccctctacccttagatatacgctatacatcggtgtggtatatgtgtgcgtatacggatgttttttgtatgcgctaaggaaattcatcacggagtccacagatgaaaagattcctaaccggataggactgggtcgtcactgtatcatgtagaatccgatgtctccgagtcctacttggaaactacctgacctgcgatataaaagggaccccccgggaggacctaaggcatcgaatctcacatccgagacaaccaccatagcctacgaagccggagcctacaggagccaagtcgccgggtgatctagtcgactcgactacggtctcgtcggtatcatcgagttccactgttccctttgtaatatgtgatttccatcatataatcccatatcaactggattagggctattacctaccaaggggtcagaaccagtataattcctgttttctatttgcttaatgtcatattacgtagatcctcatactagcgtaccccaataccctctatatccagtctacgggtatcccccgtcgacaatggcgcgccaagtagggggacttggtgctcaagattctactactatgtcgtcaaatctcgtcaacaatagcgtcgaccccatcgtcaaccaaggagttccgacttcaacaatgctggtgtgtactcaagtcggtgaaatcgtcttcccgatttacaccatggtgccggtctcgactggtccatcaatgaccagaagtgagaatgccgtggccgtaaccccggacgaccccctgtcgaacgatcctcccgccgaagcggagaaggaatgtcgacgacatccaagcctgaggaagatcttagtgcggccaaatcttgtccttccgacaagaatcacgagccgacaaggacaacttttgaggcgacaaggtcctggtgtcctattcacaaaactaggaaatacaccctgcaagcttgctgggtttttctcaacgcacaagctgagatccgtgcctgcaaagagcatggaattcagcgtacttctccaactcgtgatatctattgtcctatccacaagacaaagaatcacgacttctcaaactgcaagattcttctcaaagccatgaagacgtcgcctcctaaggtccagtagtcacaaattcctcctagagatgtgaacaaggaacgaggagcgacggtcatcccagtcgattcgttggggtgatcgacatcgatccccacgagccatcagtcctacacttgctcgaagactatggctcattgttagcgagtacaccacatgacgtatttgctatcggtgggaccagcacgtctgcgcacgctaatgcagaagtggagaatcaagcggccacgccggcccaacaccttgggaccatcaacgcaatactgagagaaaccaccaatgatcccgtactcaacgatgatctcgcacggtggacagaacgactacgggaatcagtagccaatctcagtaacgcgttcgaggaggccactaccagagcacagacagaacaaccgacagctggcggcgccgacggcgagccaccggagtaacggacatcgcctcaatgagccacccctccgcctcacagcaccggcaatctccacgaccatctgaacgaccgccgagaagcgcgaggcgcgcgagacaacgagaatcgttcccgacatcgcgtctcttcgcgacgtcgcgagaacgaagagcgaggaggacgctcgggcgagaaccgagaccgtgatgaccgccacaaccgccaagagcgcgatgatcgcgaacagcggatgtcgggcgatgttggtcgaggacgccaccataatggtgacgatgacagagatcggcgcaggaacgacaatggtggacgatgacaggattcccgagaactcggacgtcatcctcggaatcgcacactagagccaagtgacccgtcgtcatcgtcatcatccacttcatcctcatcgtcagatagacatccacgaaggacatatgatcgccgacaacccactgcccccagcgtcgggtgtagagctttcaaccgttcgctacgtgatgtccgatggcctgagagattctgaccgggagcaatagagaagtacgacgggagtaccgacccagaagaattccttcaggtctactccacggtactctacgctgccggagcagatgacaacgcattggcaaattatctgcctacggcgttgaaaggttccgcgcgttcgtggctgatgcacctcccgccccactcgatttcttcatgggcagatctgtggcagcaattcgtcgctaacttccaaggaacatacaagcgtcacgcgatcgaagacgacctacatgcgttgacacagaatccgggcgaatctctgagggactatttcggcgctttaatgagtgcagaaatacaatccccgaaatcactgacgcctctgtgattcgcgctttcaaaaccggtgtcagagatcactatactacccaggagttggcgacaaggcgaatcacaactactcgaagattgttcgagatcgtcgatcgatgcgctcacatggacgacgcactgagacgtaagaacgacaagccaaagacgggaggggagaagaaaccagccaaagacgcacctgaatcaagcaagaagaaaagtaacaagagtgggaaaaggaaagctcaagtggaagtcctcgcgtcggaatatgagtgccctcctaaacacccaaaccggcagcgacacgaagagaatatggtaccccatacacaagtcggacagacattctctagaggattgcctcgtcttcaaaaagtcgctggaaaagcaactggcattggagaaaagcaagcgagtacgggtagtcgagaaagctgccgaggcaaccactcaggactcggattcggcatatccagattccggtctccatgtctcgcacatcttcggaggttccatggcatactcctcaaagcgagaatacaagaaagtggagcgtgaagtttgttcgacatggcagggggctgcacccaagataaagtggtccgaacagaagattgagttctcagatgaggaccaccccaaggctgctgttatcctaggacgatatccgatcgtggtcgaacccactattcggaatatcaaggtagcgcgagttctcatcgatggcggcagctccatcaaccttctctttgccagcaccttggatgcaatggggattccacgaagtgagttgacacccaccgatcaacccttccacggaatcactccttagtcatcgtccaagccattaggcaagatcacgcttcctatgactttcagccaagcgagcaacttccgaacagagcagattacgtttgatgttgctgagtttgacacagcatacaatgccatcatcgggagaactgcactcgcgaagttcatggccgcatctcactacgcatatcaagtactcaagatgcccgggccgaagagaacaatcactattcaagggaacgcaaagctggccgtccaatacgacaagcgaagcctcgacatggtcgagcacacgcccagcccacccaccgcaaccgagccacccaagaaagtgagcaaaacaaccaagacgccgaaaccagaaggcgtaatcaaaatcgttccactctccagcgccaaccccgacaagacagtcaagatcggggcatcactggacgagaaataggaactcgcgctcatcaccttcctccgcgacaatgttgacgtgttcgcttggcagccgtccgacatgtcgggggtccccagggaggtgattgagcacaaactcatggtgcgacccgatgccgagccaataaaacaaaaactgcggagatttgcaccagatcgaaaacaggccatacgagaagaagagctcgataaacttctcaaagctggtttcatcagagaggtactccatccagagtggctagccaacccagtcatggtgcggaaggccaacgggaagtggaggatgtgcgtcgacttcactgacctcaacaaggcgtgccccaaggatcacttccctcttcctcaaatagaccaactggtggactcaacagctgcttgcgagttgttaagcttcgtagatgtttattccggctaccaccaaatcagcatggcaaaagagatcgaggagaagacatcattcatcacgccgttcgctgtattctgctacgtttaagatgccgtttggactgataaccgcaggaaacactttccaatgcacggtccaaggggcacttaacgattagcttgggaacaacgtcgaggcctacgtcgatgacattgttgtcaagaccaagacaagcgactcattgattgacgatctacgggaaaccttcgacaacctccgacgatatcgcctcatgctcaatcctgagaagtgcacgttcggagtaccattgggcaagctgctcgggttcctcgtctcgggcagaggaatagaagcaaatcccgagaatatcaaggcaatcgaaaacatgaagtcgcccacaagactcaaggaagtacagaagctaactggatgcatggcggcactaagcaggttcgtcgctaggatgggagaacgaggacaacccttcttcgttctgctgaaaaaacaagacaaatttgtatggacacaggaagtcgaagaggcgttcatcgcactcaagtgctacctgtcaaatccccctgtacttgttgctctccaacctaatgaagaattattcctctatattgccgccacgccatattccgtgcgtactgtcatcgttgtcgagagagagaaggtgcaaagaccagtctactacgtcagcgaagctctccatgacgtgaagacaagatatccacagacccaaaaactgctctatgcagtaatcatgacgtcaagaaagctacgccactacttccaagcccatggggtcacagttgtctcctccttccctcttggtgaagtcgtgagaaacaaagacgttgtcggccgcattgcgaaatgggtagtcgagctaagccagtttgatgtctactttgtgccacgaacagccatcaagtcccaggttctcgccgactgcgtagccaattggactatgcctgaaaataggttagacagtcaaaccgacaatgaaacatggataatggcgttcgacggcgcactcaacagccaaggagcaggggcagggttcatcttgacatcaccttcgggagagcagttcaagcatgcaattcacctcaacttcagagcaaccaataacacagcggagtatgaaggactactcgctgggataagagctgcaaccgcacttggagtcaagcaattaatcgtgaaaggggattccgaactagtcgcaaaccaggtgcacaaagactacaagtgctctagcccagagttatccaagtacctcgcggaagtcaggaagctggaaaaaagatttgatggaatcgaggtccgacacgtataccgcaaggacaacatcgaaccagacgatctggcacggcgtgcatctacacaggagccactcgaacccggcaccttcctggacgtcctgacaaaaccatcggtgaaagaaacaaatgacgaaaatagcacagtcacacccgacatctgctcgggggctacagaggcagaatgcgtcgttgctgacatcgagacctcagatgactggcggatcccactaattaaattcataagtagcgacgagctacccgaggacgatgcaaaagccgagaaacgacgatgtgaaccttctcgaagaacatcgagaacgagttgccgtcagagcagctagctaccaacaggcccttcgccgataccatgagaagcgcatccgagcacgcacgctttcgatcggcaactacgtcctccgacgggttcaaagccaagcagcgcaaaacaagctctcacccaaatgggaaggaccgtacacgatcacgcaagtcctgcgaccaggcgcattcaagatttcagacggcgatggtcgcgagttggcaaattcttggaacattgatcaaccacgtaaattttatgtataaatcaatagcatccatacttgtaagacatattacctcttcaataaagtcttctttcaggaaaagattacaactaaagtgttccttcccgatgatccattaccccgatgacacctagcgttgaaacctatcctcatgtcctttacgccgtcttgacaaggcctccgaggaacctaagggaacttcggctggggacacccagagccgataaggccttgtcggatcctgtagagacgaaagaccatgtaagatctggtcgtgtaagagttctcgtcgtgcgtattaaccaagccgtgtaatcggaaattggattttccaacctcacggctaggggctaggattagtgtttgttcaaccaaggcaggtcaaaggtccaagagccttatcttccgagaagaattctccgatgacaaggctgggggttagggagagtgtatgactcaagtgactgatcgaagtcgctaagtgagaagacactcgcacacaccgcatacagagtaagaaagctcagttagatagatctcttttctatttcacaagtattttttacagctcgcaaaaattgaaaatatattacaatctaccctgagatgtttgtcacaggatacagaaactaccagcaagtccaacgccaatccatcgactgaaagattttctccgcaagcggtgccattgacttcgccaggtggtctatctctgcgggagtccaacgagaacgtgcaaacccttcgtggaggaactcgaggtgcagctgcggacgattatctcgtatacaggccaacacgtgccctccggcatatcggctcgatcgacggcactcctgcttcaaggcctcgtcgatacgcttgccgatgccttcaagttgggcacaggccccattcagccacgagatatacccggccaccgactcctcgggatccccgcgagatacttggagttcccggcagactccggccatggctgtgcaacaactcctgaggtacgagttgaaccacacctcacgacctcggagtgcttccacggcctggtcctttttcacttccaacatagtcctctcaagttctgccacctcaaacttcgtcctctagtattggatgcgatgatctcggtcggcaagcacactctcgaagtctgctcagtatggaagcgactaagtcaagctgccctcctctctcgagaacgcagcaaatcaagtcaatccagctgaaagagcaaagaagatgaaaacaaaaaaaaaccaacctaaggaagtcgtcgccacacccgtttccacggacaagttctgatctacgtcgtcctgcaacacatacgactcgaaggcaagtgccggaacgatcactggcaactcaggctgcccgcactgctggacatcctcgacatcgatatctctacaaacaacaacaaagtactcaggatcaaaatgctaaagaaaactaaggtgatgactgcacacacaaaggcagttggagccaacaaaagttttacgaagcataactgattaaggagtacagggaaactgaagtcctactcttcaaaaagggggagaacagactcccccaaatcaccgacttcttccatcacacccttacgcgcgtcgttagccgccccctgatccaggatcccctggaggtcgagttcagggtgcgccaaccttacgcacgcgaggacgtggcacgccccgatgtagatcccgttggacatatcctctctgatccttgccgcatgcttggaggggatcgcctccattgccgtcgcagttctgtaatcgaagtcgtcagcgagaactcatcgggattcgccgggatcgtggtcgtgacaccacactccccggcgaactggtgcaggccagtgtaggtaagccgcagcaagccacggaactctgacaggttgttctcgagctccgacatgcggtgctcgagcccctgctgttgccgctcgttgccggccaccagctccctcatcttctggaggtcctcgcgaacctccgccaggtaacgcgctagcttgtcgacgcgttcgttcgctgacgccgccgctgccgccctcgcctccgcaatctcgcggcctatgccgcgagcgctggcttggaggatgcgccttatctcgatttggagctcctcccaagtgaggacgtcagcgggagggcctcaagcaggcacaagaccgccggcagggccgctgggcgttgcctcacggctccgaggcacgaccacgacatctgtcgaggccgcagcaggagacacactggagttccctccagacccgtcttgcgctgccttcgcccgcgccaccctgtgaaagattgctctcaagacaggctacaagagttcgacgaattaacaaaacctcaaattcatcctcttacttctcgctaagcgttacaagcctatgccggcgcggaggcgggggagacgcgtcggaggcctagagtaaaaacgagcatgatgtgaggtcaagatcttcagtgatgaagggtcgggagagcttaccgatggggtgggcgtcttccgacgatttccgagcacggaggagaacttcctcccccttttcggaacattgccgccactcatcgtggcagcagcggcagcaacatcggacgcctccttggcgacgtccaccttcagcgaagccgccgcctggtggtccacgagcggtccgatgatatcagtaagagggagagcctgcactacataaagtcacaatgcgatcccggaggaaaaagacaacagggccgtcgagtacactcacattgatcgcggcttcgcgttcagctggctccttctcgcaaagagggacggggacgttgctcgccgttgtaggaccgctgatcatcacttgaccgacacggtgctccacggtttcgctgttcaattgtagatcgaaaaccagaaatgataagtcaggaggaatacacacttaaggaatggagtccaaaatacaagaaaaataccctgaggagaaacctgggtcacgtcctccggcccagaatagtgaaagggtgggtgggctcaagcctagaacagctggatctgcctacgaatgaagtcggcagcgacttcataccccgacaatccttgtactcggaggtcatcgatgatatcgatgaaggactgaagggaaggggttaaggcgggtttggcggtgcaagaagaaatcttgtctggttgctcctcagggacaacgaagactggatccgaattttctatctgaagatagaaccacctcgcccgccatttactacgagaagaggggcactagaaggggatgtagcgcgacttcaggccatcccaaagtcggaaaccaacgcatccagataccctgttggatttcatccaacgcaactcgtagtagaaacgaaagaggtcgagaaatggctctactccaatataggcctcacaaagatgcgaaaagatactaaggaaggcgatggaattggggttcaaatggagcaaagaaagaccgtagaaattcaagaccaaaagcagaaattcggaaggaggaggaagaaaaccacagagaatgtagtcctcaactgcaaccatgcggcccaggactggctcagggtcagtacctcctggttctctctccatggccccgcaaccggggagagcgccgtcctcctgtaacttcttcagcgacgcgccggtggaagtggatttgtcgagatccattgccgtcggagatcgtcggaggagggacggagatgaacaagctagggttttgcgggagcggagaagatgaggagcgcttagagactgaaaagttctttcgcaacaggcggacttcaaaatggatccccaaaactcttttaaaggcgcactaccggcggtgcgatttccaaggaaagaggagagatgcccgccgaaaatttctgggtccgttacgcgcggcagtttttggacttcaatttaaattcactcacgaccgttgaacttttcatagcgttgtcgattactctttgtctctacggtccttacgccgagatcgactagacgagaacgacaacaaacccaacatcagaagtcgcgatcggttacatgagttcatttaagtagaagtcgggggctactgtcagggttacggataaggtataccctctacccttggatatatgctatacatcggtgtggtatatctgcgcgtatacggacgttctttgtatgcgctaaggaaattcatcacggagtccatagatgaaaagattcctacccggataggactgggtcgtaactgtatcatgtagggtccgatgtctccgagtcctacttggaaaccacctgacctgcggtataaaagggaccccccccgggaggacctaaggcatcgaatctcacatccgagacaaccaccatagcctacgaagccggagcctacaggagccaagtcgccgggtgatctagtcgactcgactacggtctcgtcggtatcatcgagttccactgttccctttataatctctgatttccatcatataatcccatatcaactagattagggctattacctaccaaggggcctgaaccagtataattcatgttttctatttgcttgatgtcatattacgtagatcctcgtaccagtgtaccccaataccctctatatccggtctacgggtatccccagtcgacatatatgtaaatcctaaaattacatattaattacatatgtaagtaatgtgtaagtggggtgtaactagtatgtaaatttgtataaatatataattacaacaagaaagttgactactacaaacccatagcaattccggatcaacaaataaaataaaaaaaatgcaaagggataaacaggtggaggaacggatgtgcatcgtgcacacgatgtccagcgcagcgcatcccagccgttaaaatccgactgtactcagccacgtaatgtggcgacactttttcagcaaatccgttaattaattcttccctagctattaacttggattgtcaaagctacgatcgacatggtcagcgagcaatcgaattacagtttatgttgccgagaacaatttgatcatcttttgaacgcgtgcatcctcaccaattagttttcagacacgatgcatgaacctaattaaccaatgctcttcttcttttatgcatgcataaacgaaagatacaatcccaagacgaacacttgcaattgccgacttaccgagaacaatatactatcttctactgagttgatctgaggttaaacgagaaagacaagtttcatataaattaagcatttcctttgatttgaatgtttcagccttagtgccttacttaccactagctgactagctgtagctacttgatcaagtatcccctctctacttcatcactcttctaattgcaagtgttcgtcttgggatttactggagccggtcgaagagtgatgggcacacagtttagtactccctccgtttcaaaatgtttgacaccgttgactttttagcaaatgtttgactgttcgtcttattaaaaaaattatgaaatatgtaaaactatatgtgtacatgaaaatatatttaacaatgaatcaaatgatatgaaaagaataaataagttcttaaaatttttaataagatgaatggtcaaacacgtactaaaaaatcaacggtgtcaaatattttgaaacggagggagtattaagtagggaagacttaagtcgttgaccacacagtttagtagttcatcgcccttgatgggcatcagaaaatttactggacccggtcgtccttctgtgagccaactaatctggatcactggaagtcagaagcaactcgagatcaatatgtatcgatcgagcgaaaagagaactccatctggtaggaatcttcactgttattttagacaacagatcgaggagagttgtcatgataccatattttaccatgcaccttgcccgaagctgtgtggtcaacgacttaagtcttccctattaacgtagaccaaattaagctatatggtcaatgtgctgtgctgatagaaacgctcagggatcttacgactagcttcacaaggtagcggtgggctaaacgatctgggttcgaagcatcacccattctaattactccctacttccctaaacgtttgacgccgttaactttttaaaagatgtttaaccattcgtcttattcaaaaacttttgtgaaatgtataaaactatatgtatacataaaagtatatttaacgataaatcaaatgataaaaaaagaattaataattacttaaattttttaaataagacgaacggtaaaatattttttaaaaagtcatcggtgtcaaatattttaggatggagggaatattttatatgaccaatgcgctattcttagtacattttattactaagaaatattggtcataagtaaatctttgtgtgtgtgtgtatactgagtaaattaatgtactatatagataaggaaacatttctttccgttgataagcaaaacccatatctatatgtatatagtagtaaaatttatttatagatttcgtgttgttaacaaccaaaagtagtttggtagtgttgcgtagtataactgcgtacgtgccaattaattagaaaagagttaaatgcataatgttcaacacgtttagtttaggcatatagtctgacgatgacgggtttttagttagtatagggttacagttttaggagatgcatgtatgtgccttctttgtgtaatggaaaaaaaaaacaatcataactgaagcttcacggtctacatgttcatctttctttttcccgacagcaagctacaaagagcctaagacgacaaacaggtaacataagtgttgtaatagaaaagattgtcatgtatgtttgcggagtgatgtattatatattgatctatcttattaatttttttaatttttttataaccatatagttgacatacaataaacgggtggacgttaacccgagtgattagaatccatctcccatgctatggggaaaccgttttgatcactcgggtggacgtccacctatttgttgtatgttatctatatagttatgaaaaaaaattaaaaagatagatcaatatataatatatcactctataaacatgcaggttaaaatttaacttgtacagattgtaataaaaataacaaacaaaactccacatgctatgcaataggaataggatgagaaagatatccttggaatgcaggattttaaaaacatagagaaatagaagaaacgtaggagttgattgtcatatgtaagcctgctaatggcctaagacccgccccattcccaatccacaccacagcagttagctcaaatagttcaaaccaacccaacccgcaaatctcctttcagaatccaaaccaatccaatccatttctcacctcagtccacaccgcactaacccattcccttcctatggattcagtccaccctgtcaaaccatttcagaccatttagaatccacccccgaccacaaacccatttgattcaccatcaaccagaacatgcatttcgtcacgcacagcctgaacggcagcagcaagccggcgttcatagcgtcgacgacatgtttgtgtcgacctcgccgtctgtcaagccgagcacgcggtggccgcgatgcagcttgttctggcgccgccgccatggtccacccgtctggcgccaccttggcgtcgtcgtcgtcgtcccgtggaggctacatgttgagcgaccggctctacagcccatctcacgtccgccgccagcagatgctgctgctacaacagcagcagctgctgcaggggcaacggccgccttcgtcctccccctcgccggcgacggcgcccagggcggcgaggcagaagccgctgccatcgccgccgccgcctccctttccggcggaggcggcgaggcagaaggaggtagagaggcaggtggacgcggttgttcagtcaaagccgtggtgtcgccgttgccgtcctccgcggatgtgaagaggccgccggcagcggaatcggtgccggagccagcgcgagcggaggaggaggcggccgtgatgcagcttgttaatcgaccagggaacatgcatcgtctcatcgaccgctggagtgtgttgtccacgactgagacctgatctagccttcttagtggaaaccattcacaatccatgggttcaatccatggactgaatccacattatactcaaaaaatcataaccatcaccaaaccgccccaatcctcttttccggtggatccaaatcgatccaacccatttatagcgtgtgcccatttcaatccaaccaaagcaaacccaaatacaaaaccaatccatttaacccattccaatccagtccattagcaggcttagtcatatgctatacaatgctacaaaatttcaagcagagtaagggtgagtttgagggataggagattgagaagattgggaagatacacaaaatgagatgagtcattagcgcatgattaattgagcataaactattttaaatttcaaaaatagattaatatgattttttaaagtaaatttcaaaaacgcaccgtttagtagtttgggaagcgtgcgcacggactacgatgtgttttctcaccctaactcaccagaaccaacgctccctaacaatagaagtgatgtcttttgaaacacagaaattttaggggaagtgttatgtgaaagagagagtagagaaagcacgggagagtgtgcattggacttgaaaacgagtggaaaatgtgattgttttagtatatatgaaccaactccaagtaatgttttgactcggtcgatcaaatttgccagccagctccgatccatttaaaggctataaatagcagtacgtccagtgttgtaatcacgcacattccacacagaataattactcttgtttaccataagtaatctatcagagaacattgtagctctctcttcgatttgccacaagaggtcgatcgggttgccttcaatggccggccgagcccccgccgtcgccatcgccttcctcgtcctcgtcgtcatgccgggaatggcctccgccggaaagatcccacggttcttggtaagcccaaagacaggaaaagcgttgcgggacttcttcaagaaccacgcgaaagacgtggtcggcctcctccccaccggcagccccagcagcagccagggcgcgacggcgcagatcacggcagcagcaatgccccgagcccgccgacgccgaggcgtgcccgccacgccccggccaccaccgccgtgacctacagcgtcgccttcgccgtcggctcgcagcaggacttctccggcgcgctcgacgtcaccagtgagttcgtgtgggtgccgtgctgcgccaccggcaactcctcctgcggcacgaacaacaacatgcccggcgtgacggtctacgacgcgcggcccgaggagctgtacaaatgcgagagtgatacctgccagcgtatcatcaagccgacctgcaacacgacgggcgatctgtgcgagtacacctacacgtacgggtacgggggtgacgacggaagggagacgaccggcaacctcgccgtccaaaacttcacgttcggcgacgacagcgaagacaccgccgtaaagggcgtcgtcaccttcgggtgcagctcctcaacggagggggacttcggcgcgtccggcgtgctcggcctcaacaaggggaatctctccctcgtctcgcagctcaacctcgggcggttctcctactacttcgcacccgaggtgaacaccacggacaacaacgcagcagacgacttcatcgtcttcggcgacgacgacggcatcaccgtgccagggaacagcggcggcagtcgtccccgctacacgccgttcttcaccaccggcgcagtccgtagcgcgaacctcgacctgtacttcgtcgagctcaccggcatacgcgttggcggcaaggacctgcagctcgggggcggcggcggcggctcggcggggggatccctggaggcggtcctgagcacctccgtgccagtgacttacctcgagaagaacgcctacggcctcctgaagaaggagctggtgagcgcgctgggttccaacaacacggaggatggctccgcgcttgggcttgacctgtgctacagaagccagcacatggacagggcgaagatccccgacatagcgttcgtcttcgggggaaacgcggtgatgaagctgcagcagtggaactacctctaccaggacgaggataccgggctggagtgcctgacgataccgccgtcgccggacgacagcgatgggttgtcgctcatcggcagcatgatccagacgggcacgtacatgatctacgacctccacaagtcgaggctcgggttccagacgtccgatccgccgccgtcccagtcatccgatctgccgtccaatccgacgtcatcggctaccgcgcagccaaagccacggggggtcgcggtcgcggtggtgacgatggcatgtttcgtgtggtgccttgtggtgctgaacgcctgaacgtggtctcctgaaacaactactactactattattatgcttttaattacctttaatttttttccttgctgttaggatgcattatagtagttcaattccatttcttctcaacaaacgtggtttattatgatattatgtaaaatcggtttgagggtgttgttcagttatcatggtatgcctagtaggctactccctccgtcccagaatatagcaacctaggaccggattggacatatcctagtactacgaatctagatagggggatacgtcccattcgatcttaggttgctatattctgggacggaggaagtagtactttatttgaatcggagtaataacgtagcttattgacctagttctatcagctcactcagcagatggggtttacatgtcagcgtccccttctctccctctcttttatctaggggtgggcaaaataagaccgaaccgaagaaccgaaccgaaaagaccgagaccgaaaccgaaaagaccgagaccgagaaattcgggtagtaattcggtctcagcatgtcaaagaccgaaatttgttcaggtaattcggttcttgggctcagttaaccgaattaaccgagaaaaccgaattgtggcccaataggtccaggaggcccaataggcccaatacaccactaaaccctagagacaacccgcaggctgcatccctatccatccagccatcgcgtcgccctcccttccatccccatccctatcgcaccgccctcccttccatcccgcgtgagcacgcctcctctgcctccatcgtgccgcgctgccgttgccgcctccatcgcgccgcgccacgccgccgcctccacatcgtcggcgccgtctccgccctccgcctccacgccgcctcgccggtcgcggcgggccaccggattcatcacgccgcgccaccacctccgccctccgccctccacatcgccggcgccgtgtccgccttcacgctgccttgccggtcgcgcgggccgccggccgctagatctatcgcgccgcgccgcgccgccacctccgccctctgcctccacgccgcctcgccggtcgcgtgggccgccggctgccagatccatcgggctgcaccgccacctccaccctccgcctccacatcgccggtgtcgtctccgccctccgcctccatgccgcctcgccggtcgcgcaggccgccggccgccggatccatcacaccgcgccgccacctccgccctccgcctcgacatcgccagcgtcgtctccgccctccggctcggctcctctaaattcgatctgaccgagaccgagaccgaaaaaactgagaccggtcttgatttttttgggatgaaattcggtcctgactttttaaaaaccgaattgactgaaaaaccgaagaccgagaccgaaattttcgggtagaccgaacgcccacccctacttttatcccttgcatcttccttagcgacgaaggctgtctccgcaacaaccagggtttttaattttgaaattggactttatgctggcggtgaccgaaatttcagaaatttctggccgaaattagttgaaaatttgaatgaatttgaataaaatttgacaaattcacaaaaaattgcaaaaaaaacccaaaaatttcgggcgatatttgagcataccggtggggggcgaaattactgaaatttcgaaaatttcgaaccgaaatttcaaaaccctggcaacaaccccaagttgaacgacgacgaggcggaggcgcacgggttgagcgatgacaaggggcagcctgcgatgaagaggagtggtgagtgatggcttgggcagctcacttcctgccgatgacgacgaagcgcatatgcggaacctcgatgacgacagcgaggaaactatccatctcgatgtccccacctgctagggccatcctctaaaagcaggtacaatagtagactataagtcagctataagcacacgtggaggagataagagaggagagagaagagaagcgggctacagatttgtagccagctgcaatacagactccaagacaatgtgtgtatatgacaggtgggactaattattaatgatgtagtatatatttgtagttaactatcatatgaattggctattagattgactatagatgatttggagttgatagttggctatactattaaacttgctctaagaccaccatggcctgctcgacaagtcctcatgctattgtagtattgtactccctccgttccaaaataagtgcagccatgagtttccgtatccaatttttattgtccatcttatttgaatttttttttatgattatgttggtgatatgggcccagtgataccaagcttagagggaagagattgtccctagtatccacgtggcgctccctccaagggggtcgggcccgtgaataggtggtggccacctcctctaagcccgatggaaacgggctgtcccgacccctccccacgggccccacgtggctaccacgaggaccaggttaggtgg

SEQ ID NO: 6578 - DNA, 1363 bp, Oryza sativa
gatctccattggcatatatattccctatcttacagtctggaaaaccatcaattattcttggaacatcatagaacttttggttcctagtgcatctaccaatttgtccccgtcttgttgagccaaatccatagacagaattatctgcaagaacaaggactagcagtgtcatccgtttgtaacatatataacaattagtttgtcaatacatcaagtagaagaggtgtccatataattctcaggacgtccaataggaaagatatatgactgatgagctaaaacctgcaacatctcatgcatattcatcattagaacacaatgatggtgcagcatccctctgaaaagaatgctaaaggatggctcaaaggtacaccttcatagattccacatcatcagagaaagcagtggccttaaaattctcagatgactgataggaaatattatatggttgtggattgatgaccctcccacgtctcccgaatcactagtgcagaagggatggttctgcatccacatgaatgctttgtatgccatattgccatagttggaaaaaaatcaaagaatgctcactcagcccttcttcaaggaatcaacaaccctaagttgccggtatgtttggcttcaaagaagtgtataactgtgtataggtcatcttgttcttgattttcgctttcaataaaaattatcagtatggtcttgccctgctatagcgatgcctatcctcaattgaaaagaaaaaatattgattaattgtttctttcaaaggctgtttaactttagaaaatgcattacggaatatgattgggtcatttaaaagttgggtattgcccagacaatggaagatttctgagcaagtggtttcagaagaggtaacagagtaaatctgggtaggttcatgtactatgcaatttcttaaaaattaagctaacatcgcaacacatgatgttgcatacctttcaaaaggacaagagaatgacgcatcccaagtgcaagcctcacaacatgctttgtggtaaagtatgccacttcaaaaggtaagtttcttgggtggttatcaccagcaccgagctgtccaaatgaaccatctccacacatgaaaagctgtccagaatctgaaaataagaactagaaacatcacagctaagctcatcagtaatggttttatttttgaaacaaaataaacacctgaaatgcacagactatatgtgatatagagtataaagtagattttttgaacataaagcataaaggatcaaaagaaagtacaaggaaataaggtggtttcagaattggacacctgtagcaaatccagaatggttccatccagcagacacacaggttatcatgtagttctcaaagaacttta

SEQ ID NO: 6579 - DNA, 6522 bp, Oryza sativa
atctcgcggcgcgtggcgccctccgccgcgcggatctccgggatgcgtctcgtgcggaacagctcctcggcgtcggccggcgccgccgccggagactgccgcggcaggcatcgccgcctagaccttggagctcgcggcgagatccagaaaggaagcgatcgggattgaggaggaggtagggaggagactgtgtgtactaggagatgcacgttcgtttgagttgggtagaggaggtgactgagagcggtgggtgcaggtggaccgaggggtcgtcagagggtgggcccagtaagtcagagacccgacaaacagtacaccgggttctgggagtgatcttgtgagataattgttgcgagttgtggcccgtgggtttaggttgtatttaggggttgtttggttgatgcgtaagcttatcataactaagcttaggtaagttgtggcatgtggcaaaagtatggccaagaaatagttaatcacaagtgtggcaatgttagctctagttatctgaatatgacatgtgggacctaagggtaggaaagtgtggcatgacacaattgtggcattaaaacaaacacacgcctagaaactgtggcatgactgaagtgtggcatggcaaagtgaagcaatcaaccaaacacccccttaacgttaaaattggaagtttgattgaaattagaacgatgtaacggaaaagttaaaagtttatgtatgtatgaaagtttttatgtgatgaagaagtttgaagtttgaagaaatattttggaactaaacacggcgttagcaaagttgctaaatgtccatattttcttggcttaaattaaacaaatctagaacaagatgtatcacgtcccatattatatttgtttattttttaggatggaggtacatagttagactgttgtgaatgcttgatgcatagtagtccataggtctatttgaaatattcttgtaatgttgatagtttaagtcactttggttgacaacttaagacttaagcaccttcattgttaagtgatacctctgcatgatcattatctacatactcagtggtagaagaagtagtagtacatggtatccatgcaatacttgcattaggcagttgtgcttgacagccttgactcatgcatggggggtgacaaatagacaaagcatgtcctaaccagaaaaaagcctgattcacttctgactaagcccaggtcaaaactcttattgggcccagtctgaggtctaatcaaccaaacgatgccggccttgtcaagtggggataaaatatgaaatggccatgtgtcttatttacttttttttattatcacaggttatttgctttatacttctaataaaaatatgctttattaaaaatattttatatagtgtatttgtttagaccacttattctaatctatttgtgagtttcatttctaaataaaatataaatgtttcgtgttaatgaagtggacaatccatctgaataatctgcgcaaaaaattgtttcaaacatggcccaccaaacaactaaacaagacccgtatatggcaatgttaactaaacaagtccaatagtttgcatggcaatgtttgccgcatagtatgattgcaagtctgtaaccttgcattgaacgaatattactcctggtcagacaaaataaagatcaattgccgttatatcgtctattgtctatacagtagttctttttttttttagaaaagtttatatgctgtgtttgatacaggagttcccaactcctccctttcgttttccgcacgcacgcttttcaaattagtaaacggtgtgttttttttcaaaaatattatatacgaaagttgcttaaaaaaatcatatatatacaattttttttaaaaaagctaatatttaaataattaggcactaatagatcgctccgttttccgtgtgtgtgatgggttcccaacacccaccaccgaacacacccatatagcagttggtatgcataggataggaaatgcttggtaggtcaaatatcattggtcctttaggctgagttctttccttgaggttcctaactcacctcattctttttcacgcatacatatcccaaagcagtatagaatctgtctactcccttcgtctcgaaaaaaacgaatctagtactggatatgacatattctagtacaacgaatctggacagaggtatgtctagattcattgtattaggatatgtcacatccagtattaggttggtttttcatggacaaagggagtacatgatttttaattaaataagacaatagtacgatgaatcatgaaatcaagcaaatcaaatcatagtataataaaatgctaaaaagggaatgtctgagcttgtaaaatagagataaacaagtgactatggggtaggcatgaaaacggatcggaaacggacggaaactagctttatcatattcgttttcatattttttttcggaatcagaatcggaatcgaaaactcggatacggaaatgaaatcgaatattatcgaatatagatacggagcgaatatgagacggaacgaatacggtaacgaatatttaccggtatataaaaaacccctcaaattgagtttcttgatcaaggaagagatatctcttattattttagttcaacatctccaacatttatatcgtcaattttgtagacggtctcacacccgtatgtgaaaatcgattttcatggctattcctctaagagatccatatgcaaatatgattatcattttctattccccaagaccttttactagatatataacttatttaccctttataaattggagatgttatttattttacttcacatcttcgaaacttgtaatatttgttttatactttaaatgctttcaaatacaaatgttataaactacaaagtagtagatcccgttgagctctataactttgatatggaacacatctccatcagatgtcgtttgaattgtagatctgagattttgtaaaaattaatatggtatattataatgaatatttagacccttaaatgacctcaaataataaaatagtcaataagaaagttgtagatctcatcgagctctacaatgttgatataaagtttgtcttcatctgatttcgtatgaaaaagttatttatatatatatatatacacttattttttctaaaatttgctcaatgtgtgcggatatccgaaaaaaaatacggatagtttccgaccgttttccgattccgacggatagtacccttaccgtattcgttttcgtttccgagaaaaaaaatccgaattcgtttccgaatccgagaatttccggatagttccgaccgaaactgtccgaatccgaaaaaaggtccgggcggacggaaactatccgaaccagtttcaaccctactatggggtgcttagatccagggtataaagttttggcatgtcacattagatatacggatacacatttgaagtatcaaacgttgtctaataacaaaacaaattatagaatccgcatgtaaactatgagacgaatttattaagcctaattaatccgtcattagcgaatgtttgctgtagcaccatatttgtcaaatcatggagcaattaagcttagaagatttgtctcgcaaattagtcgtaatatgggcaattagttattttttagcctatatttaatacttcatgcaggtgttcaaacgttccatatgacagggtgaaaaaatttggggtgggatttaaaccagtgttgtggaagacggtatacggatatcggacggagagggtaccgccaaacgattaatcggaatttggcggaaatataacgttttgaaaatatatgtacatagttgataatagttttccctttttgataaacaaatgcatataactaaatatattccttctatatatccttaaatagaataaccatgtatgacatttaaataagttcataatggatagctgttactgtatatctcaattctcacgtagtaatgggttttgttcataatgcttgaaatgataatcaagagaatgttacatagcatagatgaccgtaatcaaggtcccaaataacatatgtatcggttacctcgaagagcttcatcaaatacaaactccaataacgtgattatcatcaaaatcaaggaacccatgttcaaactttagaggaagtcagttccttgtcattttacatcttgttgccttgtgaaaatttcggaagagcttgtagtcagtagtagtaaagggcacagctaacaaccatcatcacgccgacgattatacggttgattagacggagatggacgatttaatcggtaatgatcggatttatgcgttcgttaccgactaattatgaccgcatcgacgtgatgtgacggtctgatctccgtattcgtattatcggacgtattaacggccattaacaccgttttccacaacactgatttaaacaaggcctatgggggtgtttagatcccatcctaaaattttacacctcatcacattgaacgtttgaacacctgtatgaagtattaaatataggataaaaaataactaattgcacggtttgtgactaatttgcgagacaaattttttaagcctaattgtttcatgatttgacaatgtggtgctacagtaaacatttgctaatgacggattaattagacttaataaattcgtctctcattttatactgatggattatgtaattagttttattattagactacgtttaatatttcaaatgtgtgtccgtataaaaaaaattgggcgtgaaactaaacacggccaattttcataaatcaacaagctcaagttgcatcatctgacacgcttctttgtcctggccaatttaagagctaatttccagttcattaagtgcttcgcctgtgactgcaccaaagaaaatcaacaagaaacagcaataattgcatttttcaatcaacaagaacaagtcatgattgtcagtaactagcacaaagaaagacaggcgtttaaagcaagaaacaattactagtatccaggttgctttcgtcgaatatattattattgaagttaaaatccagacggactttttctatcataaacgcaaaaccccaatatcatgtaccataaaatgccgcttatggcaagaacacgctgaacacaatttcttggctgcgtatcttctgccactaaaatgttgagccaagcttgcaattcactcaatcaacgagcatttgttttgaaagtactgttcactaccaacttgacagaattccaccacaataaaagaaaactaagctgtggaattatctaatagtaccataatagttttgctgtcattttaaaggatgggttgcgcacaaacacagattcagctcaacacaattcacaaacttatttctattgaattgccatgatttgtttaattaactgatatataactttgacaacaatgtacaaaacaactgatatcaatagtcttccatgcatcacactgtcatcaaggcgacaaggcatgcctcctgaatttagctctagaccctaccgaaacaagaaaggtacaaaaacaataattccctagatcttaaaaatggcaagcattgcattcatacatatggtcacatgtaaaaacacaaggtgatgaattgccagtgtagagaagttacctgtaatattcctcagatacctgcaaatctcactggtgcataaggtgaccatgcaaacggagttctgcggctggacatcaagcttggttaatccttgcagcgtcctcttcctcacatcaatagcaaacaccaaatgcaacttgtccatgggactgggactggttctagaaagcaagaaaacaacatcatcatccatgcttatggtggggtttaccattggaagttccttgaacatttccacgatctcgctgaagctcaagttagaacgacatgggttgctggcacccaaggtgatgtctttaacaccaacctcacagtcacggtgccagtgctcgcacgaagaaccaatcaccggcattggcatgctccatgttgtggccttccagtcgtcacggattacctgggatttccttgtgttattgagcacgcaatccacataagaaacaggagtgctggtggtattcatcggctcttttggtgaccacatttccatctcaatatacttgatagagtctctgtttcggctgatggtcacatcccggaaatagctggggtcatattgtatcaggaagagatccctgttgctcctcgctgggcacggcagagggatgtcccggagcgcagggaactcatcgagcacgtcgcagaggaagatgccacgccagaggtccacccaggcgacggtgccaccctcgccgccgaccgtgatggtcttccctgtctcgtggtacagcctgtcgacagaggcaggtatagggataaacttgtctctgatgaactcggtcaccgataaccgcttggaggtccaacctttggaactggaggtggatctgtagaggtggaggtagaaatcccagctaacgggcgcaccgcctttgtacaccgggggggctgcaggaat

SEQ ID NO: 6580 - DNA, 7958 bp, Oryza sativa
tttttttctagcgtcattagacatagcctttttcatttagaaactaagaaaggacgacagcagtcggaactcggaacttttcccgagattttctcgctaagttcgcgaactagacttccccgcggagatgaaggggacgaggtcgggagagaggaagcgaacggtggactgaccgagaaagtgggcgaggccctcgagcccctccgggtcgctgaacgagcccacgccgacctccatacacgccgccgcctgcaacgccgaggaattaggggttagttaaacacacacgcacgcatacgcaccacaccaccaaatcacgcgagagtcgccgatgaaccgacgagcattctgcaggcgagagcgatcggggagggagatcgagaccttgtcggtgtcggagtcgctgatgaggaggcactcgagcgcattggggagcaccacccggcggtactcccgcttgtcgctgcgcgagcggatgaactccacattgctcgccgccgccgccgccgacatcgccgcttgttctccgcctccgctctcgcttctgctctcctcaccaccaccacgcggtcgtccaatctcagaggaatcgtggaggtttggtatcgtttggaaaattttcctatatatgacctcatttggatcaaaggaaagagcatctcaaattcctaattagggaaaggggagaaatcctatactttcaaaaggaaagcaaatgaaagaggtttcctcctaagggcgcaaatgatctccctccaaacggcagttatggccttcttgctgctaaaagaacacagggatacgaaaaaatgcaggaatatgatgaaaaatggaggattaggaaacagaggaattttataggattggatattcggaacacagaaatagaaagtggagaattcaaacaccctatagcagccaatgatgagacacaaacaaaaaggttggaggggatgtttggaatcctttgaaattcctgtgttcactggaatgctacagtattccttcaaaatcccttcggacttcggttaatcactgtgagtgagggattggaggggatttattccacacctattttggtatggattgattcctacgatgcaaacaagtgaacagtagcaaatccaaaaagaatcatcaatcctacaaaaaaaaatcctatgtaaaccctttcatccgaacaggccctaagaaagtcgtcgccggagctcgtgctgccaccgggatccgcagcgcacgcccgccgcaacttcagctctcgccggcagagctcgcgccacgtcgggaatcaacgcaggccaccacacgagctcctcgcaggctcacactacagccgccgccgccgccgccgccgaaggtcctgccgcttgagctcccgcacgagccatggtccgtggagttgtgtgcgagtcgagatcaccagtgactgagatgaaaggttacaggataatgctatgtaaatgaagatattagttgctagagtaaaggttaattaattagaattcctcctatccgtccaaacaccagggtcatgtatatatatcacatgttttttaatcatattctaacgttttgtattcatgtgttttattttaattagaattcctcctatccgtccaaacaccagggtcatgtatatatatcacatgttttttaatcatattctaacgttttgtattcatgtgttttattttctactccctccgtctcaaaatataagcatttttatacttcgacagtcttcgatatgctactttgaccaacgatataagtaagatgtttcaaataaaaagagttgcgctagtttgttcaatgataaacctagtaacattaattttaattttatatgattgatcttttttatttttgttctattaatagtcaaagttataaatatttgacttggcactataataaaaatgattatattttggaatggggggagtagcgttctgagctagaaaatagacaatatgttacttcatttgtatggtttcgataaaatatcactcaccgtaatacattggataaaatgagactaattgtctttagttaattagcatgtgacccatgcagatttgtgtggctagtatttttatattttctcacataatggcacatatattttcacattttattttaaaactagcaaaaatactcgtgtgttgcaatgcgatgtaaatgtttggagctgaaaaagaaaatattgtcgaaatggaaaaagtccaaatgccccccccccctaactttggatgaaatccatctagcaccctgaattctaaaaccggacatttaaccctctaaactttgtaaaatcagtcatattaccatctaagatggttttggatggtggttttgcatattttaaaagcttaaacgaacaactttaaataactaatataacgtatttacgtatcattagtggtaagtcatcaatttatacttatgcggtaatatcatactattattatgttggtacttgtttgtaagtgagagctaacaagtggtaaaaataaagatttaagtggagattttaatacatatattcagtgtgtatgtcatgtgatcaaactcatctaatttatatacaaattagataaaaaaaccattatacaaaaccaccttagggaataatatgatggttttgcaaagtttagggagggtggatgtccgattggtgctagacggatttctatgtaaagtgtatggggtatttggactttttccttttctaaataagccaattgatactcaaattggagcattatttaaattaaataagttatgggctattttttcaagaaaaacatttcaacttaaatatttaaggtttagtttgatttagattattaccgtggagtgcttacttcgtccctatattttagaacatagagtggctaattaatggtagagataaattaaatatttaaatgaatagcaaaataacatgtgttgcaacgaaggaaggcaggtttaattatgtatgcgtactatatacttcataatatcaaataggaagccccaatggttgcctgtgatcaattagttgatatatgttctgcttttagccgattcatatattgctttatatatttctcttgtgacaagtggatgtatgattgtttgtgaggagaggtaaggagaaaatcaagaagataggtaagactaggcgagccattagtacataattaattgagtattaattattttaaattttaaaaaatgaatttgtatggtttttagagtagcttttatatataaatttttacaaaagacaaatcgtttagtagttcggacaacgtacacgtggaaaatgaggtaaatcttctctcaatcttcaagtgaagaacacgggggatgaaaaagttttaaactacttttattcagactctctacaattatgcgataagttaatttatgtattcaattttaaacatccgcagtgaaacagtgcttaaatattgctgctgagaattatctgatcaaagcaatttataactgtaaaatacttgtgggaaagaagaaagatatccagaagctcatgcaaaatgtgagagggacaatgcatagaacccgactttatctgcactttgctctgaggattgttctctgaaaccaaaaaccactggtgcaaaatagtagtactactcaaccagccaaacctttaccaaagtgaaaagtcaccatgacgttcgcctgttcttgcagcagtgcacgtacccctgctctgagcgcatcaggctcctctaccttcaaaggtgtgagcctttctcactaacatgtaggcccatatgggcccgatgaaccccaggtccacctgttagtgacaaaggtatggtgtctttgaaagcagatgatcttaatccgctctgaacacgcgctcggctggttggcctgcgaaagacatgcttctcttatctcccttttctctgatcgttgtcgctgactctcttaggtctcaacctaggtaggagtctagaagaggagacacggactcatattggaggccgggggctgctgttgtcgtgtggacagcgaatcgccaaattcaggtggcgaccgacgttcgagttgtgttgtcccagaggaatttagattgagtgatttgagtcgaacacgtcgtgcgtgagggactgtagtgttggaacaaaaattaggatgaagaacacaacgtgacacatacggatgaaggcgacggaggaaactcctggtagaaacaagtgggtccaaagatgcaggcgcagcggtaacgcggaaaaggacaacttaccagagccatggtaaaagatggctgctacagtacgagatataccgttagaatgatacactttaataaacctttatcttttctctatctacctgagtaaccacacataaaataaaacgaagcagcagcgctcccccttgctccctcgctcatccacatcaattgcaaggaagggtggaggcatcagaagaggaagggtgaagaagagccaatggcaggtccatcaccaggcgaccaaaaagcaatgacatgtgtcccctctctcctcgacttgataccaagtatctgggcaatgacatgtgtcccctctcttcttgacttgataccaagtacctggacgtactagaccttggtatcgagtgtctggtaccaccatggtacccaagtatcaagcatgatacttataggtatcacctatgatatcgctaggtatcatgatactactggagtatcactgggatattcaaaaggatatccatgtatcaagagaaaactcaagacaaatcaacataaagtaatttcaattctaaaaaatcatatgtttatcaagagagggctcaataaaaaccaataagggaaatcgattccagaaaaaagtcatcataactatagaaacacccataaaatatgtagaaaaccccacatcaaaccctaaaacaagccaatgcaggagcttgagggtcacgagcccagatcttggtctaaagatctgcaccacaaagaggccttgtccttgatgatggtgacctcgtcgacgatggcgacatcttggaacgtggtgagcaactccacctccgtcatgtgctcgggcacctaccccactaacagcttcgcgatctcctcctctaatccgttcacacctccaccagcagcaacaacggcgatggagacggtagcttcctcgacgcccgacgcgccaccccgcacggccagctgccatcgtggcctccgtgctcatgagggtgttagtcagagagagtggaggggaaggggaagagataaaggagaggataagattgaataggtggtgtgaggagtgagggcaagatatttactagtagtagttatcccatgtctatgggacttcgttccctagattttctgatggtaaaaacatcttcaatttttataatagcagaggatagagatatattaagggaaaaaaatatgaattatccccctgaactattacggtcgattgaattacccccccaaaaaaaactcaaataccatacgttttataccctcaattattcaaaccagataaataacccccctgagcactattttaggttgttttgacctaagcttgcacatgtgacgccaatgtggcaatccagtcagcaaagaaaatagaaaaaaagcatgggcccacatgtaatctcccccagtcaagccatccctcccttgctctatctctctctgcagtctacacctaaggcaggagaatacgagaaggcggctgaggaggggcttggagcgatggctccagatccacctccagctgtggacgcagtggcggcagaggaaaaatcgcgtggcgccgtcccagcggatttggcagtgagctcagggagccatagtgatgtcggcttcgtcatcgtcgtcgcccttggagacgtacctgcgtggcgccccaccgacgcatgtggggatgacgtcaaaggcgggaagcgaggtggtggcggcggcgcaggggcgtggggaggggggcgtggagacgccgttactgctggcgaacatcctcgattggtcgaagatccttggcatggagtatgacggcaggggagcacgggcgcggacgcggcgcggtgactgttggatgagcgcggcgacgaggagttccgctggggtaggggctaggtcccgcacacgagctcctcctttgccgggagcgcatcgacgcatccttctccgcccgcaagggcgccggccgcacgctcaagggccgtgacctctgccatatgcgcaacgccatctgggagaagaccggcttctaggactaatgcctctactccaccactgccgctgtcgtgatcctctccatcaaagaggacctagttgccgcagtcgccccagttgtgcccgccgctgcgcctggagctttggcccgcctccccagccactcgtgtgagcttcggcctctgccaccgctgccgcaaccttcgtgcgagcgcgagctccgactcagtcggctgcccccgctcgttgcaggctgcggcaaggggagggagtgcccggagcttcggcgcctaccgtcgggccagccaccctagccactcttgtgagtttcagctccgccaccgctgctgcaaccttcatgtgagcgcgagctccgactttgctggtcgccgccgctcgttgcagcaagggagggagaagagagagagagaggagggaggagagtcttaaaggtggggtccacaccattttttaaaaagaaattaactggactgtcacgtaggactaaaaccactctagattgagccgggggttatttgtccggtttgtatagttaaagggggtaattcaatgtaccatgatagttcatggggtaattcgtacttttttctatattaaaataacaacataattttaaattatgtacaaatgatcaaactaaccggtgtgtatctcctatgctcacgagatgaccaaaacacttctttgtttaaccaaaactgattgatcgatctcacctgcgcgttcgtgcaagtgcctcccaagagtttgttcgtcgccgccaaggagaaggcccgaaaggatgaccaaagtcctgctcggtcctccacgcgctcatcgagccattatcacctccgccaaggttcacaaaaccaatcggttttcgtgtaaaccggccggttttcgtgaaaccgctagttattggtttgtgggagttaatctgtagtagtctattttcgtatggcgttgacccaaagtcattggtctttactgatttttgctaaactagtgaggagcgtttttcacttcgaagacaaaaaggtaaaccctgacctccgctcttttatcggcaacaggcaaatcaacgaatgaggatatccagatagagcatgaaccatagtggcatagtgccaagatttgcactagcaagcctagaacagtaggtaccaggcaaacgaagcaatcggttagcgtccaggatcacctccagcctccaggtacggcgttctcctggagaccagaatggatgtgtacgaaagagatgataatattatagctgtttggttggaggtagtttttagaagggattggaagtttagaggaataaggttattaagtgttttgtttggttgagagacatgagaattttgttagaatggagatggtgaattgaggaaggaactccctccttttcaatatctgggtaggggcaggtaattgggagggaataccttctttactttatctaagcaaaatctcagccatccgtttttattaatgacctaatctccaactaaactccctatcaatttccatcacctctaccaaacaatatattgagattaaaaatcaaattctcattttagtcccatcatcaaattttttgtctaaactacaatctcattatatcgagttaccaaacaaaccgagaatatgagaagccgccgccgcaaagaagccacgagaccaaggatcggcgcgcactccaattattaatagacgattgcag

SEQ ID NO: 6581 - DNA, 15269 bp, Oryza sativa
cccagatgaaaaagtacggccgcaagctctttatgggcggccaaaattgtaattagccccttgccgccctctgtatgggcggcaagggcctaatcgcaattttgaccgacggcggcagacgacgcggtcgacccaccgtctgccacgtcagcttgccgcccaccattagggcggcaggggctatttctgtaatttttttggtcgatagattatttctgtaaatattaaaaaaaaaatctaaaaacgaaaaaaattcgatattttcatggaattgtaaataaagatgtccaagtcaagtcctgcataacgaaagctcagattcgttggaaacttcaccgagttaacaaaaactctgttatgctcgcagaactgcacaaagtgaaacgggggacgataattccagcgaaaacctctctcggtctctccccttatcgaggagagtagaagattacatgcgtgtactgtacaccatacaagctagtggcggttaaaaaaatcgattcgttggtattataatatatctatcagtgttatagtatgctgacggagcgtgaggctcctcaccgggagaccgcgcaggcccccctttgccgattcggccgggggcgctaagtgagattcttcgccctcgatctgaggaacgtcagcgagagaggaaatgcgcaagacacgggcgacgtagacaggttcgggccgctgagaagcgtaacaccctactcctgtgttctggtggatctgtgtgtgaaggaatacagagaggccgagagcgaaagagagttcaggctctagaaaccctttgccagagtcccaactcccctcctttcttctctcctctttcttttttcctaggcctgggcctcctttttatctggtcaggggtcaccacatgggcctctagctgcctaagaagggaaacatgctttttacaatgagggctagtctacagccggaagtgacctctgacaagcagagcgcacgtctcctgccccgctcgcccgcttttccggtggacgcccatttcaaccttcatttaatggccagcgacttccttgccatacttgcgttgaagcctggaatggatctgaccgggactgacataccaactccaggagttagcacgccggctccggctagggacgagagccaggaagctctcatcattccgacgggacggggcgaggcgtgtgacaggccgcctgttgccacctaacccgcgatctgaccggtctgtgaccggtcacacaccgcgaccagtcgcggaccggataagcgtgcgctgcgccgcattaaatgcggcgtggcgcgctcgtccaatcccgctataaatgcggttaggtgagccccgctgtgctcacctaacccacacgcgtggcgccaaaaccacagggggtcggggcgccccagccctcggggccgaaacgggagcggttcgacccctcggggagacagagggaggggtggccacgtcatcctcgggtccgacccccccgagggggtcaggccacgtgggtgaccgcggctacccaagcctctagtcacgataccctcggccccatgttaccgacatatgctaattataattagatcatgatgttataatatatggataaacaattttgttataggttttgccgaaaattatcggtgtcgtgataccggtccttctactgtgatccgcccctgatacaagcatacataggtgaatcgaggattccacgcgcgtggctgtgggagatgctttgactatgctcaccatgtcttctctcgatacggagaaaccagcaattttcctgtgtcggtgcatctttggctgtgtttagatctaaagtttggatccaaacttcagtccttttccatcatatcaaactgtcatacacatacaacttttcagtcacatcatcttcaatttcaaccaaaatctaaactttgcgctgaactaaacacaacatttaacatttattgcggacacttaacatatcgaacttatcgggaaatttggtgagtggcgactgattcggcccgcatcaacttcgacggcgatgttcttttttctttttccttctttacaaggttggcagccctgaaaagtattcgtgtccttgtgctttcgtcattaacgtcttcttcccctaggggagatggtttgttctggtcaggtcaacttccaaacctaaagggaaggggcatagcatatcactagtgtactcgtataactgtagtattatccagcaatctgttggtttcaagcttctagtaagaaacagtaacagaaaggggttcaaataggatcatcgcccggaaaagtcgttggtaacaaaaatcgtcctaaagatcatcaccacacagccaaatgccaatacactacacactccataaaactcttttgagtttcatagcactgctgcatctgacgcaggaaatttcgctacatatgcttcactgcatcatgtaacatgctgtcatgttaccgggacaccggcgcacctaccctccatactccatgacccatgtttcctcgtctttgacagtgcgagcctgcgtgatgtgcgaagtgtaaacactagacttttgcctctgcacggggtgctcctagtaaattcccggtcgccgtggcgtgaaatccgtgaggattctgagacaccaagcaacgctgcaaacggcctccaccgaatccgaaactcccccaacaacctaggaatcagaaccggcaacgtcaggtcgcacttcctatgcgcacttgcagccggcgcccagcaaaggggacgatgagaagacgagattttctttcacggttcaagctttcacaattttacttgttcacttcttcgtgattttactttggtcgtatgggaagtgaggcaaccattggccggatacttgggtggaatttacgaaacattactgttttctcttttgttttctgacggaaggcagtagtagagagttggagaattattatagaacagtggtcgatactgcttaactatggagtttcatgatctcacaatctcaacttttcttgtaactactttgtttgagaggccggagtgccggacacatatcctctcaagtctcaactaggcttaagcaagctttcataaaaccgttcaggctaagctatcaaggtttgccatttgccaacttgctactatacaatgtaaaaaacgaaaaacaaaatctatttgatctctttaaaatattgggacgtctagtcaaccatctcagactttaagggtgggaaatattttcttgggccgtgtttagttcacaccaaaactcccccaaactctcaactttccatcaaaactttcctatttacataaactcctaactttttttttccaaactaccaactttccccaaacttctccttaatttcagaaactaaacacagccctgatgtcacgtataacaagttttgattcaaatgaaagttttctaattaaggccttgtttagttcgcggaaagaaaatttttaggtatcacatcggatgtttgaccggatgtcggaaggggttttcggatacgaatgaaaaaactaatttcataactcgcctggaaaccacaagacgaatcttttgagcctaattaatctatcattagcacatgtgggctactgtagcacttatggctaatcatggactaattaggctcaaaagattcgtctcgcaatttacatgcaaactgtgcaattagtttttcattttatctatatttaatgatctgtacatgtatccaaatattcgatgtgacgtttttgggaaaaaaattaggaactaaacaatgcctaaattcgcatgagtccgggatagtagattgtaaaaaaaaaacccaaggctcatgagttactcgagctcaatttaagctcgcctcgagttctagttgagtagagctcgagcctatgccaaagctcacgagctttgtcaagctgagctcgagctcatgtcgagttttaccgttcatttaataaagtagtacatcatgtatgccatatatctgtatccatgcggtgaagtatcttgcgttggcacaatatatttatcttattatttttcatcaatcattagcatgattaaatataaataaattatttatttcaagagattatccttgaaatatactatgttgcgctacttataagccgactttgtaggaaagctcaagcttgaaccgagcatgtctaaaaactcgaaggttactcgggctcggtttgagcttgagcctagataggtaagcttgctcgagctcgacccgttgtcagcccaagttacaagcatacccttacacccaaatccataacatgactttcactgaagcaatgatatgcgcgtatcaatccgacaaacaccaaagacaacacacaaagggcccgtttcgtagagcttttaacttctattaactctaggagttggggtttggagcggagttgtggagcagcctaaacttagttccacatctctaaatcattttgtgagagtgctccacccagctatattcccattttaggtggagttgaaattgttcggctaagctccagctccagaataggtgaagctggagctgaagccgtgccaaactagcccaaaaccacaacgtcgcacaccaactttcgtgagagttttgcaggaaaatagtactaccttcgtttttttaatatgcaacactattgattttgaacacgcatttaacaatttatcttattgatgaaatatgagaaaaatacgtaattatcatttgttttatcgctagaagtactttagacatgatttatatagcttttgcttaattttttgaataaaatgaatgatcaaacgtgtttaaaaattaacggtgtaatcaacgcttctcctttttaccctaaaaaagtatctctttttcacgatttcaaccgtcagaaatgcgaaacccacagatttgcgggtgccttcggcaagaaggcgtttctcctcccgcacgggcccgtgtgcagcccgcacccgagattgggcggcccgctcccacccccgtccgtccgtccgtcggaagcccaagccaaccgcctcgcgactccaccgcgtctctgcacatgcccagcccccaccacgaaattacccaccccccatcgcgagagaaaaaaactactaaaaaaatatcgcgcataatcccaattcgactccgactcggccattccgtccccaaacccacgccgactcgctccgcttttttaaatcccccaacccggaacgaatttttccccttcgtttccaccaccaccccccaccaccacgacgcggatggcatcttcgtcgtcttcgtcctagcgcgcggcggccgccacgcgaccctgtttgagagggggaaaggggggttccgctcggctaggcggaggaaggacgcagccgcccctgtcccgcggcgaatttggatgatcgaggcccgccgtcgagggtaaggagtgatggaggaagcggcggcggcggcggcggatttcgatggcggcttcggcggcgccggggaggacaacctgtccatgcccctcggcgacttcatggccttcctcgataacgaggactggaaggagcagcagcacgaggtgcgttactactcgccgccttgccctaattcgatttacgcccgggtgtatttttttttcttctgtgtgcgtcggatccgattcggtgcgcggggttgttggggggctgggcttgcgtctgttctagggtttttgattgcatcggggccggatgcgtggatttctcgagaagtttctgccttcaattaagcgatttaggatgtttggaggctaggcactgtgttttcccccacgagtgttgtgtcttgtttaggcgcgaatgatacaagcgtgatcaagcttacatgcggttttggtccggctactcagtttgaacaggtattttttttgttgttgtttcggataagtggagctctgggtgcctgaagaagagctaaaatcaagtccgttatgcagtttcattaaatgttggttggtcaatgacaataatctgacgacagatcttcaacaatcatcggtcgctgaaatgacgcttgatgtacagaggctcggttgctggtttattgggtctcatgtttgattcactgcccttgccgtggtttatactatgagaaagtgtgttgatgatggcggctggaagcgagtttactggcagtcgtggcgttgggggttgtgatgtggtacatgtatgctgttttcagtggcgatgggctataaatggccatcaggctgttgggattggagaaggtcaaacaggaagcagcttggtagtgagttggaagtgtgtttgctgccaaatggatacaatgatatgtgggcttttcgtgttgtcttttctgctctcactgaacttcaggcccctgtacacatgttctgtatgtttaccggtgggcatagatatacatcatgcagctatgaggtatccttatggcctgttaagaacacaggagttcagtatatttttcacttgaaacagttcgatttcctcatgaattggaaaaattctagtgttgcaaacggccaccttttcccctgaatcctaacacatgtattttagcagtagaaaatattgaatttgttgtgagcatgcagatagctaatagtctgacctcacaatatttattatgatggtcgatcctggtaaatgctttgtttttatgtgtgcttgaatgcttttagttttgcatttgctatgcctcattactaaagagatgaatcgtaaaactgaagtcatttcattaatgaaatgggagagtagatcctttctttctcaaacaaagaaaactaaagagatgaatcaaactgattttatttactgtgttgtgattgttgtgaccttgaatactttgggtgagtgctggggaaatataaaatttcttgccgcgttcagttctgtggcaaaataattggctgataccataccaagtgaaattgaatcttcattttttgtgctttgtttgaggaagtgtttttttgggaggttttgtcttttaattgtattttcaagttgttggttgctaggtcttgtatttaccaaccttgggtagtaatgtactccctccgttccaaattagatgtcgttttgactttttgcttgcaacttttgaccatttcgtcttatttaaaacattagtgcaaatataggaaaggataagtcatatatttaaagtacttttgataacaaagcaagtcacaaacaaaataaataataattccatattcttttgaatagatgaatggtcaagcattacaaacaaaaactcaaaacgacaagtattttgggacggaggtagtacttgttatgctcggaatttgtcatatggtttgtggtcagtaaccagtaaaactctacatttagttccagcatatgccatcataggctgttaactatgtgtggctaactggatatgttcatagatgtccaagtttccttgagtacaataactgggattgcattttttttcgtgtagctgatgctaattcttgtgtttattgtaagataagtcagttccttgccaggaatatctacctacttagctttgttgcatctatatatcatgccccttgtttagtctattatcttgtgttcccttgacaaatgtgcatatttgtaactaaagagctattatgttgtttaatacagggcaatcaaggtttagagatgccagtggacagcacaagttctgaaaatgcatttcaaaaccatgaaggtaccagaagatgctcgttttattttggtttctgctagatacacacttttcttttccgtgtccatttttttaatttttaaattttattaaaatgagcagaaatttttgagaataaagaaaattggtcaaactactcgcatacagatccttcacatagtcagatggatgtaatggtggaacttaacaatggtggagaatcttttgatcactcagaggatacctcttatagattgcttagcaatggtgagaaacacaagaaaggcttcaatctggaaaaaaaacatttttattttattatgtattatatgattttaattttggttttgctccacagattttttggaaaattcaaggaatggtaatcctgagatgcatttaccaatggatgcattaaaccatgctaaaactgttgatgaagaaattgtccctccatatgaagattatacaaatggtttatactatggtcagcattctatgcactccgacaatacacaagttagagtagataacaactttgagggcttggagccacacactaatacttgtatggcggttccctgctttgtaatatacacatacgtgtgtgctttcttagcgttgtaatataaagaaggcactaattatttgatatctcctgcagattcgggatgtgatatgttcgcagagcaatctggtttaagtgaagttaaatgtgagggcacaggtcccatgcttggtaattctgagcaggagggtaaccatttcacgtcagtgcctatgtttgaccatagtgctgttatacctgatattccttacaccgagttgaacatcggtgatgtgcctggaagcatgcagaatggaaatggcagttgcctaactgtacaaggagaatatctgcagggggagtatcaggagtatcctcagccagattatggatcgtttgatatggctaatgaaatagtgctgcatgatttgccacaaaacaatcagtcatatgagctggaacaattaccacagaatatatgtgaaagcagttcaatgcaagtgggctctccagatcaatattgtgatgatacatctctgtcggattattacatggatgatgtatcttcgatagagtcgatgtccagcgagcagaaccgatcagaagatatctgtttccggagtgagtctagcactgactcttctccggtgccctcaagcagaaactccaccactgaggatgctgataaatactttggagatgcaccaaaacatttgcagaattccatgtttcctgtcagtacccaacaccaacactcattcatgaactcaagtgatccaatgcatccaacttttcataaaaagtatgacattcctagaaatggcagctcttctattctgggtaactcatcaaggaattgcttcagtttagatagcaatcgtgattctgatttatgtattcttgagggtagtagaagtcttgctagtggacatgtgttgccaccccaaggattgcagcataactttcaacaatctgtgtgtgccaatcctaatcttcctcggtttggagggagatacaggccgcatgaggaaagaatgactttgcggcttgcattacaggtaatttaccctttttactcttggcggcacttgctcattgaagtaccataaacaaacaaggtggttttttttaaaccttttttagtccctttttttgcctaacccaaaggaacaggcaactaaactgcttgaggtttgatttgttatcatgtttctggtcactaaaacagaggagaatgtatgattttcttatgaagatatttgccttatatattttctgtagttgtcttgcaaacagaagaccattttgtgttaactagcaaaatgtccatgcttttctatgggtaaaattcccattctttgcttttccaatgcttattacaatatatgttattcacttaaatcaaacaaatattaaattattgcatatatcagaaaatatcagggaataatttgtaaaacatgcaaaattagtagtggtgggctgcggcagaaccacctccaccactagagtatagataactgctggtgcttatgttttcaaccttttctgcactgtgatgctgttaaacattgatttttgaccttttgtctgcattggatataactggtgactttgtgaatgttatttcatgtgatatatatgtggcatttagttccctttttttgttagccttgtgttatgctgtatgtgttgatacttttttagccattacttgatgcacctcttgcatccagtttgcttgtaagtttttcttcaatgtacttaaccaattggatgatgggcaggatatttctcagccaaagtctgaggctaatccacctgatggagttttagcagttcctttattgaggcaccaggtacactttgaaaccaaagctgttactccctaagaaatagtacttcagccaacttctgatttcgatatatctttttgtcagaaaattgccttgtcatggatggtacaaaaggagagaaatggttcgagttgctctggcggaattcttgcagatgatcaggtatgctagtttacctcactccacagtccacacccaagcccacatgcaggattgagccaaaagggcaactgtcctaatttatgatctgatatttttcagggcctgggtaaaacagtgtcgactatatcactgattttgacagaaaggtcaccagttccatcttcagctgttaagcaagaaccatgcgaagctgtaacccttgacgatgacgatgaggatgacgatgctgagcctcatttgaagaaaccggcactagcacatctagcagatacatgtaaacctgaagcgacaagtagtaccattaagacagaaaatcctattgcaaatgttaaggctagaccagctgctgggactttggttgtttgccccacgagtgttctacgtcagtgggcagatgaactgaggaataaagtcaccagtaaagctaacttgacctttttagtatatcatggtagcaaccgcacaaaggatcctaatgatcttactaaatacgatgtcgtgttaaccacatattctatagtaagcatggaagtaccaaaacaatcaagtcctgatagtgatgatgaagagaaagggaagcctgacaggtatggtgctcctgttggctcctcaggcagcaaaaaacggaagacttcctcttctaagaagaacaaaagtggaagcacaccagagagtaaattgcctgagaaacctctcgcaaaagttgcatggtttagagttatccttgatgaagcacaaagtattaaaaattatcgaacccaggttgctagggcatgctggggtctgcgagccaaaagaagatggtgcttgtcagggacacctatacagaatgctgttgaggatctctatagctatttcagatttctcagatatgatccatatgctgaatacaaaaaattttgcttcatgataaaaacaccaatcagcaggaacccaattactgggtacaagaagcttcaggttgttctgaagacagtaatgctgaggaggacaaaaggtcagtaattgattatattttcttgttgtccatctcctgcatgtacatatctatgaactcaagtaattgttgagttctgattgtgcttaaactacaagacctgatagattcttttttttttttgcttggctagaatttccagaaataatttttgtttcaccaatttggagttacttcgttcttttgttaagttaaatgtataaatgtatctatgcccaaatagcatgccagagagtttgctaatgtcttacgtagcctgttgaaaagtgccttcttatggctgtctttagatcaagttcagccaaaaaaagaagaaatttctagcttatccaagactaaggtatagaactttgagttgtatttgattattggtgtcctctaaactttcatatgttctagcggtctcagtgctaacttctggtagtcctattaatataaatttcacatacaatgcttaatatacataagcacagcttgatgttaatcaggactgaactggcaagtacagccactttaaaaatatctatctttgcttgctctaatgatagccttggttgataatatggaggtataattgtgattcaacagtttggcacccttcaactcccaacacaccgacgtgtacaggggtacttttaaatgatattcattgacggaacatagtttatttagtctccttccttttctccacctactgtgcttaactgcccctctgttaatacacaataattggtgccaaaatatttatctgcttgtcatgtagactgtagaggggtacttttaaatgatattcattgatggaacatagtttatttagtctccttccttttctccacctactgtgcttaactgcccctctgttaatacacaataattggtgccaaaatatttatctgctcatcgtattatgttgttattatctcttatgacctgttgtattgcagcaacgatgcttgatggaaaaccaataatctcattacccccaaagaccgtctctcttaagacagtggacttcactagtgaagagcgtgctttctataacactctcgaagcagaatcacgagagcagttcaaggtgtgtttagaatgttaattaatagtctcctttatgagaccttctatttcttttttaaatatgctgctgcctttttcatttgtcaatggtttattaaatatttttacttgacaactaccttagctaataattaggagcacattgtgtaagaagtagagtgtttactttcaccatattatgcaacctacggactacagatacagaaccctacataccttgtataagaagtagagtgttactttgaattaatgaatcatcctactaaaagaaagctcttctaagttctaacatacatggtatttagacattgaacttattccattcatgattaaaccaaacctaataatgctaatatttaaatcacttgatattaagtgcttgcttatgcttttcattaatgaacttttaggaggctaactatgcttccttgtgcaaataaacaatctaattgcaggagtatgcagctgctggtactgtcaagcaaaactacgtcaatatcctgctgatgcttttacggctcagacaggcatgtgatcaccctcacttagttcgaggtcatgagtctacttctagttggatgtcttcattggagatggcaaagaagctgcctgtagaaaggcagcaatcgttgctggtttgcttgcaatcgtgttctgcgatatgtgctctctgcaatgtaagtgataaaagtgaatgtgctgcctttttaaaccacacctaatatgatatcgtttctaccttcattctttgctctaacccatgttttgtgttattgttgcactgtactttgatattatctatccagctgtggtgtggattgtggattgattattttcaaagttggaatgcattttttgagttttctcagtagcacatagactgccttaggttactatcagaacatgagattcttataataggatttataagtgcattgctggggattgatcgtgagcttcctttcctggatgcttatacaatttctaaatccatagctaagtaccaaattatatcttgtggttagcatacaacatgatattatgtttgcatggctatcagcggcttgattttagtgaagaaataattctttgttgttcatgcataccattttcctagcatccacttctgattcattgatccgtacaccataaattgtgcaggatgcgccagaagatgccgttgttactatatgtggtcatgttttctgcaaccagtgcatactggagcaacttaccggtgatgacagtgtatgtccagtgtccaattgccgagtccgactaaattcaacttccttattctcccgaggcacccttgaatgtgctctgagtagatcaacctgtgagtttctgtctgatgattcctgtgaagacatggtgcaagggaagcaacctagatttgattcgtcttatgcatcttccaaagtgagagctgccctggatattcttctctcgttgcctaaactggatttaacccatatgagtgatgacaaaaataaaattgtgcatcctgacaaaattaacgggaatagtactccctctgaatatgctggcaccaaaataactgagaaggccatcgttttctctcaatggactagaatgctggatttggtagaggttcatttgaaatcttctcatctatcttatcggaggcttgatggaacaatgtccgtcgcagctcgggatagagctgtaaaagacttcaacacaaatccagaggtttgtattcaatgaaatattggcatatgtaactgttgaagggaagttctttattgacttgctctgttgacaggtttctgttatgattatgtctctcaaagctgcaagtcttggtctgaatatggtggcggcctgtcatgtacttttgcttgatctttggtggaatcctactacagaagaccaagctgttgacagagcgcatcgtattggccaaactcgacctgtcacagtgtcacggttaaccataaaagataccgttgaagatcgtattttggctctccaggtaaacctaaaactgtaagcttttcttttgattgcaaatcattcttgtagcctggaagataatatccatactgcggaaactgtcattaccatgttgatatcgaactagaggctggttttccttcgtcgaatgttgggaaaactatgtgaatgttgaagcaagtttgttttttttccttggccttcattagacagtaacattttcatcctgtctacctgttcttttttcttcaagtaatatcctatcgacaatggcttatggcatgtggaacagtatatatcccatctttgtattcaccttaatccacttggaccacccatgatacatctagaattgctacaaactctcatccagcactgcttgagttaactaacatgttattgttgacgtgagtcctgagatcgcacccttgtgtgaaatccaattttagagctaatcttagacccttccaactacacttttcttcagtatttactcttttctatcgtctcatgttgccctactaatctgttgtgtctgtctcaggagaaaaaacgggagatggtggcttctgcatttggggaagacaaatctggtgcccatcaaactagattgacggtggaagacttgaactatttgtttatggtttagcatttctcctgagattggacacaattttgctcgtgggatggtgtaacttgcatctataggtgaaatatctgtcaggagatagcatttctctaggcgtctagtgtttctagtttgtacaggtgctcagattttgtagttaaaggtggcattgtggtgcgattcattttttctccgtgcaagtggcaactcatcaggtaatttttcgatgagctgcagtggtgtcttttgatcatgaagatacaaaggagaacgtcattagctaacgccatatttgtacatagttttcaccagcaatcttaactcat

SEQ ID NO: 6582 - DNA, 1651 bp, Oryza sativa
tgctcgtgtgtttgtacagagtgtatagttgttagaactcaaaaggaaagacaattatacaagtttgtgcattactctctagtagtctgtacagttgttatatttcattcggaagtacgtgcattggtgaatcataccataagaatagcaatcgtgtatactccggccattaaaatgccgtcaaaattcagttcatgcatatacacaagctatatatcaccgcgagaaagaataatactataagagagtgtaactaattctagctgtcagtccattgtgatccggcctggccctcccttcagtgagcggtacaaaggtctggatcgcttgaagccgaatatgtcagtgattcggtaagttttgggtgtatcagcttcagcaatggccttcttgaactctgccaaatgttcgccgccgaagacttgcacgcttacagttttcctttgaggggcaccaagtcttatatgctgatcaaaaaattcgatgaattcttctttcttcagctctcttagaagagctacctgcagaacagttaaatgcacaactctatcatatgcttcctgtaaataaattttaccaagtttaatctgttcttgattttttttttgttaaccaataacttgttttcattaattcgatacattttttccaacaattaactgtttgctgaaaacagagcactaacctcagactcgaccctgtcaaacttgagagttcctgcctcaatctctccccaatagaagtgggattcctcccacaaatttttgaatttctccagtttcgaatcgacaagtgattttacattcctctacaaaaagaatgccatatgtcaataccccagccgcattgatgtgtaaagaaccacctagtagtaatgtgctccaactgagtacatctagtgatcaaaatactatagagcatactatatcactgctcttttatcgattacaacccctccagatattgtatacaattgtgcatgtggaagtttaccgcacagaaatgaatgtttaaaagaacatgtgagcacttaaggaagataaaagaaaggaagtttcatgaaagtttggaaatcttgaaaactcgattcaacgaggctacaaaccttaaaatccttgtctgacaattcatgaattttgctttcaaacatcttgaagaattcatcaatcctagcatcaagatgtgaaggatcctaggcattcaacataagatcagttagagaaagcagtaaacaacaatcatactactatcaattactctagccttgaacctgtacctttactgtggactgaataacaacctcgagtgcccagactccacaatcagatctgatgaacgaggatattcattgtaagctaggatttaaatggtcaacctcataggaaatatttatgtatctcctaatatggcaaagtaagaagcaacaagtctaaggcaaacctctgccgctcaccttaaagaaagacctgctatatagccaagctgctcaacagttcgcagctggttgaaggcaggctggctcgcaattaaagcaaacagttgaagtttgatatttgaaagggcatcgtccagatgaacctgaatataaacatgcttagcatcctcacatgcttttttctacataacatcaacattttttacttttcaaact

SEQ ID NO: 6583 - DNA, 17676 bp, Oryza sativa
tctataggtgtgcagtttgtaacagcgtgtagtgaggcgtgtttcatctacagggtactagtatctactggtgctgcttgatttttgtcaggcgtgtgcttacgtagctcagcaattttggaccgtgatgggggttgccggcatcggtcttcgcatgagcacaatgaccccgaaggcccgaagcagaacatgtccgacttggtggacacatgcccgcacctactgcacgaacaacagcggatccagaaaaaaatagcagtatgatctgagcaaactatataaagttatagtccaccaacccatctacgtatggtaaaaaaatttagtggggtcttcgtggaggttctcatagtcttcacacctgtagtgaggctcgagacaccactgcccccatgctggatccgcccctgtgcacgaatcacaccatgaaaattacttagagcggatacaataaactgattcagcatgcatgctccaaaatacgacatatcatcttattcttatatggatgggaaaaaattgagaagggagagaaaagtgggcgactaatctggcgccggtgctagcacggcctcacacgctcatgcagccgtgaagacgattaagagcaagtttaatagtaggctgtaaaccgactataaatttatatggaagaaagataatttaaaaaataaagagggttgactcttatacaagagctagccattcacatacttcaagataaatacattaaatgcaaaggtgagagatagagagaggaggagaaaaatagagataaccttatggctgatctactatatatgttaacctaatataagctataagctcatacttggctctattattaaacttgctctaacagcatttacaatgctccacgctatacagtggccaacaattttcttttttaattatttttacatatattaacactaaacatatccaacgtgtctcgagctctcaagctactactgtactcttggacttcgatggggagagccatggctgcggtggagctcggggcttgtcacaaagacaatggtagagttgaaggtcggtggagaatctagtacatggaggttaggtggggtgcctacctcgtgaatgtgggggtggataattaagctcatgagacgacaacgaacaatgaatgagctcggggatataaagctcgatgtaggagatgcttgagcttgcgagctcacctctgcgagcttgtggaggaggaggtgatggagttcgaggatgtagagagttcatatggagcttaacgatagaagctcaacaagaagacatagtggatctggagcttatctgcaatgataagacaatgattagaaccatgaaactcgacgaaggagcttaacacgttattagaactcaatctcacctatgcggagtctatgaagcatgaggcactggagtttaaagaactgcccttaccgtcggctgatatagtcaataagtaagttagctggtaaatggggagtatataagatagtcctgatttgtcggcttgtcattttcttaaaaaactttgctagactgtaagattagtttcacgtaagtggaaatcattccgatttagatgaagggatataaattaaaagtttttgggttggatagtcttctataaagtaaaaaaaggtggagtatgttttaaacaaataaaattcatgagattattaaatggacttatttctttggtcgtagtattattttctgttggcccgtcttaagttgttagaaagagagaataggatagtggcaagaggtgtgtggtttttttttcttaaactccaaatctcttttttttttcaagtcgtcgaaagaaaagtcgttaataacctgaagagactctcccaagacagaaggagagaaaaataatgcactcgtgtaacttaaatagtgtagtttagcaaattcgttaaaatccccttttgggaatcttcggcctccccagcggcaggcaggcagcgcggcggcacgggagcctctctcccctcctcctcctgctgcccgcgtcccccctttacctcgcatccgccgcggatctccgcctctcccgccatgatggacctggatccccgcctctacgagaacgtcgtaagctctcattctacctacgcaccctgcgcccttcctccccacctcatctttgattacctctcgcaactcgattgctttaagtattccttgttggttagtaggtaggttttctaggaacccatctctgctgttgctggaggaggggggcaaagtaggtgctttagcgaatcttgtttgcttcgagcgctgccattatgtgcccctgcttgatcttttctccgtctgggtgcgaattcggctttcttgtgtaggttggatccgtttagtggggaggatgcgatggttagtttggttgtttgggggtgctcatgctagggcttttggtgaagaaagatcgggaatttgttgataaggtgcttgcagtgcaaaaaaatcggtacttccacgatgaggtaggttgaagtggtcaaatcaggaactttcttcattatgtgtggcttctagtgcagaaaaagataggattttactgaaatcgggcggaattaattggcatgagcgctggaatccagcagaatgaattggcattctactggttatgacttaggcggcatgccatgccatgccagcaaccacagcttaacgtatcattctcttcggcaatactccagggggaaatccttgttgaacaggttgtgctgagtgtaaagtttgaaccaacagtgcacatgtttctctgtcatgtatttgttgaataagaccttgggatactggagcattttagacagtagtgcccatttggtaaaatctaggtaaaaggggtatgcctgatatttttccacaaattgatgtgacaccaaagctagcgaaaacgtggtgttgaagtcttttctgttgttgccctaaaatcagatgctggtctgtgctatctgctcatagatacttctgcatttatcatcgctcgattagcatcaaatcattattgacaatgctagttgcatgaatatgccatatttttttgtttgcatagatcataaatgtagctgtgttcattaagcaagtatataataatatcactgctgatattttccataaacagaacctacttataactgtcatttgtcgaggcttgaaagttttcttgttctaaatttcggctaacactggatgtctatgtttaccttcgtatttattgaaggtatatactgctattgacactaaattttcattttttccagtccgtgagtgataacgatgtccgcaacatagtgttgtcttatcttatgcacaactgttttaaggagactgctgagacattcttatccagcactggtttggaactgcctgttgattacactgtagatgtagataagcgtaaaggtatttattcacatatcaacactgaatcttgtatctttctttggatgttcaacacttgtaaaattgctgcataagcactttatattgttatgttagttcatttgtatctttttatgaatgctcatgtttttgtttgtctacacaatccttagcagcttccctttcaagtttcatgctaataaaagatgtgctctcagctcacttgttttagggacaaaaaggctgtgctaacgacaccgttcattagctgaaataatctttgtaaaatcaacccatcaatggaattgcagcataatttagctagtgggacatggagtcatttcagttcagtatagatgcagtttttgtttacttgtttgttgtcaatcattactgaacttgttggatgtgatctctgttgcacataattgcaaatgcaagttttattgaacacttactacataagttacacatgttatgaagtaatagaattgtgtatagctatattattctttagtaccttttccgtacaaagtgtaagataggtttttttctaatagcatgccattaatatagggtttatttcatggtatgactctttactgtgctgttacctctatactcctcatacaaggatacctaactttcttgtgcaacatggatttaggattaaatatagcccttagaaataataaattaataattatggggtttctggaaatttccgatgctctgttatcttggatggaatttgtaacttcatttgaaatagttggtggttaaagcagataatatggattgtatctaatctatcatgaacatgtacactgtgccagtattaaaaaatgcatctgcattccatttgtctagtcgcatgcacttgcatctaacgcttttgttttggtttctttcagcgatttttagttttgtgttggaaggcaatgccctgaaggctatagacctgacagaagagttggcacctaacttgctagagaatgatatggatttgcattttgatcttttaagtcttcacttcattgagttagttcgttctagaaaatggtaagtagctttatttttggaaaaaaaataactgtgccatgtattttggattaatctggatgttttgactgacagcacagaagctcttgagtttggtcagaaaaagttgacgccatttgggaaagtgcccaagtacgttgagaaactagaggtaacttttcctaaacctacatatgcttatattagacagttttcaggtcatgcaaattctgtcttcttgtcaggccatcaatttagagaactggcaatgatgttaaagaacttcactaccatttgttacccatacaaaagaggcaaaacaaaaatattggtcttgaaaaaactttcagtatggtgaatctagtttatcactatgcatgagatatagatttctattcaagtacttagctacttgcaaaacagtattggtacctggcacaccttcatttgccctatgttgccgccttgtagatctgatttgtcatcaaagttatgtcagcctgttttctgggctatcatgtattttgttatctttattaaatacatcagatttaaatggcagcgcggtttttgtattgcatttgtttagtaattgctggtgctatactgtcctatccaagtaccgatgctaggtagtccatcattatcaacgccggccattgggtattatatttattaaatgcaaaatatggtgaaaacgtttgaagtagaggtgccgcttaacaaaataaatatggaacatatggtgacatactttttgtgtattgaacttatgattggctgctttgtaatgctatgcttggaatactatgaaaaggtaacttttgttttatatgtataggactttatggccctcctagcttatgaagagcctgagaagtcacctatgtttcatctactaagcccagagtacaggcagaatgttgcagatagcttgaatcgggctgttcttggtatgttctaagatattgttcttggtatgttctaagatactatttgctgtggtctcatccgctgatgacacgattgtgatctttgtctcatgatcaatgacagcacatgctaatcgaccagcatattcatcattggagagagtgatacagcaagcaactgtggttagacaatacctacagcaggaagttggcaaggtaacatctctatctttttcttcatctcacgatcaatcatgattctgtacggctgcatcgtatcttgttgaacatctttttttttgttcttatctatcttaattatggctatttcttttattgaggtgcatgtttttccataatcataagttactacagtccacttaaacttctatttaactattggtgtgctttaacatcatgatgcatacatgacatttcaactcttggagcaggattcttacccgccattttctttgaaggcctttctgaacaagtaaggtgcaaccaatcaatcgttagaaagacacctccagggctccagtcctatggccaccagagttcccttcagaatgtgtaaaacagttgcgtgaaagcaagcgacgggatgctcatgcacatattattcagagaaccgccttctggattaaacgatatcatcagtggtgtaccaacaatatcatctgcatcgaaagaggaatgttgtataactgttgtttcctcatttacagttccccatttcccctttacccgttgacgccatcgaaagttgtacatatcagaaccttgagctattctgtatgttcgtgcagagatatcgtcagtttgaaccaatctgcagtgcacttattactatgcctgatgcttggtctctacaaactattggtgtgttttatggcgtccatttcaccatatcgactgttccattcaaccaaagataaaaggaaagcagagcaagtgacaagaccatgggaggagaattctcaaaaatttcttagaatgtgcacttgatgctatgcctgatgcctgatgctggtttctacaaaatattgatgtttttcatgccgtccatttcacgacatcaactgatcgattcaacccaaaagatgaaggaaagcagacaagaaagtgacaatacaatgggaagagaattctcgaaatcctcatataatcagaaaaggaaaacacgggtgccaactttagttttccatcgtgaacgccgggaatcacgaaagatgagagcgagcggagggcaacaaaaaaaaaaaaaagcttctttccgtcccgtgaatcaaaccgggcaaatcgtagaagacctatacgcaaattgcagaagacctataggtaagcgaatccagttcttccccagtagtagctttcaagtttcttgagccgtttacgctgcagtggctgccagctgctctgtgaattttgacgatgcttgctcttttttttttctggccctcgttttaccggttccactataaataggcaggtgagtgcttcttgtcgtaatagtaagctcatcacttggcaccagctgtgaaaaaagcttaattagtcaattctctccgtcagttgattttgtttggccaacggaacatggtaatttctccctgtttgttcattaacttgtgtgtatttatctgcatgtatgaatgattgcgtgcgtgctggcaaaaagaaggaatggaaataaaaaagatggttctttgatgtagagttctctgggaaacgaacatttatatgggagtatgtttagtgtcttcatgaaacttgttcgtagtttgtcctgctagtttattatatctttgaagtaaactttcagtttccaggttacactttcagaatttcagtagcttgcttggttataagatcaaaatgacatactgacatcaaatatctatcctgcaaaaggtagaaactgaaccaagcttagcttttgttggtcggtagaattttgttaggaccaagaggcttaactcatagatatgcaaggataacagaaatcctgttagtcaagaagagtaatactaccaattatattgatttaagtgctaatagatggtggattacttcatgatgtatcatgaacctaacacaaatataatgatctgttcatgtccaatagagctttaaaggattcaacgggaagaacccgatactcgttgggccgtggggagggttgggaggaaccctttgggacgacggcgtgcactccacggtgaggcaggtcgtgattactcatggtgcagccattgattccatcaagatcgagtatgacctgaaaggaaagtcagtctggtcagagaagcatggaggtgatggaggcaccaaaactgatcaggtttgtctgaattttgtccccaagtccctgacctgagaatttaagtactcagatgtgccaatgtcatcacaattttattccatctgcacaagtatgctacttaaaacttaaaagtaacattcttgaacggacatgtcatagttgtgctaatttgctaaatagattaagctagaaattcattgctgcaactgttttctgcaaacagaagacatgaacgtcttgctactttttctgaagaaatcacatactctgacaagaacgttaggctgcaggcgtttgagtttcagactgaggaagtggtgctgtttctaacaggtgaaactcgactaccctcaagaaatcctcacctctgtcagtggctactacggatcattgggaggctgcatcgtcgtaagatcactaacattcaggagcaacctctccaagtacgggcctttcggctccgaggaagggacgcccttctcgctcccagtggcggtcaccggtaaggtcatcggcttccatggcaaatccgggtggtttctcgactcaatcggctgccatttcaagaaggagaagaacgccactccgtcgtccaatgctccttcagctctcaggagcatcacgagacctcatgacaagaatggcaacaggtacgcagatagcaatgctgggtatgacatggttcttgccgtcagagacagaggtgacagctacagtgtcctgactagcaacaatcccaaggaacagtatcctaaccaatcacaggatgctactctctggaacaaggtaggataaattcagaaactctacagtgattacttggttcagagtcctttacatatattgtagctgaaaggggatttattagtacgtggaattttgctgtaatgtacagatggtgtcactgcctagtttctactcggataatgggaccatgacaataagcactccggtgagatttggtccctggggtggaaatggcggcaccatattcgacgacggtatatacactggtgttcgacagatcaatttaaagcgaggattgggtatatcgacgatgaaggtcctctatgatcgaaatgggcaggctatatggggtgataagcgtggatccagtggggcagcaagggctgagaaggtgatgcaatttctgaatttcagcttctgaaaaattactctgaaactgcacttcagcttctgaattttcagtttcaaacttgtgatgtactgctactagtactagtcctgatggtatggagattttgtttgacaggtagtattcgattttccatcagagatcttaactcacataactggttacttcagttcgacgatgatcatgggatcaacggtgatcaagtctctgacattccacacgacgaagaagagccatggtcctttcggggatgagactggcacgttcttctccagctgcctgaccgaaggtaggatagtaggattccatggcagggatgggtggtacatcgacagcattggagtccatgtccttgaaggcaaggtgttgtcacagagagctgacagagcattgaccgaaacgagcccgtctcggcacgccgatatgcttgcagtagcacagagggaaataggagatgaggtaagtgtaccatgtcccaaatgctaaattgcaagaagtattagtagattttcagaacatctttttctgtgttgctgatagtgaaactattatgaccaatgaaaaaaagtgttttctttttttttgtgagtgtgtaggttacatatggtgtggtgaaagaaccaataccagtagggccagggccttggggtggcgagggaggcaagccatgggacgatggtgtctacacaggagtgaagcaaatctacatcatgagagccgatttcatcggttctgtgcagattgagtacgacaggagtggccaatccatctggtccacaaggcacggcaacggtggccagataacacacagagtgagtttgattactcaacttgctcacctattttcagtaacaaaattcaagctgtttcataatgatccgagacaatgtggcaaagcagatgaaattgtctgcactgcaagcatcaaccagtctcatgtaaccaaagcttaaagacttcagatgagatttgtatgatgctaattaatcaactgttcaccaaaatgccggtgcagatcaagctggactacccacacgaggtcctgaactgcatatacggctactacaacacctgccaggatgaagggcccagagtgctgaggtcgatcactctcgtcagcaaccgggggaagtacgggccgttcggcgaggaggtcgggacctacttcagctcggcgacgacggaagggaaggtggtcgggttccatggccggagcggcctgtacctggacgccattggcgtgcacatgcagcactggctgggtgacaggaacagaactgcagctcccagctctaataagtactacatctccaagtacctgttttgattgagctctgcagaattgtgttcttaactttgtgtttgaagcatatgcttttgatgtgaagtccaaagtccaaacactttcagatttgaagagtggcgtgtgatttattgtgtgaacttaaaattattatccgtgtgcatttcctagattcagaggcctggaatgatttgatcatcttccatatgaaacaaaaaacatcagaatgtatgtgatttatttgtccggtttggagatttgattctctccagcaatggagttgtttttttttctttcagagaagtgataggcctaccgatcagactaaactttctgtcgtgtcaaagatcaccaaaagaggtagtgatctgatcacgatttcgttgtcatgtttcgggttcagtcgtcttacgtttgcccagctggtttccgaggtggagtcgctatgggatgaggacatcctggcgttattctttctttcactggtgacatcaaaggcggcaatgcatgcatgaagcatgacgtttgatgtgctttcaggattaaaattgctgcatttgtgcttgctgctggtaaacactaaacatgccatgttcttgagcccaacctggtggagagagcaatgcagagggagtagagtatcaatgctaatttggactctagctgtgtgacacaggtttgcagagagattcagagaaccggatgatggtgaagtgggtgaggaacagggcaagtggcatgttcactagtagcaaccaaaggacaattcgagcctagtggacactctatactagtagtactgccacgcaaattgctggactgaaattctgtcaagtctgaaaggattggatgaaccttgccaaaatatggtagtacacagcaggatttacttatattccaccatagatcagacactacgcacgaacgatcgtgtgtgtgccggtgtgtttaactaatgaaatgacggtgatttagccggtgccatgatttgtcctgatgaaaaacctcgctggctagctcagctagctgcgacgaacatccatggagagagataagattctgtgattctgtccgtccaaatcgccgccctcttttttttctggccaaagtaggaagaattcagagcagcaaaaggaattgcagtttcgcagggccacacgaacctgtcggatgcattcgctctggacagttttgaactcccctctggacgtggtcatcttaggagaggaagcaaaggaatcgtagggctgagaaaagaacccgtccatgttcatcctccaggcaatgcatgctttcccgccgtcataaacaatgtgctgtaattttcagagtcctcagggtttcagatccttattatttgtccacgagacttagagaaatgatacagtggcgcatttgataattggtaatattatgtgatagggaggctcacggtcatggagaatctcaccgacccggatggatcgatggatggatggatgcagcggtggaaggcaaagtcaatcccctagctgggagtttggtcggcaaatctgaagaccggtgatggagtagagtagccatccagccactagtggcgcatttcgtctagaactagtagtattacgccaagttttctttttttgagaacttattacgccaagttggaatagaattacagggatttcttcctctacctcgcctatcttacaacaggtacaatagcagactataaaccagctataaacacatttcgagaagattagagaggatagaaaagagcagcaggatatagatttgtagatagctgcaacacaaactccaacatgcatttgtatattacaggtgggacaaaatattaattgtgtagtattccctccgtcctataaaaaacagagtctagaatcggatataacatgttactacgaatctagacatatgtatgtctagatttgtagtattatgatatgtaacatccggtattatattggttttttataggacggagggagtatatgtttatagatagctattgaatgaattaactactaaattgactatatgactatagatgatttaaggccggttcttctaattagcttggcgccaacaactatccgatcgagcactgaaatttcgcatgtcgcgtcgggcgggggggagctgccactgccaccttaaagcgagccgcttctggaacgagatctccgctgttgcgaaaatcttccttgggactcgcgaaagacggggctcgaatgactcgtggccactggattttaaactacgcgcgagcctacttgcctattgccgggaaggccacacttttgggccttttttctcatgctgcgtccatgacaatagcatggcatgttggggggatttgttcattctctctcccggttcaggatgagcccccggtatcgatcggataatttttttagcatgtgttttttaaccatccaagcagaaactccaagttgttgctacttttgaaataaaaaacaattgagaaaacctcaaagaaaaaagagcaaagtggtagctacactaaattgcaagtttgtccagcggatataatatatttaacagccactactcctctcggtgaccttatttccacctgaattatatgcgatggaatcatggaataataactttgtaagcagtagtagcagtcaggtatccctaaattgcaaaattgtccagcggataatatattcaacagccactacttctctcggtgacctgattttcacatgtattatatgcattacttttacatggaataataactttgtgaagagtagtacttgtcaattaatgcctccatctctcaacagataacaccattgacttttggcacaacgtttgatcactcgttttattcaaaaaaatgtaaatactaaaaaagtacaagtaatgtttaatttttttaataaaaaacaagtcacaacaaaataaataatacatgtattttaatttttgatatgatgaataaccaaacgtcataccaaaaatcaatgaaacaaaggaatataactatatactacgtatcttaaatgcttccagcatgatgtacagttctctatctcctggtgatcttgttgaaagcaaagctcctcaatgcacacatgcagcacagcactagccaaattcccagacacccacatccctgtgcagggctttccacgcacgcaccggcaagatggatagagatatatcctgcagctcgatcgatccctatctgaaactgtactgcctgtgatacgatcttactccaactctctgacggataaggcttcatcttgagcctctcgcagcttagctatatctctctgctgccgctagctgatatggctctctcgtatccagtcccgatctcgatctctctccaactgggtcggccatccatcgatcgactcatcaattcatgcctctcgatcgcgagcatatatggtcatcatcgatcgatcagttcatttcagttgctggatggaccaaatcctgtgccttttgagatcgatcgatcaaaaagagaaaggatcaaagctatagggaccaacaaccaacggccggtcgccggctggctcgcacatgcgcatgtcgtagtagtacatatgcgttggctgacacacatgatacacgtactacacgcatcgactggtgatatatcgatccatctccatctcatctgcatggcaatggccatatgctgcagggagagaccacaccacccactgtctctctatccactacatcttctgtaatctctcctatacctcgcaagtatatacgtgcgagtgcatgcagatcgagctgatcagatgagatcgatcgatcgatctttgcaaaggcaaaggagagagaggaggcaaacaggatggagaaggcactagctagctgtagctttgttgctcaacgtgcaatgctgggtgtagatgatggagtagggggggagctagggccagatcttggagggagaagcccttttggggatttggttctttgcacaaatgcacaatgcttgccgccgctagtggcctgcatggatggatagatggccctggggtgccaccatgcatgcatcaccggacagatggatagatcgcaacagatcacggatacatatcgatcggtacaatgcaatgcatccactgtcagcagctacaatgctagtagcctagtaccatatcgatctttttggttctcgggtaatagctcagtacgacgtactaacgtgccaaacgaaagcatgcatgcagtacttctagctgtggtacaaatcgacaagtaccacgtactagtgtacgcatggatgtgattaggctgcgttggaagaagtgttgtggcggagcaactgctatacgtacgattttttttagatgtttatacgatgaaacgtttctctcctagcccataagtgctcttgactgccacgtgcgtatgcgccgtgtgctcgtgcccgttatcgtactaagatcgtaagaaaaaaatcgtacgtacatcaatttcctattacaaacctgaaaatatattcatttgatttttcttttttagaaaaagaaaacttctgtatagaaaattttgcacaacacaccgtttagcaaatccaggaaacgtgctaacgaaaaacgagtaataagttgatgttttgagttgccaaaaagaattcagccttatttcgtactcctccatcattgccaacgagtaattcttaatgcatttgacgaagttaatgtctaacaattaaaattttaactactagtaacttttaaaacttacagtttaaagacaatacaatgttatgcatagattattagtcctaaaatgtattttaaaaaattaaatatttacttgttttttatatattataatagaatcatatagtaaaagataaagatatattttgaagatcgttgtcattgtttaagacgttaaaaaactgggagagctactatatatggtatatgcactagagttgtataaaaaagatccaactctaatataattctgatgtataatttgtgtgcgagagagattgagaaatgggtggtttggcagtgtgatgcatgcatggcggcagggaaggcaaacaaaggtgcctactgttggcgcctccctttcaatgtctccaggaccgttgaccgatggtcaacgagcagcagcttagactagccacgtgcagcgcgagggggcgcgacgacgacgcgtggacttttgactgatgaggccgtgagtggactcgcggcgacgacctagtctctcttgacatcgactaatccctaattaaattaagttaaaccacattcttcccatgattcattagtgtcagttagccttaagagagattctgcgtgtgtgtgtgcgtgcttttgttttaagtggggatcgtatatagtttggccgtgttctggccagataatattagtggcgcttttgaccagagatatgcacgcgtgatttctgacatgtatggagacgatctcagtcaggttaatctgaacttggattgtagctgtttgtttaatttgtagcggtccagttgattggaacgtactacttggttaagactaattaattaccatgtgttacaagcatgtgacttaatacagattaattaattaaatatataatatttggcataacaactgtcgaaaaaggcatactatttggcagaacatcatatcgatcctaaggataacgcacagatatataatattaaatactaaataaataaataaaatagacacgctagctagactagctagcttggagtaacgggggcacgaagtcatgtttagttcccacacaaaagttctacgtcatgtcgcatcgaacgtttaaacacatgtatgaagtattaaatatagactaaaaaataactaattatatagattgcaactaatttacgacacgaatcttttaaacttaattgctctatgatttgacaatgtggtgctctataaaaatttactaatgatggattaattagacttaataaatccgtctcgctgtttactaacggattctgtaattagtttttttattagtgcctaaataccctatgcgataccctatataatactcgatgtaacacgctaaaactttacacccttagatctaaacacccccgtgatgtagtagtacaatcttgttcctagttggagtggtgcacactcccttcgttttagaatgaaagatattttggttcaatcataagtaacttttttattgaaaaaaagtaagtcatacatccattttttaagtaatagatgacgtcgttgatttttatcacgcgtttaaccattcattttatttcaaaaaaatatgtaggagtaattataatttattttgttgtgagttgttttatcattcaagatactttaagcatgatttatattttatacatttgcataaacttttgaataaattgaatggtcaaatatttattaaaaaatcatcggcgttatctattaaaaatggagagagtactaactaagcaatccagtcatatatgtatctaccaataaattgatcactctaggattaacatgtttttttttatttttaatgaaaatttctagagacatttcgctaggtgagatgaagttaaaatgacttgattgaataacagcatagctagcaaaaagaatacattttgagatttaacataacaatattcctctaattaagttttttcccttgatatatttaagtctagctagatgcgagtaaagatcgttagctttgaaataagatatataacacattttgagatttaccagaagaaaatcctcttcgtaggtatagtcagttaataaccttttaacataaaaatcattcatcttattaaaaaaatatatagtgctttcatttatttttctgttatctttttactattaaaggtgatttaaccataacttatattttcagtgattaactataccacttttcatagagaatctcccttaaaatctattgaatatagatataatatgattatagtataataacattgtaattaacttatatccaatcatacaaaactcagtgttatgcaaacaaaactcagtgtgaaggcgaagtcacaggatccagcgcgcgcatgtttttttttcctcacctccgtgcacgaatcggcttaaagtacacctgacagctaaaaatttgaaagatgttttctctgattttctatcaaaatatattaagcaaatctgatacactaaatataaatatgatgaatgataaaagcgcgttgtagcatgaacgatttttaaatatgaagaatgttcaaaagtcaacagccttctatctactacatttattcctaaatatttgacgctgttgacttttttaaatatatttaatcgttcgttttatttaaaaacttttgtgaaatatgtaaaactgtatatatacataaaaatatatttaacaataaatcaaataataaaaaaattaataattatttaaattataaataagatgaacggtaaaaaatatttaaaaaagttaatagcgtcacgaaaggagt

SEQ ID NO: 6584 - DNA, 6374 bp, Oryza sativa
acaggacatatcgaactttcaaagttcgacaggttgcggctacaggtggctgtcgaactacggttgttcgacagatacctctgtcgaaccacggttgttcgacagggtgctaaacatgcgatttcgcctaaccgatctatatttttgcgatttttcattaaaatcgtattattttcaaaaaaaatttcctttaagcacaacttttcgttttttatatttgcataaatttttttaataagacaggtggtcgtaagcaaaagctcaaaatcccttatattatgggacggagggagtaattaatattcaatttcttacttatccattgaaatatactccatataacaattgaagatactgcacgaatctccgcgcaatcagccgtgcagattcccctactatcccggccagggagtacacttcggtggacatcatcatgacccgtcaccgcagaggcaagcgcgggcgcgcgagccccgaccctccggcgaagcgccgccgccgcggccgcggccacggccacggccctggcccgccggagttagaggccgacgagctggaggctcctccggcgccggtacaggctccatcggcggcggcggcggcggcttcggagccgttgctagtgatggtcgcggggctgccgcccgggtgcggcgtgatggagctcaagtcgcggctcggggcgtacggccccatcgcgcgcacccgcatagacgccgcctcggccaccgggtacgtcaccttccgctccgccgcggccgccatggccgccattgctgcctccctcgaccccgacggtggcgtcaccgtcggatccaagaaggtaaggagatctgcgtgctgcagttggatgagctcgatttcaacttgctgtgcgtgtagaggaatgcagtacagcctgtacagggtcaagctttgctgagaattgtttgaaggcgctgctagatttgagaattttatagattggcatcacatccggccttttatctcgactttaaagttctgatggatgatggattatggatcaaacagagtttatgaaaattatttgagggcacagacgagagaatttagtattagaaagttgaaaggttgactttaaaaagttctctaagaaatgccgatgaagaaagtttatgcaaaaatcataccgtttgggagtttgggaagtgcgcccgcaataatcaaaaatccgtgagaggaaaagaatgctttttttaattatttttcatctcattttatactctgcatttgctgtttcattctagcattttggatttaattaatgtgctagttattcaattaacttacacatttgctgggctctacaaaacctactcaattccgtgatgaactggctaccttaaattcagtccaaggttacagtcaaccattttatctggtacaagtctataagatagtaaattatattcaatattgatcttgtttacatccagactgtgctggtatcttcgctgtcacaatttgttcatgttaacggtcgtttaaaaccaagtagaatacagatttagtttagaaaaaataaacaataaacttattttgcactttattttagtcgaaatgcatctgcactttggttgtgcagcaggcacaaaataaacagaacaaaatttctaacagattcaggggaagctatagcatgctacacatgttttgagccatttggtactcttgctcttcgatactcagattgctggttctttcatgggttgcaggttttagttgtacaggcaagcgaggcgccgaatgacttgagaagtacagctcaagccaacccagtgggggagaatacgcatgatgcgacgaagaggaatgcaagcgaatcttcagcgttctcgagcacgaaagcggctccagaaggaacctacaaagctagagaaatagtcgcctacgatgatctgttctgaacttctaataaccagccttctttagggaggaggtgagacaaccattcaggtttgttcttgtacactgctagggtctttaggtgagtaagctatgggtattttttagtgtgtgaaggtaccttcagatgggtaggtgtttcttgtattcagcatgtattgtggaagttatcatcaaaacatgagaatttatgtatgttagattgttaatattgacagtgccttaccatcttctcaaaatttctattcaagtgcattcgactattattcgtggctactttgaaaacatttgaaaaagatttagcaaaaaaaaaaagatcaaaagtgttttgatcgattcaatatttgacaccgtttcataaaaggcagaagaaccgtctgatcaaagaggtgaaaaaaaaggaatctgggagttgtgcttcgtatcacatcagtctataccagtaaaaatagagcaaaagtaaatcgaatatatcacactggcatgtcacaaatatacaaggtattattccgggaatgttcagcgagtactttttgttaaacatgttcgattaaaacgctccaacctgtaaagctctaaaaataacgctcttagcaaacgcctaaagtagcagaattttctagtgaaattattctgaagacggaaacactataattttaaaggcacataatatgaccaccttgtatatatacggaaaattttatccagatacacgtgtaacctattatttacgcaattacactgtctgcaaaacagctctatcaggttacattctcagaactgacaaaattgttccagctgcatgatcttcagtgcttggcactcatgcagcattttgcagactcactattaacctctcttcaaggcaagtgctttatcaacattctattggtaaaccatttacctgagacttttgttaacagaaatatcaaaccatgtctgacttatcttgctggcctgcgtgttgaacatgctattcttgaagcttttttgtcttcctttttggcataccactcaccatgtctgacttatcttgctgtcaaatttcaaaaaggaaaatatgtagttaatataacaggaggaggtaataaaataagaaattttaggtcattatcgccaaaggttaaaaagatatagccaaatcaatcatgtatacaaagaggaaaaggctgtacagtgacatctgactggtttgttgatgattattcatagcattgtgtcaatatgactagttaagctgattgttcccagacgtaagcagtcttctaatgatttctgattgattgcagaagcagacagcctcataacgctatctgattaatggagtatccattggcactagtcaatttttaattcattagcgttatatactcgtgcagtgacgatagttccagcattgatcccctctcttagctggttcatacaatgttgtgacatttcttaaaccttcaggctcactctgtggtataagattggagaagaatgttttggtggtattttttggcactgacaaaacattggaagtattagatgctattttctctaaaatagaagggcagaatcattctatgataaagaacaggatagggtaccaatcttgcgccttgcaatccattatccttgcagaaacggactgccaaagattgagaaggggcagctggggggaaatcttcagctggcattgcaaatggacgaaccattttatcaaatttgtccaaggtgagatatgatccaacttcctgcaatctttctggctccataattttcatagtgtgatcatcaggtagcaatgaatcttttccatgttcgctctgtatggatacatttttcaagaactgttgagttaataaccagaaatgttgaaaacaaacatcttacatttcatttgaaggggaccaaactcacctgtaaggaacttatatctgcaccacgactatatgtcatttctatgcgaaacctttttgggtcttccaaagaaacctgcaatagttgtccaatgacaagatcaatatcacttctcaccggtagtattagtaaagtaaaagcttatgattacactataattttttaatacctctgtattctcgaacatacgcaatacaatgtaactcatgtagtcaagttcccttgttttaaacagattatctagagcatttttgcaaacaagactttcttctccatccatagattcatcaaaattgcagtatcgaagtacattcattagagaatgtatatgtgattcctgacaacaaaataatccttagtcattcttatcagggagaagaaaacaaaaacaaagaatttcagttaaaaaaaaactccaaagaaatgtcatataggaaattgtcgtttccatgatgatgtatgctttttagagccttagtttttagggttttttttttttgaaatttctgtatacttctatagttatattgatatattaccataaatcaagaaagcataaacttaacaatttgcaaggggaatatgaaaactcaatgtaatttgtcttactgatgtaaaatagagccttgttcgaacacgtcgttcaggttccatcacattggcatatctacaacaaaattatttgaatatcaattgtattcttcatagtcaagattcctaactggaatttcgtacttactttggatccaagcagtatttggtttctttgtgcgaatcatcaagatcaattgacttcttgtttgagttaggtctatcaaaaccctcattcttaacatccccatagtaacccctatccttccgttttgaagaaggcactattgttggatcatggcatgcattagattcaccaccagcagcagcaacctctcgtctggtgttatgcaggtcaatcagaatcttgcccaacaaacggcgtgcaatctgaagaaaaggacatgagaaacatcataagttgcttctgctcattctgatcaggggaagatcacaagcaaagctacagatgctgctgctggacctcctgacctgagaacatttgcttatgcaccaacaagatctaccaccagccgttttgatcagagtgaaaacacgcgcaaagctatgtgcactgcggacagccctcctgatattagcacattcgaatataaacccatgaaaagcgccgtcagacgttcagatgggagcaagttttcaggtgcagcactaaaagcagctagacgaacctctcggagctgattctcacaaaattgtggatgcacctgccagcttccttatctgagcatgtttggatttgcgtatgccttctgtctgcgttcatgatctgagttcaacagaatcatccagcaacaaatgctctcaataaaagtgcattccattttgcccaaagtgcaagcacggctgaggtagctgccattcactactactagctgcagggcttatcagttcagacttcagagctcatccgtatctgcgcaatcagaagcacacatgttctgaagggaagtgctttatcttctcggtttccagagccaattatgtggcattttgcgagccaaatgtatgtgctcgtttttgccttgtccaatgaggttcttgtatgaacagcagtcgaatttgcgatgctatttaagccgcaaatgaggatactgttgtattgttcctttttgagaagatactgctgtatgttcattcttatacaagtgtgagcattccttcagaattcagatagcattactcttgtcaactattgatcaagatgttggaaagactttgaaaccggctgtttaagcacttgccagcattctaccagtctttctgaaagattataataagagtaaattgcatattgggaacaaatttttatctagtttgcagattttcactttaaaccggcaaacttcacaatagttgcaaaatggaccggtgttcttttccaatctaaaattccagtggctagtcttaaaataacggtggccaaactctgggattacaaccgaaatgaagctaatgcaaacatggaatgaaaaaaaaaacgatactatatagttttcaaagtattccctccgtcccataatataagggattttgagtttttgtttgctttgatgactcgtcttatttaaaaatgtttggaattattatttattttttttgacttactttattattcaaagtattttaaacacgaatttttttggaaataatacgattttaatgaaaaattgtaaaaatataggtcgattaggcgaaatcgcatgtttagcaccctgtcgaacaaccgtggttcgacagccatctgtcgaactgggtagttggtctaaaaaaatataaaaaagtacggctacaggaatcagcaggaacatgtcgaactgacaaagttagatagggtcacgtgaacagtcaggaatcagcaggaacatgtcgaactgacaaagttagatagggtcacgtgaacagtgccgctacaggacatagggctgcaggaa

SEQ ID NO: 6585 - DNA, 14835 bp, Oryza sativa
cgtgggatggtgtaacttgcatctataggtgaaatatctgtcaggagatagcatttctctaggcgtctagtgtttctagtttgtacaggtgctcagattttgtagttaaaggtggcattgtggtgcgattcattttttctccgtgcaagtggcaactcatcaggtaatttttcgatgagctgcagtggtgtcttttgatcatgaagatacaaaggagaacgtcattagctaacgccatatttgtacatagttttcaccagcaatcttaactcatcttgagcttcgcatttcagccgtatggttgtacatcataaaccatgtaaaagattaagctgaacttgtcttcgacaatttttttcagttgatcaaacatgatagtttatggggaatgaaatttgctcaaaagttctaatgaatgtgtggcatagctcatcactgatgtgtgtatgtaggccaagacgtgtgcattcttttgttctttcaagtccctagtcatccttgtacagtttattttagggggaaggggggatgttggtggtgagggttgagatgaggaagtcggtgaagttatattttgagattaattttgagtatttacaggtggaactttaaagtaagtatggttcctgcgctgcataaagctcagttggcttcctacactgtttgggggcaacaaaagtgatgatttggcaaaatggctcacggacactttggctgtgtccagttccttttaaattttcaacttttccgtcacatcaaatgtttaaacatatgtatagaacattaaatgtgaatgaaaaaaaaaatcaattgcacattttgcatgtaaattgcgagatgaatcttttgagcctaattacgttatgatttgacaatgtggtgctacagtaaacatttgctaatgacagattaattaggtttaatatattcgtctcgcagtttacatgcggaatctataatttgttttgttattagtctatatttaatacttcaaatatatgtccgtatggatcaaattctttttaccaaaacaacttacggcctttgtaactgcagtccgatggaataagaaacaaccgctcgtttttgttgcgtgataaggttgtaacttgtaagggctgcagccgctgactattctcgcagcgcataattgcgtatcagagctccagatgacttagcacaagagcacaatgcatttctcgctatccccaactttgaatcaacgatttttttacttctcccatctcacaatatagcaacctaatatttaggataaaacatattgtactgtttaaatttatgtttaaatttatattattaggatacgtcccatcgctatatcgtgggatgggagtacattttgatcatgcacatgtcaaagtgtcaaaaactacaccatacaatctgccacttctgtatgccgtgaagctaagcctgaaaaatcagacacaaaaagggaaaaaaaaaagagaaaaccttttggcatagctacagttgatgaattgagccccaaaaaaatcttgctcatggatcgagaagcctatcattgatccccgatcctcctccggcattggacccagacgatccacactcactgacgcctgggccatcggtgctcgacgtgccttcgacggacaccggagcgaccaagtccggcggcgggaagtacgacggcaccggcatcttgggcggcagcgacggcagcggcgcctcgaacttgagcacgttcagcgcctgcctgatgctcggccggtgcgcgtggtcggggtgcgcgcaccacaatcctaccaccatgagccgctccatctgctcgaggtcgaacttgccattgagcctctggtccgcggcttcgaggatggctctcttgccgtagagctcccacacccacggcaccagcctcgccttgctcgggtcctcctcgtcgagctccgcggggcggcggccgcacgcgatctccagcgccacgacgccgaagctgtacacgtccgactcccggctggccctgcccgtgatgacgcactccggcgccaggtagcccagcgtgccggccagcacggtggtgtgcggtggctgccgtgctcgacgagcttggcgaggccgaagtcgccgagcttggcgctgaaggtggcgtcgagcatgacgttgctcggcttgatgtcgcggtgcaccacgcactgcgggcactcctcgtggaggtagagcagcgccgacgcgaggcccagcgcgacgttgtaccgcgtcggccaggagaggggcggcgccgcgccgccggccttcttgctgccgccgccgccgccgtagaggtggcggtcgacgctgccgttgggcatgagctcgtacaccagcaggaagtcgccgcggtgctcgtggcaccagccgacgaggcggacgaggtggcggtggcgcagctggctgatgatgcgcacctccgccgcgtactccttgcgcccctgcgtcgagcccttggacaccctcttgatcgccaccgccaaaccgagctccttcaagaagcccctgtacacggcgccgaagccgccctgcccgagcttcctctcgtcggagaaattcttggtcgccgccgcaaggtcgctgtaccggaaccgcctcggcccgctctccacgaagaactcctcgtcggcgagctcgtcgtaccccatctcctcgtcgatgtcgccatcggcgagctctccggctttcctccattgcgacacgaaccagagcacgccagcggcgacgagcacgagaagcaaaccgcagagccccaacacaacccacaggattaccgtctcctccttggtgtcgatgctggaggtgaactcccagtacagcacctggtgcagctcggcggcctcgcccgtggcggcggagaagccgacggcgacggcgtcggggaggtactccatcagatcgacggcgtaccagagcacggggtccgtcagggccgccgccgccgccgcgtcgccgtaggagagcgcgacggtgaggttcttggcctggccgtcgtacgcgacgcgcgcgtgcgccctccggccgtccttcatgctggtgggccagtcgacggtggcggcggagacaatcccgccgaggtcaacgccgacgtggtcgtcgctggggtcccactcgttcttgtaggtgtcgaattcgacggcgacgagcgggcgcgggtgcgccgccgctgcgcccccgcgtgagaaggagttgaagaggccgaggaggccgccggcggagctgttggggaggacggaggggaagggggagaggaagaaggcgaggccatcgccggaggcggcggaggggtcgggggcggcgatggagaaggagaaggcggtggagaaggaggcgcggcggcgggagacggggtcgcagagcgggacggggcgcgagaagaaggccctcccggcgctgctggtgatggggccgatgcgctcgtcgcgggtaaggcggatgaacttgttgaagaaggcgtcgccctggaacgcgatgcccgacggcgccgtgtccgccgaggtgaagttgtaggtgaaggagaaggccgcggcgggggacggcagcagcagcagcagggcgacgaggagaaggaagggggcggcggcggcggcggcggagatccccatggcggagaagctcgggttctcctgccccaggccaggcgagccttggaaaagagatacaaaagcttactacatttgggttgaccaccaacgagaaggctcgagctggccagctggtatctgcttggttgtgtcgtactgtaccgttcttctatacgtgactacgtgctgtgcatactgcccgcatttgcagctgccaagttactgtcatgtatgtgtgcgtgccttgtgttggaatgttggatgagggcaggatgcgagcagagaatcgatttcgagagcgttgtctcccaactccgcagggatgggaacactggacgcgcggggcgccgcggtggcagtagcgagagagtgggagacggcgacatgaatcatgatgcatccagcgttcacaattccaacaaaaactggtcgaattctgtgaaatttcgacgttttggcatgactcaaaattaagttctgattagaatttcgaaggttaaacagtagatttggtcgaaatttatcgaaaaccgtgatacgatatagctcgaaatttagtggtcaaccggtaatgtaaaccctggatgcatctctacgaggcgacgagccgacgacggccaaacaactaccatttggagtcttccctgaggaatacaaagaagcctactccctctgtcctggaaagccagcctttttaagattggttggacaaattaacagaaagtaaaatttactatattggccatatttaatagttgcatttgtcacattagattgtaaaaaaaaaatacaacaagtaattaagtaatcactactagtagtattgaagatctatttaatactcccaccatcccaaaataagtacagttctacacatctcatatctaacgtttaccttccgaaccattgtcacctcccctcttttatcggatgggttgaggagattcacatcaaaacaaagcttcagccacgctaggtctggtggtggattctatctgcgctccatcttcccaactgcttcccggttgcggatgaccatttcccagcctggtggctccacactagaagcctaatccctgcagcaagaagatgcttcgacacaattgttatcctagtagcctaggtgatctagaaggaacaaaacaaccgggtcatcaacaatcaaccctttccttagttgatcgtcttcgataagattgcaaaagaagctgctcttcggtgcacggtcaggagagccaacgcctagaccaacgtatagcaatggtagtcttttttcatgagatttcccctagtatttttttcctaaggctgctttgtcgccgggacgacatgtactaaaaacttctttcttaatacacaacaatgtgcaattctctagtgtattagctataaattaacgaatgattatagggatatggaccatactaccatagtgccaagatgcactagctagggtatagaagcttggaacagtagatgccaggtaagccggacgctcaaagcaatccgttagcgttcaggcacagcattctcctggacgagggtaatacaagaccagaagtggccgccgcaaagaagtctccggacgaaggatatccttgtcctgacccgccgcgcactccaattctaaccggctgcctggagtgcaccgaaaggaagctataaaaccaaatcaaaccccatccacccgcggaagcatgcgcgccaacgcactccccacgcgatcccacagccctccgcttcctctcccctttcgcctattcatcggtaaaccaacgcgccgtcgcccacagatattcccccgccctttttctctttaacctctcgcagccagccagccaccatccgaaaacaccagaacccgattccatcccggttgctgttcttataatacgtggagaagaaactagactagcttcttcgccgtgagggctttggtgccggagcatgtgccatcctgggctgccgcctctgccgccggggtgcgaggtcaagcggcggagggcgccgccggtggcgcgagtgggttccccgccgcccgtgccgcggcgggagcagcctcatcaggctcagccgcaccactactgcgtgtgctcgcccacggcgcaccgcgggtcgttccgctgtcgctggcaccgccgcggctactacgagtggggcgcctcccgccgcaggtagggcaaagcccgttcggtgggtgacgcgtgcgcgcatggtggaaactgctcgacgcatcgccggccagctgcgtacaactcatggcgtcttcttgcgcatcatgttcggttgctcatgtgtttgtacacagacacacagtgtacagttgttcgaactcggaaggaaacacaaaacaattaaataagcgtacattactctatagtttctttcatccggaagtgcgtcattagtggattataattcataccagaagaatagcaaatcgtgtataagactacaagagcgtctgagagtgtaacgaattctagctgactagctgtcagtccattgtgatccggcctggccctcccttcagtgagcggtacagaggcctggatcgcttgaagccgaatatgtcagtgattcggtaagttttgggtgcatcagcttcggcaatagccttcttgaattctgccaaatgtttgccgccgaagacttgtacgcttaatgtcttccgttgaggtgcaccaattcttatgtactgatcaaaaaattcgatgaattcttctttcttgagctctcttaggagagatacctgcaaaagaggtatatcgcacaactcttttcttttctttgagaagttatcctgtgcttaataacctgttttcattatattcgataccatcaaacaattaactatttgctgaaaacagagcacttacctcagaccttcctctatcaaactggagagttcctgcctcaatctctgcccaatagaagtcggattcctcccacaaatttttggacttctccagtttcgaatcaataagtgattttacatacctctgcaaaaagaatgtcatattaagtgattttacattgatgtgcaaagaacaaatttagataaattcaactataatgcatcatatatccctgttcttttatcgattacaacccctccaaattttgtatacaattatgcatgtggaagtttaccccaaaatgaagaagaattgaaagaacatgatgtgagcacttcaggaagagaaaagaaaggaagtgtcatgtaaatttgaaaacacgaaagcttgattcaatggaagctaagaaccttaaaatccttgtctgacaattcatggattttgttttcaaacatcttgaagaattcatcaactctagcatcaagatatgaaggatcctaggcgttcaacataagatcagttagagagaaataaacaactatcatgccaatcattctagccttgaacatgtacctttactgtggactgaataacaatctcgagtgccctgactcccctatcagatctggtaaacaaggatattcattgtaagctaggatttaaatggtcaatatctcctcaaaaggcaaagtaagaagcagcaagtctaagacaaaacatctgctacgtaccttacataaagatctgctatatagccaagctgctcaatagttcgtagctggttggcggcaggctgcctcgcaattaaagcgaacagttgaagtttgatatttgaaagagcatcatccagatgaacctgaatataaatatcaaactatgattggcatcctcacatgcttctttctacatatcatcatgttttctacttttcaaacttcaaattcgtgagacatcacactagtaaaataatagccctcatttcaagttaaaattttccgctcaaaaagatattgaaaattaggccccaaaaatgagctataaactttatacatcttaaacttgatcaaaattctcgcattgtcactcttttttcacgtcaaatgttgttgagtagctagaacatcagttggtggctcaagtatgtccccagttctccaaaaaagtcaatagaacataatcgaacatgtcactgaaggaaactatgcgttatgtcccttgtgctggttcagtcacaagcaaccatttcaataagctatagttactgacgaattccttttcattcttggctacattgttcaggaatttcacattaagaaattattttgatcatgtaattgtacttcaaattttgttgtggttgaatgagtatttcatattactttgcatgccagtacgatatgtaataataattttagcaaatagaagtaggtaaagcctcaagtccactgaattttaggaacaagatcaacaatttgtaatcagtttggtgaacattagttcagaagttagcgatcatggatcagtaatgtcttttgttaatagtagttgcatcccttgcacgaaagatgaggcctcagggacatttacctgaatatgttggactactgatgaattctcattcttctgatttaagccctcaatttggtggtagcactttaactcattttcaagggtgataacccttctaatcagatattgtgatggagacattgatttgaacacagacttaggggtattgaatatagtatcttcaatctcctggacaatagatgtagcatcatttggttcaatgttccctagaaggagaaaagttaatcgataagtacgactggaaattcatcctgttacagtccttagcaaatataaatacatgatgaatcgactaacaataacttccacctaaccttgaatatagcattccaaaaatgtcttcgatagcaaatgtggtatgaactttgcaagagaatctggttcaagcttagaaagagcttcaagtttctcaacccaaggccaattttgatcctccaatatcaaggagagatagtttgaagcttgatagtacggttggctgaacttgaaattttggtagtccttgacagcagtttcctgtgatggtaagatgaaataaatcaatgaaagaaaacgacattgtcaaaagatcctaattggtccgtggcagagcctgttatctacagaccgagaacaaagctcattacaaacaagttagaccaaacaagtacatgtgatctgactatttttgataattttctggcaggttcaaaataatacagcatgcggaactgaaaacagtaataagattactaaattaggagtatgaactgttatttgtgatatttgctttcacacgtttgaagcttacaggatatggcacaaaatccttcatgttgttgtaattaaaacattatttcccccaatcttaatgaaacaaagctttgatcgtctaacaattacaacttgatagataacaattgcctaataaaagtaaaatccagcggtcgaaaaaaaattgatgcacacaaagttcaaacaaagagaacaattaaatattgaaacctaaactccaaaataactgaatctacctaccttcaaggcacaaaatctgttcggtttaacttcaaagttagatatatgcttcataatggcatctagcagaatccgcattttgtcattgtaaccacctactgagaccttacatagaaagtaaaaaggttttagtttaattcaaactatcctaataaagcaacctaatgttgcatgaacaatgaatgtttttttttggctggaacactccttggaaactaaatgagaacaataaagtagttcactgactaaacctggaatccagcagaagtgcgatatattgaatagaataaaccagcaatttgagcatcatacgctgcaaaggcacaaacatttcgtaaatacccaaatgggttattaacatatggataaatatgctaatatttgtactatttgtgaagtggtgctaaccatatgcattcaagtaatctgccaacaaatcaacaaagagactcgtagaaatgactgcttcgggggaatggcttgttaacggacagtggaaatcaattacaatgtgaacctttggagtggagaacagcatgtcgggcatataccacaaccgtgaaagcggtgtctttctcaatattgctggaaatttaacctgcaaacatttattttgtaagagatatttactatatttaagattcagcaattcatttagaattgtgctaatgtggggaacaaacacagacgaggtgatttaaatccaaccttttcatgcgcttctttgagtgaaaaatcttttggaatgaaaatgttaggctttgggatacagagcttctcagtaggagctttttgaatccattgctgccaaagtagaacaatcactgacaatatgttctagcatattatctctatggattacaataagtagccacattctagcagtatgtaatgtggaataagataagaggaaaactctagttcaaaaaatcaagattattcaaaaaggacaaacctgtatcatggaaggagtgacattttcaacagaataagctgtacaataccatggctcaacagaatcagttgttccttcaaactttttagattcccagagtatcctgaagagggagagagagaaatattacataaaaggaaggggaaagtcacaatatttagcttcgtacggtattttaagtgctgaactggacatttgtcagcttgtcagaaaataagtgggcaagtaaatataattgactaattttgggcctaactttctaagatcgcatatctggaagaagttgaaaccagtaagaatgacaaatagtgatgcataactcttaaacctattaccactttttacttcagaaaagaatgaattcataaatgtttgtgtgttgagatacctaaatagtagatactgtaaatagataggaggcacaaacaatgctgccatgtgaactgcataaatgtaccttactctttcagctgacaactcatcaagtatcatatttattctatttggagcatacttggacggcaatgatgctccaaccagccattcttctggtgggaatgactgcaagcagttcaaaagatctttcatattgaagatagctaatggactacagatgaaaggtgcatttctccaacatttcagtacaacattgaaaatttagacaatagaatagttggtaatcggtgttatcacataatgctttgcgggaggtgtatcagcaatgaatagaattgatcatatggaattgcaaaccatacattatgtacttaatgaggtattgagaagtatacccgcatggttgttacaatatctgtcacatagctgattggatgaactttgtcctgataatggaattccgtttcatttatcgccacaagctaacacattcaaaaacatgttaccatcacattaagtttatctatttaaatcaatcccaatatgctcaagacatgtagaaaaagcttgatactataaataagtgatgtttgaatttgttgatgatgagatgataacttgaaacataatgagatcttgctaaaagaaagtacgactcatatgcaaatgtttctttttttttggaacgtgacttgtatgcaaatggttgtagtgtagttgatagagtctattgtccagaattagaagcacatctgtcctgaaccctcataagttctcaaaactaacaggtcctatactcctattcggtaaatatcccatttgttaaccaaaatttatattccttatagaattcactgaatgattaaaacctgtaaaatattcccaacaaaggtcaactgacgttcctaaagaaaacttttccaatcaagatatgaaaagatcagaaactcaattatgtggaataactcttgtttgggtagtttgggaactctagaggaaaagatcagaagtcgtagaagtatcagaacttctaaccataaaacatggatttacacactgcgtaagccatgttctttgcaattacctcatcatagatccactcatggatcccattttcttttagtagaagaatatatttgaagaccaagccaatgatgtcttccatgtgttctgaaatcattgcatgtgcacgcaagaggcttaaataataacaaaatgtgcttaaaacaaaatagccatgttagttataattaaagatagaagctgaccatgaccagcatcagtgagcctcatgctaattgaaaaaaaaggagtattgggcactgtcactgccctccccggccgacaaattcatagcccatcctaaagtagtcaaaattgagcatatttcacatgtagaaagaataaactagagtgactatgagtagataagggaggcaaaagagttgtacagcaatcaactggtgaatgtacttgcctagttcctttatgatatggaagatggatccctcgccttcatgctcaattaagtgactcaaataatgggaaggaccttctttgtaaaagtggatgttaggtgtaacaggccatgatatgtttaggtaatcgccttcagatatcgggatagctttgataacaagctgcacagcaaatttcatgtcatctaccatcacacacacacacacacagatatatatatatatatatatatatatttgaccgaaccatcacatatattttatttttagtgattgttgcaagtattccatcttctccattttccacaattggtgttgcttcaagtttctacctgcatatgctcttctgaaagaggttgacttgggcatttgaagcttctctgatcagtgtttttgatgtcactaaacatgtgctcaacaaagctttggatgcaatccaggctctctaccaaaataaataaataatctcagtaacagataagtttgtatgagaatggactaaccagtaatatttaccctttccataaacaacaaggtgcataaggtttgctgaataattctcatagaacttcaaagctcctgtctaatgtccaatcccctctcttttggttttgtttctagcgtttcacagctccctgatgcattaaatgacaaattagcataataataaaaatataaaacattttaacttgttttttttaaaaaaaattggaatagtatttcatgcaaacgggatatacaatcactgcagaaaagtagctaattacaaagcacaactgttgggagaactgaaccattgtatgatatgaatttagatttcagaattgacatgtcaattttcatgaaagtttgttcatatttcaatgtgacctgaagaaaattgtggtctgcaaaaccaatataacagctagattttagcctgtttggatcttcactttgttttctcacaagaaatgcaacccagtaatcttaacagctagcaagatgactggtaagatatccacaatttctgaacataactatttgcttaccaatattgaatttatgataagggtgatcctttgaagccagatgtttttggagctggatgggggaaaaagtggaaaattaggtaacagtgaagcatgtgctatgagattcatagcaaaggaatggaaagtactgtgcatgctattttttactttcttttttattggaggaccatttacgtgcctatagtctcaccaattgtttatagatatatttatataaggaaacacgccttgtaaataaagaataaacacatattgatctgtgagtgaaaaggatgcatgatcctatgctttaatgttgcagcttctaatacagtcatacatatttggcagcgcgcatggaagaatacataacatatcaactaccaaatttggaatgttgcagtacctgatacattctccagctatcagacaacaagtttttcttgtgttctaggacgaaaaaaaagcaaagttagccaaaatatgctttttactactctccaaatcaaactgtgagttttgaagtgtaatgtaatgttaaccacccacaccaaaaaagcataacacgatgttagatacaaatagcataaaaaatcaccatgtgtaaagtgaataatcagaacttaccagaatcaacagccttaatctctctaagaacagcatcttgcgacatcaatggcttaataaaaaactgtgcaaatctgcacaaccgaaaccaccaatgcaaattgttattttctaacaaaaagcatgaaaaatcttcagaacaaaaaccaccaccatattcaactcacacgataaatacacgtgtgcacacatacatacattaaatgaactaaaagtattaaaaaaaaggtcttacctgtctaatgcttcttcaaaattggccgcattgacataaaaaaagaaagttgttgtctctgaatatgtataggcatcgcaatagccaccgtgctgatattttttacatcaacccattgtcaaaaacatagcctaggtatttccaagcattataatatttttgttatgtgtgtagctctttaacaacttgtggcatatgataggatgaggattacaatgctattgctcatcaggacattgtccttccgcttaaacagcaccgcacataatgccatgctggcaagcatggacattagcttcaggggaacacaatgggatataacatgactttagggtcacgaccacggataaatagcatttggtctgcagtttgccagtgtgcacacatgcaaaccagtcatagcatagattactcacagtattccatattagaagtcgttttggatttgttctaggtcaaacttcttcaaacttgactaagttcatagaaaaataaatgtaccaatattttcaacacaaaacaaatatactataaaaatattcaatggtggattaaataaaacaagtacctctatcatatacttcgagtaatcattttccccagggtatttctcactggcataaaatagcatgtgttctgcaaacaagaccatgacaataaatcaagacaagagaacagataaaaaactatggtcaatgcaggatttttttcttaattcctgcaggaattaaacttaaattgtgtgaaatactatataatttctgtgaaatctatgtgttccaaaagaggcctaaacggttactgaattttgaacaagtcagcattttcttcacaaaaataagtggttttgctataattatggcgacatttttgctttgattacagtcaaatttgatttaatctctctttctatatatatgtattagctagtatagctttatgtatttaatctctctctctctatatacattatttagaaattatatttacaatttagaaagctaagtggatattctttgcctttttttaaaaaaaaaaagtagagtccaatccaaacagacttgaaaccagaaaaa

SEQ ID NO: 6586 - DNA, 48125 bp, Oryza sativa
  unsure (1)..(48125): unsure at all n locations
cgtgacttggccggccggacggcggaggatgggatctcagtatctgtctagctatctcagttccagggtagcaccctctgctctataatcttgtagagatttcgtggcattaattatgtttcgagttgttaattagattttcaatccagccattattagtttgcgcaagtgcaaaccggcctgcaggctgcagctagaatctccagtttttaattaataaagtaaatatcaacataggccgaccaatccgtgctactggatttgcgcacagctgcacgtgtacgaccgacgaacgtgcgtcgtacttgcgagagtgtataccttcacatatgttcaaccatatagtaaactccatattgtagcatatctatttttacaagcaatatataacatcattgacttttatatatgttttatcattcgtcttatttaaatttttacaaatatatacaaatataggtaatgtttaaagaacatttcaatgataaattaagtaagaataaaataaataataattatattttatgtttaaagaacattttaatgtttacgtgcgtacgttcgtagtagtgagtgtacgtgcgttgtgagtgtctgcattgtactgtgtaattcttaaaaaaaataataatcatatttttttaataaaataatagtcaaacatattttaaaaataaacaatgtcgcactccctccgtcccataaaaagcaacatagtattaagatgtgacacattttaatacaacaaatctgaacatataggatgtgtcacgtcgtagtacgaagttgaatttttttggacggatggaatatattataaaaacggaaagagtacaatatatcttaggtgtagctatatttatggcgccatatttttcatcaaaaaatagtcggcatgtatttatattgtaagtccctaaattacatatgtaattttagtgtatttacaatgtaagtctcaaaattacatatgtaagtattaaaattatatatgaaaattcaaaaattacatactaattacatatgtatgtggggtataaatgaggtgtaactactgtgtaagtgactgaaaaaaaatcaactgtaacatatggcgccatatttctagcaactccgtatatctttagttttcgcataagaatacacgtatatggtcggtacaattatgcaactccgagggcaaagctagcgctgctgcatcacggcgcgttaggtcacgcaatgaactggataaccaaatctcatttttcatggcgtataatttccaaaatctcgatgaaagtgactggagtactatatgctagtagcaagtagtacgtatattaatttattttctatactagtacagctagctagggtgtggtgcagtgttagcaacatttcttgccgacatgtacacacttgaactcctatggctatggcgttcatttgagtatctttctgcatgcagctgtgtaaacattatctgtaattgttgcgtacgccaataagattagtttgtgctattattctctacaatcatctctgactaatctgtcaatttttctactgtgctactgcgaggaattaatgcacggaatgatcatcgtgttttcttacgacatattgctggtggcggggtgatcgtcctcacatcctgtgttgatagatttggctgatcagatcgactagtcgtttccaaatactcttttactaattggtacagttaatcgttaacatcgtcgtgcaggaaccccacacatacatacatacacacacatatatatatatattttttacctcgtttttcatatatagcaccattgatattttaacaaacatttaactattcatcttattaaaaattaaatatagaaaactaagttataattaaaaattttgatgattaattaagtcacaataaaataaatgataatcaacggcccctactaaaaatgacttttttgaatgggcaccccaatagtttacggacggatcataagtgttcgtgtatgtaaaaatcgaccctcatttttccatacagctccttaagatattcgtatgaaaaatatttttttcgaacagaccacttaaaatatccgcacatgaaaataagggtattttcacatgcgggactcttatctcacccgattgcaaaaaatacccctagaagtttcccactcctttttttattcttcactctctcattctctcccccccctcacccccactccactcctctcctctcccgctctctctccccatccggcggcggcgggcaacgatgatggtgagggcttcctcctccccccctcctcctctcccttctcctccatcccgacgttggtggagggttcgggcaacaggggagggaggaggaggggcgcgatggcgtggattcgacggcggccaccctccccccatgcaacggtggtggatcgacattggggaggcactggaatggcagattcggctctggctctagctccagcaacaggagcgggcagacccggctgcccctagccggcttcgaccaacgacggcgacgacgaggagggcggcggtttctagggttatgttttcgtgatttctagtttctttttttcggatttctatttttacgtgcagacgacataagcacccacacgcgaaaatcgtactttcgcgttacaaaaatagcgagttccgtagaccatttggtgtgtgcggatcgttttaccacctgcgaaaaccagattagaccatataaaaaaaccgaagtcatatattaaaaaacaagccacaacaaaataaatgatagtcaacgcgttatatattaaaaaaataaacaaatgtgtgtgggtatagaattaaatttgaaaatacactgtttattcattttttttcttataaatattcgggatgtaaaaaattttgcgtaaatatactgttgatctcgcataaccattgcgcgagaatgacgtgggaatgacatcgtggacggtatcgcgcggcgaaggcgcgagaccgcacggtatcgtgggacaacagcgcgagaccacgcggtctcgcggaatggtatagcgagacagaacggtctcgcgcaagcactgagcgagactggtgccacgctgattcaattagcgactaattatcttgattagcgaattattaattaagcactaattaggataattagttgctaattatcattagttaattgctaattaagtaattaagcactaattaaatggagccggtggacaatttcgctgtttgattccgcgagaccgaacggtctcgctcttccattgcgcgaaaccgcgcgctctcttgccttcgcggcgcgataccgcccatgacgtcatacccacctcggtttcgcgcaacggttgtgcgagatcgacagtatatttacacaaaaaaatttgcatcccgaatattcatgaaaaaaaattgaatgcatagtatatttttagttttaattctaagatgtgggccctgtgattctatgaagaggaccgaacgtagcaaccaaagcagataaacagtactactccccggcggcccggcttaatgccccggatatggttgcagttgcgcaaggaaatcttatgcgtgcgtgcataaggatcgtgtgcccgtacgtgcgtctgttcatgtatgcgtgtgtgcgtagtatatatgcatgaatatgtcacagtacgtaatgcactcgtaagcgttcattctagctatatatacccacatcttacaccatgaaactatctcgtttcaaaatattcctctcagcaaaaaggtcgttgtcaaaccttaagtacttgtgtggtcgtattcctatatattccacacatcctccggtagttttctttatgtagatgtttaatttaaatttgtactaattgggattggacttttctttaagaacgaaatcatatgggcgtgggcacgtaccaccttgacagacaggcacacgctgacagtgaaacggaaatcctaatttggatcggtgtacgctagctcgcgattaacatgacagacacgtgcaaattagtatatatcaatttcccagaataaaaggtaaaaaatcacctacaaggctacaaacacgtatatagtcggatcaaaataatcatcgtgaggtgccaataattaaggtaacggtgtggagcaagaacccaacaaaaccaaaaaccagacacggccgtacggtgacatcagaagagatgttctcgctagctacgtgctgatcatgcaggacatcgttggttcgcttgcatgtgcaatgccgggtgacacgatcgagatgtgatgcgatgctatctcggcgcgagttaatgaggatgagccaaaattagtgctcgcctcatcatatccccggaatttgactgtttgaaacgcctgcgcgcaggatcgatcggctacgttgtctgtacgcgcgcggcgttctcgcgtgacgcactttggcagatccatcccgcaagagatcatctcgatcggcgcgtcctctcctccccgtgcgggccgggacaaaccgtgtcgcgtcacgtattttatctccgtatatctcacggcctgcagtccggctctcgctcgatcgcccgtccgtgcgtgcatgaaaccaccatcaacacatgctcgtgtcgatcgatctgtataccacgtaccactacgactacgcaacaacacatgagtaggtttttgctctcaacatgttccgttttttcccactagaacgtaggttgtgctagcttttaattctggcacaaggttgttgcagcgatgtgcatttatgtgccagtaccgaccatgtgtaccaaactaatcggattgatcgatcgatcggtccaacgcgcgaggtgccggcctgtgcacgcgcctatccattggccgcgccgcggaatcgtacgtaccgctagctgctgggctcgatcggtcgatggaccggccggttccctttcgttgtcccactccgccggcgacaactgtgcatgccggaccgagacacgccggatcctcggcctgagccagcggccggccggggcggttccaccaggtgcatctcctttgatcgatcgatcgatctcctagacatcatcgttgttagtgatcaaagatgtgatgggcggtacgtgcagcattgattgctcggcgtgacgatctctccaatcggagcgatggagcggcacttacgacgagcagagacgggacctcctccgtgtcattaggaaaggatcgcacagtggacagatgatgacaattgacagtctggtaacaatgatgatatccttatattaaaaaaaagaagaatgataggtgatatatatactactacgtagcatcacagtataattgaggagaaggattttaatcactcaacggccggtgagccgtccagaactacgcatcgatcaatcaacgtcttttaacatcgactaaaaatgtttgcgtgccacggttactagcgacacgaatatatcgagtatatagtggagtactacgtgaagggatcaaatcaaggtggatgaagacgtaccgacacgccatcgccttcacgttattacatcctaacgctgtgcacagtacgtgcccggtgcccctcgatcgccctcgtcttataaatgcagaagttgacgcctggcgtacgtgacgggctgaccggcatgcatgcatcgcgtgctacacaggtgagggccggccgggagctagcaacgcactcgggacggcgcgctttaacgcgcggccaaattaagcagcgccgcggaacacacaggactcgaccgatcggcacgggcgggcgcgcgagctaggtgccgaggtggcgacgtcgcatgggcgcatgcaacgcccagcaggcacgcacgcgagagacccgaccgatcgacaaacgtgcgagcaattcgatccgtgggaccgaatcgggcagggggatctctcgcgatatcgatcgatagcgatcgagcgccggcggccacgcgaaacatgcacggtcgttgattagctacgagagcctacgactctagcaaggcataggcacacggaccactggcgccgcgccgggcgcgcgcgcggtgccgggtggccgatcggctagctataggctgctgcatgctggatcggaagggaataatcttaggtcgactccagatcgacgacttaggtaagcatatgcatgggaatgtccgtttgctgctggatggtccagtagatggtcctatagctcgcaacgtacgtactgccattaccagaaggaatggaatgcgatcgatcggtcgatttgccggaacactgcaattaatgctgcatttgagcaagttcaatagtatagccaactgttggctctaaatcatatatagccaatttaatagcccattcatataatagttatctataaaaatatacacattattaatacctagtcttacctctcatacactcataatgtattagagttcgtgttgcagccgacttcaaatctgtagcccgatttcttctctctcttctcttttcttctcgatatgtgattatagctggcttatagcctgctattgtacctgctcttatgctcttgcgacttgcgaggccggtttttggttgctattgacttgatttttagtctttaatctattttttttccgtttgaagaaaaaaaataaaagcattatttatcctttttattacatagaagatgcacacacatctcaacacacgcgttcaaagagacaaagactaatggtagattttttttttactttaatccatacggttctgaccttttaattagataacgatatggacttcaaaatatattctttgactataatttttttattgtgcatataaaaagtaagtaattatttaaaatatttttaagactaacatatgtattacatatcatgttctagtagtctcttcaatccaaaaactattagcaattaaagttttaattgtttgacctctgtctagtttaaaacatcaagaattacgaaactggatgactgtagtactaaaatttgaaagttgtgtatcactccttatttggtttctcctacattactcgatttttttttgtttcagaatataccatctgaaaactcaaaactgcatgtgctattatcttttacttttatgctcccaattcattgtgtgcatttattgtgtaaacaacgatccgacatttattgtacctcccaattcttccctcctcccatctatccacatccactatccgtggagtcgctttagttaggacgatagcatcgttttgtattgggatgacaggaatgcatgcatatctcacacttctgaaagctcggacgcactaaactaaggattgattagaaagagtggtgagaagaggagagaaaagaaaaatgtgcctccataaagcaatatatgggccggtaatgtttctgatttataggataatttaagaaatgttttgtgtgttatggatgggtcgtaatctaagggcccctttgaatcacaggaatgaaaaaacggaggattaggaaaaacataggattctgacaggaatgtaagtgtaaaacagcggattgcaaaacacaggaaaaacataggaatgaccgtttgattggaccacaggaaaaacacaggaatttgaggagagatagactcaaatgatttcttccatgaggttctatctcttgttaaaattcctccaaaacttgtatgggaagaggcattccataggaatttcataggattccatagggtttattcctttgatttaaagggctttgtaggaaaaaaaatcctataggaataaaatcctctaaaattcctatgaatttcctttgaatcaaaggaggcctaactatacgtcgtaggtgggttaaaattttattctgtttcaaaggtgtattctttattttttcacaaaagcgcaaaagaaatgcacgtaagtatagcagtagaaatagtgttttttctgttatataacgcaattgaccagactggccgttaaggtgtattaattcttttattaattggcatattttgatatgaatcatcatgcaaaaaataatacatttgaccagcatcaatttgtttaaaacaatccagataaactaagtaaaacatattacctggtgccatgaaatctttttatgaacgttatattatactccctccatattttaatgtatgacgccgtcgactttttatctaacgtttgaccattcgtcttattcaaaaattatgtaattatcatttattttattgtgacttgattcatcattaaatgttctttaagcataacgtaaatattttcatatttgcataaaaaaatttaaataaaacgaatggtcaaacgttagttaaaaagttaacggcgtcatacattaaaatacggagggagtactatatactaaagctgaagtaaaagaaatgcaacatgaaaaaaaacatttcggtgagcttgaaacatcagtgtgggctgattgattacggcagagcgtgcaagcaaaactaaagccgcagaaatgctttacgtattttgagatgaggctgggaaattaaaaggtatgtcgtcacttgaattttgaagtggaaatcggtactacaaacagtacactttgtgctgtacgttcagaccacgcaacatatcacaggtactgtacgtatatatacgtgcgtacaacacaagttgataatcgatcatgacctccttgcattggtccctatagctaactcaatgtcttggatcgatcaacagtataacaacttatagctcgcgcatggctagctggttctttccatgtacgtttggtacatgattggtgcacccgtatcaagttgcaaatccacaacatgctcgcgatcaattgagaaatggaccactcactcagttcacacaccatgtatgtatatatatatatatatatatatatatccaatcaagccctctatagtgtgactagtactgtctcgatttatttcttcttgatgaacactcaatttttttttttgcttttatgaacactcaactatcttatatctcagccaacgattgagccacatgcttacccttacatcatattacttgaatgttggcgtttgatccttatttggtgaagctcgagattctgagtagcggtgagaattagtttaaaaggacatggattttaagctttgtattctaaattctacaattacactaaatacacataattaattttaaaaataagctgcaacggctagaatctctaagccacggatatctcagagctaatacgcccgactgcaggatgcgatcatatccggatcaccttttatacctatacctatatagagagctagatttaacctagctcgcacgaccaagcacgtgtacgcactacgcactctctaccgtgagttaattcgcgcgcgtgcattaactggagtctggaaatggtctctgctggcctggccggccggatcgacccgggcggccccgcgtcgcatcatgtaacaactctcacaagtcgctcgtatccccacccgccaaccatgtcttgtccctcacgtgcgcgcgagcacgtacatgtgagaaaataccatgtcctccgctccgattccccagcgcgcgcccctcgcccggccgaaaccaatggccgaattctggtgggcgtggcgtgcggtgcagcgccgcaggggtcgtcgtcggatgggagagtgttcggaaaaaaaggcgaaaaggcgcggacgcagcgtatcctgccgcgatcctgtgcaatcgaggatgtggatggacacaagcgacggtttgctgtttgcattgatctctctcccgttgttcttgccgttaggtggcgcctagcgagctacggttggagctagctagccatccacgcaagcagcctagtatgagatatacggagcatgtgtgtgcgcaagcctgcaaggccatccagccgcagccatgccttttgttgacacactgaaaccgagatgttgaccatcagctgctgttattactactagcacactgctagttgcacatctttctcctttttagctgaagatttggtgcagctcgtactttggtaaaatgccttcctgatcccgcagaaagcgagcggattcggggtaaagctcgatgctgctgtagattctccccatctgcatgctctaacgaaaggttggtcaagatacggaaacgggagaggatctggatttcttttggttaactacctgatctcatctccctaaaaaagctagttagcgactctaagattggattatagtacgtacatttgggccttccctcgagttaacacgcctaaagaactcatctagaaagttcatcgcacatggcagcaccaggacggggagccggccgggcggcgtacatacgtcgccttagatcccatttgccaatttggatcatatcgatcaaagtgaactaacccagccagaatgcaagaggagaagtgagatcttgttatctctgaacctcttgtcgttggttcagtatgatataaattcaggccgatcactcgatccccgatttgtttcccttttttcttttgcgattggagtacggatctagttgggcgtggctagctgcctgcctggcttagctgtaattccgaattctgcaccggccatcatatgctggggcgggcgagtcaggcgcgaccgcgcgagatgtgcatgagtcgtggcgcgtcacgggagttgtttattcagggggggcggccgtgttgtgctcctgcgtcactcagctttttctctctcctatcctcctcggtctccccccctttcccactttgtcagttcgtcactccaccaccgcctctctctccccgcctctcgcctataaataccgcccccctcgcctcgccaccaacactcacctcaccatcatctcttctcctcgtgctcgtcactcgcgagcaaatacatcgccatctctcctcctcctccttgtcgtcatagtgcacgcaaagaaacacggtttgcaatggcgtggtgcttggtgttcatggtgttcttgatctactgcctcatctcgactgtcgggctgccggtggcgccggccgacgaggcggcgatgcagctgggcggcgtcggcggtgggcggctcagcgtggagccgtctgatgtgatggaggcgtcccttgactttgggcggctcaccagcgccgagccgctggccgtgttccacccgcgcggggccggcgacgtcgccgcgctggtgaaggcggcgtacgggtcggccagcggcatccgcgtctcggcgcgggggcacggccattccatcagcgggcaggcccaggcggccggcggggtggtcgtggacatgagtcacgggtggcgcgcggaggcggcggagaggacgttgccggtgtactcgccggcgctcggcgggcactacatcgacgtgtggggcggcgagctgtggatcgacgtgctcaactggacgctggcgcacggcgggctcgcgccgcgctcgtggacggactacctctacctttccgtgggcggcaccctctccaacgccggtataagtgggcaagctttccaccacgggccccagatcagcaacgtctacgagctcgacgtcgttaccggtgagcaccagacaaaacctgtacagcatctcctcaaacttcttcttccccacctcctcgccccaaccaaccttccgccatgcaagcacacacgacagttatccctcgtaagtttctgacgcgtgtccgtcaccgcgattcttttacagggaaaggagaggtggtgacctgctcggagtccaacaacccggacctcttcttcggcgcgctcggcgggctcggccagctcgggatcatcacgcgcgcgcgcatcgccctcgagcctgctcctcacagggtacaccccgaaatcccacccagcccagccgtcacacccaccactggctgcgtacgtacgcacgcgcgacacagtcacacacatcatcggatcacctcactcttctcctccttccgttgagctgatcgagcgagcgatatgatggcgccgctaatctacccgttcgctccccgtgcgactttcccttttctcggcgtcatctcactctccctccagggcttggcacggagcacgacgtgacgacgaccccgttcttttgcgtcaccgccctcgctttccaactaatggcccaatagggaactgaggcatcagcgagcagccatgcaagtggcggccgggcgcgccacgccgcgcgagggaaagcgagcgattgatgcgcgctgctgggctggctgatggcctctcgggggatctttttgttaagtaccgcaatttcaccacatgtcgatcgaaaccccacaaaggggcacggggcacccaattgaaacgtgttgccaattgtggccgtcgcaaaggaaagtcaccgttgggagctgacacgtaggacaggatcgatcgaccagcgaccgagcagggggtagtgttaactttatgttgggtcgctgttgaggtctacggtctccgagaaaaagcgtctggagatgggatttttttttttgtgtgcgcgtcgggtcaggtagtggaccaggttggttgggaatttggggccgacccgatggatcgaccgaatagtttgtgctgaccaattggtggtctgcttataaatatactctatatagaagcgtttggttagctgatcgtgcgatcactcacaagattttgttgtcatatgcagctcaattagctaactaatccatgctaactaagcgtgtgtgatctaacgctgattaagctgtgtccatatgatcggtacggcccgtgggtaataataatttattaatttgtcgttctgacctgcattgccaggttcgctggatccgggcgctctactccaacttcaccgagttcaccgcggaccaggagcggctcatctccctgcagcacggcggccggcggttcgactacgtggagggcttcgtcgtcgccgccgagggcctaatcaacaactggaggtcgtccttcttctcgccgcagaacccggtcaagctcagctcgctcaagcaccactccggggttctctactgcctggaggtcaccaagaattacgacgactccaccgccgtaaccgtcgaccaggtgcgtgtccgtcgtgccggcgcgatcgcgcggccggcgccgtctttcctgattcaccaataattctctgcctccccccctgaccgcccatttgtttatgacgaaatttcttaattattcctactggagtagtttagtactctaatggcagggcacctagtcaatcattgggccatgtttttagttagttatgggcggtttagtcaagctctctagtgtaatccaagcccttgatgattgtatgattgcacccacatgctgagcacagtggatcggtggatcttgcaaacgtactagtagctgtctagatcttagtcccactgacaaaacatgcactattttatcgaccacttaattaatcaattaattacgcagtactagctattaccactagtatagtactatacgcaagtgatgaaaaagaaagacgaagtagatcattctaaactaggagtttaaataattagtttcgatttttttttccaggacgtggaggcgctgctgggcgagctgaatttcatcccgggcacggtgttcacgacggacctgccgtacgtggacttcctagaccgcgtgcacaaggcggagctgaagctccgcggcaagggcatgtgggaggtcccgcacccgtggctcaacctcttcgtgccggcgtcccgcatcgccgacttcgaccgcggcgtcttccgcggcgtcctcggcagccgcaccgccggtggccccatcctcatctaccccatgaacaggcacaagtaagcagctcgccacactcatgcccccatatactatatccagccaatctacctgtcgtaacagtaatccagtagcactcgcgcccgcagcgtcacatgaagcgcggccgtcctctcacatgcggcgcaacacgggagggcgcgggcaggtggccgatgggctgcggcgtgcgcgcccgcgcgcgcgcgagagagagcgtcccatgattggcgcgggataaacaaatatacctccagatgggcagcagattgcacaggatggatcgtgctgccgccatactttaattccgaaacgcagccgccgcatctccggtgactggaattggccgcggacataccgcgcactagggcgacagggccctattctaatcgctgcgtggtggcgccatgccaatgctaggaacagaacagaacagacggggggcgggcgcatcatcagtcaccttcaccgccttgcgccgaccggttattctaaccagggcgcgcgccgctcccgttcccaatcgcctttccacggcaccagttgttaagcttcgctagtggccagattgcacatatgtgttgtcgctttcacattagtacttaacctgaaaggacgtgtcgatcagaatcagcacagatcttgctgctaactgttgttgcttttcctactctgctccaatctttcctctctctttttttttctcggtggatttaaatactaaagagaacttgatttgcgtacgttgcaggtgggacccgaggagctcggtggtgacgccggaggaggacgtgttctacctggtggcgttcctgcggtcggcggtgccgggctcgaccgacccggcgcagagcctggaggcgctggagcggcagaaccgggagatcctcgagttctgcgacgaggccggcatcggggccaagcagtacctgcccaaccacaaggcgcagcgcgagtgggaggcccatttcggagcgaggtgggctcggttcgcgcggctcaaggccgagttcgacccgcgggccatgctcgccaccggccagggaatcttcgactcgccgccgctcttggcggagtcctgaaacgaagacgatcgacgaacaagatgatggctagctaggcgcatgtaattagtaagaatcataacaggtgattagttagtcttaatctgatgtgtagattcctcgccccataaaaaaaaatctgatgtgtagacaattctgtacagagggatgtatcagtttcatgcaaaatgtgtgcaatgtttttttgccggtaaaagtcggcgtctgcctccagttcctcttcgaagcgtcgtagttacccaaggacgagatatctcaatcactgatccatcaacaggttcaggccctgttccgcatggactaggaacagattagtgacagaatctggctccttggcgagttgtatcgtgggtgaaagtcaagttcgaaagggaaagaaaggatggttacctgatacacgtgttttggcccgtcggtccattgaccaataccataccagcaatgcctactgtaactcctgtctccgttggggcctcacatatacagtagtattctaggttgttgcactactcctaaacagcatcaaaggtcgaattgtactacaactagtactcaaactattgacagtaccaaggtactatactacccaactccacactgcaaaagatcctacttccgtggctgcaaattccgttcttccgttcatgcacttaagctgctcatcgacccgtcaggcagtgcaacgtcacgaaggcacggagcatgtccactttagcattacacaagaccgaagacttcaatgaactgaaaatcaggcgagtggcgacgcgcgccgcgcggagccgaacagaacagaaacgccgggttcccgggcggatcaacgggatggcccgcccgctgccgagcagcaaatttgcccagctttggtgcgtgcggagacgatgcgtaaagacgaaaaaagcagcgagaccgcaacaggcgccggcaagggaagggacggcttcggcggcatgcagcggcgggaacgcggccaggttcaccggctcttttccgttgatgcgcccacgcggcgaagtctctcgcctttgacatggcacccgtgttgctccacccgtccgtccggtcccccgtacgcgaacgcgactacgcgagtggctggctgtttggcatttttggctctaccaagagacgtcgcgaggagtcgagcaaggacgaaagcgtcgttcccatgcctgacgtgccgaaaagaaaatgtttgtcttctctgcaccatgaacagagctgcgatatggcaggatcgatccctctttcaccagggatgcaggcggtggctgcccggtctcatcggcaaaaactccaattaaatttagtattgatgagtaaattgatgataaaatttctatagaaaatattgaagtttgctcgagctaaaaaaaaatctttcagctccacgcctccaccactgaattcggggtgtgagattgtacggtgatgctactgcactgtggcttgatgccctgagcctgattgtctgataatttgattggtgcctgtgaatgtgattgctgtgattgattggcgtggctccggaaaatctggatgctggactcgaatggttggcgccattaaccagatcagtagaataataccagttccgttctaaagtaattatttttctacgattaaactttgtgttaaaatatttatcactctaaagtagtactccatcaccctccatttaaatttctccctattacaattatcactatatactcttaaccatacatcgttaaataagggttactatagttttttaaaaaaaaaacttttatctatatttaactagctagaatgataaatacttcctccatttcaggttataagatgttttgacttttatcaaaatcaaaccgcttcaagtttgactaggtttataaataaatatagtaatatttacattaccaaattagttttattaaattaataattaaatatatttttatactaaatttatcttaggtaaaaaaattgatattttttttctataaacctgattaaacttgaaacagtttgactttgaccaaaataaaaacataacctaaaacggagggagtattttggtacgaggaaatactaacggcaatcttgttcggcataagaacttcttcaggtttacaagggttcacggaactcgtggcccaacacacgggaatgattgggccttcaaaaaaggtctctcatgggccttggcctgtctactccatcttaagattgaaaaattgatgtcccatactcctatttctgattagattagtctgtcgcagacatgaaaaatcgtttttcacgtaggcaagtgaaaaaggccatgttttgcagtcgctagaatcttttgttctcatgaagtaatatgttgcttcgttcaagcaaattgaattgcagacaaaaagaaaatcggactattaatataaggtccatgaagttgcccccaggattcgtcctcgaactcacgccctttgcggttgtgttaagtagtatcaaacaacatgtgcagcagtccgcgtgagaaactcagaattcatttactgtagtacctcgaacagcatctactgcttgagacgtcaaatcgaatctactcctatgtatgtatatggccgtatccgtatgagcagaagtattagaagcttaggaataaaagcagtagcaatacctgttctgttcctaatccagacgaccagcattagcaaagtcgaaaaaaatccttatccccaggtttcatgttcttggcaaaccaccgaagttgatcaattcctggttgcttcgagacaaacccatgtggagcaaaatagcaagttagttcatggtttgtccgtacgtttttcagcaaccaaacttgaaacaaaaatccgtcatgctttattataaaactatttatgatcataaagtacagatagactaacaaggcaagtgaacgggtaaaaaaaaaacttttagagtgttggcaccggtgtcattagcttcaagaaaaatgatttacttctagatgcttttttttccaagcctatttataaaattagtttttaaaaggctaaaatacagagacatacacatatatatccaatcacctttaaaaggatcattcctcaatgatcatcttgatcttggattctcgatgggaaatcctctaagcacctcggtgactgaacccataggttggccactgggtgttggctaaagccaaccacaagagttgtgatgaatagtggagacagtcggggctcttcgtagagggagggggatggggttctgcaactgaactgatagaacaataatagatcacccacaaatcactttgctttgagctatgggactgtctactggtagaaaaaaatccgtcatgctttattacaaaactatttatgatcatgaagtacagatagactaataaggcaagtgaacgggtaaaaaaaactttcagagtgttggcaccggtgtcattagcgtcaagaaaaatgatttacttctagatgcttttttgcccgaagcctatttataaaattagtttttaaaaggctaaaacacagagacatacacatatatatccaatcacctttaaaaggctcaatgatcatcttaatcttggattctcgacgggaaaccctctaagcacctcggtggctgaacccataggtttgccgctgggtgttggctaaagccaaccacacaagagttatgatgaatagtggagacagtcgggactcttcgtagagggagggggatggggttccgcaactgaactgatagaacaataatagatcacccacaaatcactttgctttgagctatgggactgtctactggtacaattctcgtcgtcagatctgccaaaacaaggtttacaatatcaacatataaacttctttatttttcttttgtgaaaactagacatttcggtccgacttgagatagcaaaccattatgtaaacatgacattttttaatcaaactaaaatttaattttttgataaaatttagccaaattccaccagcaatcaatggttttcaaatggttctaaaaaactgaaataacctcctgagagcattttttagtgccggtatgattcacatgaaaaacaaaagaactgccaagttatctatacatgttagatgatctcgaatatcgtgtgacgcatcatacttgatcgactaataaatatccaaaaatggatattggaacgtattcacatgatgtagcctctctacacgtcatcaatattatctccgcaaaatcaacttttgattttattctttttatgtttataccgcgtcataaaaacaaggtacatgtgaaaccgtactaatctactttacgccatctcccacgtccccctcttcttatatttcacctccacgccccccttcgtctacctgcttgagtattccctaccttcaccataggcggagatcgagttccacatacggtattttctactagtactctatttttttctcttctatcaccattatggttgaatatttccttttcaaatccttaacccttgaaaccacagacaccattgtaggttttttcgcgacctcgaatcatctccgatagtgtcggctaggcgcgccacccatgcgcgctggcgacgctccgcgcagagcaaacgggagattatatggtatcaaaacaatgacttatacaccagaacaatgacttatacaccagacgagatccacgcagcatgttcctctctatttctttctttcttcttcctactagtagatctagatatatgatttcaaaactttggatacatatagttttgaggtcttccatggcgtacggtgaaaacttcctttttgcacggccctccccaccattgagatcaccgtttttttttttttggcctatttgcggcgcgccccggtcggccgtccctgtagctcagtccacccaccgctctcacttccatacgcggcccgccgcacgggtgcgcatctcggcgtcagaaagggctacagccctacagtgatggatcggacggaccgtgcggggaagaaagagaaacacatcggcgcaaggcgcaacctcgtctccgccccactcgccgaaaatataaattccccaatccaaaatattacccatcccccccctttttttttctctctcctcccttttcgtctcgccgccgccgccgccgccgccgccgccgcagtagagtctgcagcagccgcagccgccgccgacgcggcggctctctctgctcgccatccgcgtccggcgtaccggctgccgacgcaggtgagacgctaggccctttcctcccggccgacacgggatcggggaggcgcgcgcgcgtggcgccgcgggcgctgatgagatatggttgcggcgggggactagggtttgagggttagatgcgccggcctgtttggtttggctgttggggattttttggagtcgcgaaaggaattcaacgttgtctcgaggggaggcgtacctgagtttctcccgcctgcttgtagctttgcgttccgtatatatttccagtgaaattcggttgcccgcgcttcgtaacgaagggcttttggttttatatggatggtacttgtgtgcagtgatcatggatttctgtgggtggattatagttattctgaagccggtttggcttgagttttgagggcttagcacaggtttgactagcctgccattttgatactgtaaagtacacatgctgatatagtgatatttctggatttctgtggttgggttagttaccctggaatcggcttggcatgagttttgaaggcttaggcgcttagcacatgtttgattagactgccattttgagacagtaaagtaagcatgttgaatttagcacatatttccttgtttctgtacacagatccgaagtcaggctctgtacggttctacgattatttgatggagcatgatatgacagttgaagattttattagaactaatgggttaggggcaagtggattgatagagaccaataatcaaggtgtatccacttcttctgtgtctgattgtcggtcctgcgagcatgtcgagaatgggagcccttccacggcccctcccttttgggactctgatggtgaagatgacgatcctggtatgcaaataacactacttttgttcactgtgatgataattaccgtaataattcaaaatgatagcgctagagtttgaaatttttatagcctatttatgggaaaaacaaacagccatttctcaactaagagttatgattagttccttaggaagataatattatgttgaaatatgtgtctggcaggccagtgctggaaactgtaatcttgagggacgcgcattaggccctgtttctttcagcttgggattattataatccagattattgggagtaagcagaaagaaacaaacaacttattgaagtagcttattataatctgttaagctcatttaggtgagctttttccagattattgggtgaaaaattacccaccatgccaccccactccctctttagacttgcaaacccaataatctaggctccattctactacagattataacaatctagcttatattaatctgactcaataatctagattataataatcttaagctgaaagaaacagggccttagtatggacagagattacatgcttaaatttgctatgaagacctgaaagaactattttttctagtcatactcaaaagtatcattagtttgtttactcctattgtttcttcctcttgtacacataacacattcaacgtgccagtgcaatgcagttgcccttctgaatattgcacttttggccacctgtacttatctctacctttaagccctatgtttcactctgggttaaataactaggttaacttaactcatttcttgtgtttggcagcagacgtagttaacctaagatactgtttagcttgattagtatctgtttagctgggttgacagttcagaagcctagaagggttaattgtgtctttttagctaattcactttttggttattcgctaatcaccatatttctgcttgtatccagaaacagttgcctgaaaacatgtgtttcttgcttgcatcccaaatacattatgttacagttgacatatttttatgtcatcatcatatgccgtgcattcctatccatgtcaatatatcaccatgtcattaagttaacgaagcttcctaaaaacttatctccaaaagtattatttgccgttgtacatatgaattatttatccacgaagaatgctgttatccattctattcttggtctttgtaaagttgaactgagtttagggcataaaaagagttttggagtacacatgctgctgtctatggctactaatatatgttactagtatttaccaacatttttgtttgacagaagtgataaacctgcgaacttcttgtcagttacagttcttgacacaatagtaattatagttccatcttcaaattaacctgttttttttttctttagcgatgtttctttctttattgtaattgaataattgcagctacatttcatttggctaatctctgtcagttacctcagggcctagaccttcagatttatttgggcgatatacttggagaattgaaaacttttcaaaggagaaaaaaagagaaatgaaaagcgaaccatttgaagctggtggttacaaatggtaggattcctgatggtaacttactagaaaatttggtcacagcaattctcttttcggagctggaaactctaaattgcttagtagctcagtttgtaatgcattctgcttagattctctattccattgactgacaaatcactcatcactaattgttatttgtgcaggtacattctagtttaccctcaaggatgtgatgtctccaatcacttgtcattatttctatgtgttgctaatcatgacaaacttctcccaggtttgctgttattatgttggctaaactatcttatgtgttcctcacagtatttaatcacacccttaacacatttcaggatggagccatttcgcacagtttactatagctgtgggtaatcttgatccaaagaaagttaaatattcaggtgaggcaatctgtgattcttattgtttgaattaaacactctgtttcagagtttaactaagtaagtttgcagacacctgcacaaattctggaagaaagaacatgactggggatggaaaaaatttatggagttgtcaaaaatccaagatggtttccttgttgatgatgttcttgaaatcattgctcaagttcaagttatcaggtaggcagtttaccaattttcaggattagcacctaaaagagtaaaatttgtttgcagttctatatgattgaaataaattgcatatctatggccttatatgtaaagcattccacagatatgcttttagatatgtttttcctatgtccctgaaacacgaaagatcacttcatttaattgttcctacgatgcttttgtgctaagatgattttgttgggggcatttatgctctccataattcaagttttactcttcatgtgcagtttcgacttattgaaatcttaactgtaccctgttgtgagctgtataaacctttcttttgtttttattgcatgttgcaacatgttatactgcgatttattcaaagatctctctttgttaatgcctctattttctctaattatttaagtcctagcttctatgtttaatttgtcaatgctcaactatggtgtgctcagaaatttggttatatacttataaattgattgctggacattcagtaactgttctcttctgcttttcaatactggagggagaaagtggatcgcccatttcgttgcctcgatcgcccttatcgacgagaattactccgtgtctatatgaccaatatagagcaaatttaccgacgctttgttgaagagcgcagaagtaaactttgcaagctcattgaggacaaaatgagatggtccaggttatacaattaaagttatcaacatcctgttatcctttcataatgattaagtatctgtgcgcgctcgcgtgtgtgtgtttttaaaaaagttaatactaacacatgcatatctttgtttgtactgcagtttccgtgccttctggcttgcaattgaccaaagcacaaggcatcgcatgtcgacagagaagagtgatgtcatactgaaaataatagtgaaacatttctttgtggagaaagaagtaacttcaacgttagttatggactctctgtatacggggttgaaggcgctcgagtgccagagcaagagcaagagcaagaaaggcataatagactcagtggattttgtagagctgccagtgcctatggtccatgttgatgtggacatgtttgttttggctggtgatgtcatagctttgcttgagagggcagctttagaacccttgccttgtcagcctgtgtctccaaaggatgacaaatgttcccagagccgcactaaggtaggtatttttcatatgatttattcattcagtttctggactatacagttaataatattgagtttctggcccccaaaatgaatgttagtatttcttgtttcactgatatggaattaatttagtttagttcaaatctctttagtttgcatcctatgtcaaacttatttccttgtcttcccagtttccaccattatttgacctatttttagacagaaggccaatggcccagcttatattgaaagccaaagggttttacaacgctgggggttacccagttcaaaagcagcgcaacgcaggggaagtagtttgccttacaacagctttagaagctgaaacagagatggcacgcaggcccgaacattaaaaacaaagcaaaaagagccggggcatcaggaagtcatcccacaccggatctcagtgattgcacggctgccaggatcttctcctccagctggtccagttggacctatttaatattttaattttgcatcctctttcatgctttctccatagtttgttgttaagcaagaatgattctttttttcggagtttgttttcttgaaccttctgatttcaatgaataaatgtggttaaaacaatcaccaaactgtagcgattcattttcattactagctcttcttatgacatttcaatttgattggtcatgtaaagcttcaaacagtggttttaccttcaaaattccagtttggcatctttctgtactttagttaggagaatatttctatcttaaatattcaagttggatgaatagaatttctagaagtaaatttctctggtggtcaaagttgtaccttggagactgagaatcaaaacaaggcttctttgtgatgagacttgagtagtagtagaatgagagtgaatttcatttactttcccattttgtggtcttgatatgtgaagattgtaagcatttgtattacttgaatgcagtatagctatttatctcactgctcagtttttgtcattctcatctttctaggatggcagttctggagaagttaacaaagtttcgattgaacgtgaagaaaggcgcctaactgaacttggtcagaagataattgaaacatttgcactatcccatatattcaggtaatatatttcagttcaatcatcttgttacctccacatgattggttttctgggtacatatcataaatttgtaaaaccatttgtcctatgttgtccttttatgtgattttcttagtaccatattttgtttagtgcttgatcaaccagatgactcatgtggtcacattcaacttttttttttggcttgtatcaatgtgtaattgtgaagtggtttaatgattttgtgtggtcagtttccgagttagtatgctgaggctgccagcatcacacaggtctggtggtggcagaagaatgttaatgggtctaggtggagagtaaataaagtgattggaacagaaaccggaagagatagaggctcagttcttttctttcttaaattcattaaggacatatggcatcctcatatgcatgcccttaacctttattaatgtggcaatacttaacctatctttattcgtatcctcgctctttgccaatgcaaatgtctaggtcatgaggattactaattcatgcctctaacttgaaccctgttgcacagctcccacccaactgaacttttcttgccttgcctgacatgggtacctatgttagacttgcccataccccgtagtacgtgtccaccatatatctcatttctgttttacattgaagagtgtaccttttgagttctattattactgagttagcacgaagcttttccatgaagcctcctggtgttttgcattgcagtatctcccttaaagttccataaaaccaaacaaacagttctgtaacacaaaactggagctcatcctcaagttctcttagaaatatactggcatagtccattatctcttagattagcacaagataaccttttcatccttttgcattgcctcttacattttgttttcacattagtgggattgaggttgcctatcaagaagctgttgctttgaagaggcaagaggagcttattcgcgaagaggaagaagcctggctacttgaaaatgagatgaaggggaagcgtggcagtaccactgaaaaggataaacgtgcaaagaaaaaacaggttaatttttaacatggtcatgtcatcttcatttattttatgttagattggattttgttttactcataatgatcgattatcattttcaggcaaagcanaaaaaaacaatcgtaaggttaaagacaaagatagagaagaaaaatgtgattcaaattttccagaaagaagtcaagatgaaaacacaattcatgacagggaagactctaaacaggcaggacaaatatccatgaaagtagatacctctgaagaaggtgcctcagatgtttcagacaatttagatgggtaattgaggtatgtcaaagttccaaactgacacagtcaataatatttcaaagcctgttaataggatgaatgatgttgatgttgagatgaaaaatgttcagattcagaagaaacattctactatggagaataagtcattgtcatgttcatctgagtctgctactatgaacaatgcgcaaggcaaaataaataacttgttagaaagtaaagatcagatatcacgcaacaggttggttagcattctgtcttaattttgcattacttctcttggcaactagaatttgtcttaattgaatttatgcacagagggaaagctcgcagcaggagcacaagcaatatgaacattaccgaggatgtggatgatcttccatcaagcacgactagctcagacaggaatacatctggctgtggcccagctccaaagcttgatcaagagactgttctacttaccttgaaagataggcttcggaaacttgggcaacgtttacatgaggttaagttattctttataaaatattgagctatatttccactattgccttgttcatttatgttatgaaattgtcatcttaaagcatatcaccgtcaccattggtttcatggactcagttttgttgtctagtagtgctttgaatttgcttgtttatgttggcaatgaaataggttagctattctgatgatagatttagcaacaattaacaatatggtttgcaaggagtttgaacttttactagactaaatcataggatcaaacaccagagccattttattatgctaacaatatggctagacttgtaaaactcttctgtaccatttgccgattaactgcaccttctccctgtttttactgtaaggatgataagcacagtaatggaatactgctagatagcattccaaatgaaaacataactttgcattctttttggtgttaggactaatattacttcagcatcacaaatgcacacacaaatacacaacaagctagaaaatgcaagtacagaacacaggagatcacaagatacaacagatccataaacaaattcattgtgttatttacatcatactgatgcattgcatggatatgttcctgacaaaatatgctttggtgaattcacttcctgaattggaattttatttagtattttatagtcatttcatagtaacacttcaattgtcagttatcttgtgcaattgtttttgtactgctgaagattgatgtatctatttctatttatgtttgttaacagaaggaaattgagggcaggaaactactccaggctcatttggaaaagaaggcagcagctgagtcagcaactggttcatcctcatcactctcatccaattctttagaagagactccagaggttctgaagagcccagatcaatcttcagtaactatctctgatgctgatattaatgcatcaccttcaaagtttggtgccagtaaagaagtcactccagtaacaccaaccaccatcctaagcactgagcctgtgcctactgttgcttccaccctgagtaaagatgagccagttttgtgtgaagatcatgtatcatgttcaactccacaaattgatactccaatcacctcaaatccaccgcaagttgttaaaactgtacccttccttcaggcatgctgcttgttggtcacgctattcaagcaccgtctagatcaccggcaccacaggttgatagggtctctaaagctattgctgctcccaccaaatcacctgctccacaggttgataaggtctctatagctgttccgactccctcaaaatcacctgctacacagggtgagaaagtcgctaaagctattctggtgcccccaaaatcacttgctccacaagttggaaaggttgctaaaaccatcccgacaccaaaacaacctgcacctctggttgacaaggttacgtcacttgaccctgtatcaaagcaaatgtcttccatgtctaattcagaagcccgagaagctattcttcccaaaaaggctgcagtcctgtctgtttcccaaactcctgcaatatcgaggccttcaagtgctcctctgttccaggtaccaagatcaactttaccacctacgccagcagttcaagttcccccaatgctttcccgctcaatgaccctggctggacgatcgaggaatgaaccatccccttctgttccaagttatacagcacagacctaccgaaatgccatcattggtaagagtaatcttgatacagcatcagcaagtcttgatcattcaacttcttttggccaaaacgtcgcactttcacagccactatcatcgtatgcatcagcagcatctgccatggtacctccggtcggaaggaatggccaattaccaggtaaacagggcttcatgtttgggcaaggaaagtccgaagcaattgataactggaacccatggaaaggtgatagtaatgctaacaaatacatgtggaaagatgattctccttaccatcaaatgaccaagggtgatgcacatactcaatcttggagggacaattcttatcagcaagcaggatgcagtggaacaggggaacaaggcgaatttggggggcttcaatataggcagttccagagggagattccaacaaaccttgtctcataccaattgccagggccagttggagaagaatttccacaccttgatatcatcaatgacttgcttgaggaggaacaaagcagtgggagtatggcagagcctaccctccacggatatcatacattgggcttgccgtattcttccagaggaaacttagtagactctgaagtgacttccataagtagttctggccggttaaacttggccgatcattactatgacgagggctacccgatggcttatgacaggctgaatgctctttataggttaagagaagggcaaaattccacattggatgcttattccaatggaaggatggactcgattacttcaaaaccttggctacataacttctcaaatccagcagtgaaccttggagttaacccaaatggattttcacagcaaatggggaactacaccaatttagggagtgggagggtgaatggagaacatctgtatcgccatgccaacgggcaatggtgatgcctgtacacaattgataataaatcctgctataagttgtcacagaccatggtggcagatgtaagcgtcgccatggccaccaggttgtaacttttaattttaaaggggcaaagaaataatacattgtgtaaagcattccagtgtccgttaaattttctgtcggctgctttcatagttttatggttcttctttatttcttttttggttggagtataaaacggaattttaacaagtcagtccagaagagttctatgactacttcatcgggttggaaagttccagattttgcatatacgtgtttgtggttttctcttacaagcctaaaaaatgctgtaatgggctcggaaacgaaagaagtgttgtgattttgcagtggcaggtcggatagttggatgccaaggtaacggagctgagatgttccagggtccaaataatgcaagtatgcagcaacctggagaagcaattcaaaactgaaggtaccatcgaagtctatttcaacttcagattatatacccacatgactcctttgctgctattaagatgaacaaatctgtcttggagtaatacaattaaaaaaattatgagcaaacccaaagctcaaaaaaatgaaaaacatgcacagcttacaattatgtctgccttgtgtttaatacaagctttttctatgcaatttccctcaaactagaacagattgccaagtatacaatttacaagatggatgggtatctgctatacaaataagttgtgtaaaaaactaaaaagaagttgtgcgtgttatttactaccagcaattgctcgcagttctcttaggttgctagcgatttcctgaataaacatcacaccttctttgccattcctgagtgagtttatgctatgttcaataaagttgcggtctccttctagcgtcttcaatcttttgttcaagtttgagatttcttcttgaagcgtgctaagatcagtcttccgactcactgttgaagaatgagcttctttagctaagaaaacgggctcctgggcctctcttgagctttcttggcattgcagtgagccatcatctacaacgtgcattttgttggaaaggtaatcctctatgacatctgaatttgacaagtgaatgttagtactgttgttggagtaggattgaagcttctgctccagcttcgtcaagcaatcaactatatatgccctctcctcttcaaagctcactaatgaatttataccacttggtgtggtaattgcaggagcttcaagaccagtttcatcaagcaaagtttcggcaatgttttcttcattaaaggagacctgattggattgtttctctgttggtccacctgcaaactgcatcctgtagttttcgagctcagcttccaattcctctatttgttgttccctctgagcaagtagctcgttagctttagcaagcgcatcactatcatactctgcttgttcttccatcatccgctggtaatgtaaagcttccatctgcatggcagccttgtcatcctgcaatctggtaatcatagccaaagcttgacttgcagcaatcgctgaagcgttcctttcttcttccagttccttgcagaggaggtgtatagattttcggtcaagatcaatctgtcgtctcaaccgttcagtggcactttcaccttccatctcacttacagtgctaccctccagtgactccaaaccagatgcatttctctcaattgaaattctgttcgtgatgttctgcactatcaaatcatcaccacgcccatacgcacgtgggctagggcctgggtcgacccatggagcctcgagtcctctggaagccgagagctgtgacagcagtaacctcaattcttcatttacactagaagaggaatcctttccaagaatcacatcagtcaaggtgggggatggcaagctactcttggcaccaatggcaagcttgtaggcttcattcatgctaatctgagtgcttagagatggtctcctttcaccaatagtcgcgcttgtttgcggatgttcctcgatgacattgagaccctgaaatacctcactgtttggtctaatagcctgtggtgatataggagcttcttccacaaaacctaaccaaaagggttaaatgtaaggaccagtttttgaaatactgttgcttgagggaaggtagaaatcaactaaccttttgctgtaggatctttggaatttgtattggaaggatctttgagtgccgcttcatgtgttaccatatcacaagtctgttcagcctccttagcataatcttcagcttcatcaacagcttcagaactagaattaacttgtgaaacatggtcatctctaaaattaactgaaagggaaaacaggtcggaataaagaaacctttcagacatatatcttgattcttgagaaatagtcagtcctgaggtacagccttacctggatcatcatcaaccaatgcacttttctggtgaaactctctacttgatgtaacagtaatttctgacctgtgaccttccagatcatctgacatttttttattgtgatggggggttagacgaacaggaagaaaataccattcagtttattgttaaactatgattaagatatacctattgtgctgttgtgctctgaaacagcaatgttttgttctagtgttgtggactgtgatgaacatggatcaatggtgctttcactcgctccatgacatgcctcgttgtacccaagattctgaggtgactcgacacttgatgcaactggaacttgggaaacattgacatctgcatgattatctatgctattaatctttcaaactgaaaaagaagttcagtaggagtcatcccagtttggggaactaacagttacctgtcaaacctgactcttctttgacagctaggggatcatgctggcatgtctgtttttctaatgaagcatcttctgcttccatttggccctcaccaattatactatcaggatgatcatctacaagaacatatggcaaggatatatcatatgagtcaccaacatcggtttccatcggaacattcatttctaatggcctgaccaactcagtggaagaagcagcaaatttctcggcagtggcatcttcattcaaatcttcctccatacaattggttttatgatggtgtgaaattttgccatcatcagcacagggagcctcatcctcggagccagatgtcatctgcagcacactgtatcgttcatggatggagtgatcactctggtgacaaatatctttatccaaagatttatccacttgatgaagtatggaataatctgtgcaaatctttggtgagcaaacagcctcagcaggttctagttctgtgatcattcgagaaaacattgtcggtctctgttgtgtataatgctgtgcacaacatgagcaaattcttgtatcatgggaatataatccttgattactatcaggtagagtggcagccattgttggctcatcggtgcggtcatcattgttttctacaagtgagtcactgcatctctcacacatactttgggcacctgcaagtttctgatgtagacggcagaaggccaaagatgagatctctgacttgtgagttttgcagatcaattccctgtagaagcatggtttctcattacccaggacatggtctagccttgagcagaaagggcacggtgccggtaatctgcagaggcgggcaaatctggtgaccaagaagcaataaaccgcatcgatgaacagcagcagcatcaagatccactcgagcaacaccgatgacagtgtggctgacaatctccgtaaggttggcatccttgtacccatctttgaacagtatgctcaattcttcacaattgctgtactcaagttctttagattggtgaaaggtggctggtgttgaaccagaatttctgaaggaatcaaaaacaaacttaatgagtgaagtgtataattgatcctactaatgagtaatgatatgctgttctgaataacatagcaactactcatcaaaagctgtaaacatcaaagtttggtgggattaggacggccttttatctcattattgagcactgatagaacggtaaagtaatgatggcggtgtcattgtagcggatatgcttgattttggtgaactaaaggcgagcttagctggagaaaagacaggaaaaccgaacaccaggttggaaaaccactagaaaacagaaaatcaaaagcgtccagctctagcagcagccataatggtgatcaatagacccaggaccaagagaatgttggaagcatcagtccaagtagtaattgttacaggacaatttcaagaagcattaagaacagtgatgctgcacagaagagctttcttttgaatcccacaaactccgatgatgaaagaacagctcaaactgtctcttttgtaaggggagaaagaaaagaacctctttgaaagcttgaaaaaattttaacaccaaaacagactaaactcttccagaaaccacccagcaacagaacaaaatccgatcaaacaaagagaacaataagcataaagctaagcaacctagcactactatagcctgcacagcggattcccctataattgactagcctctcccatgtaagaacagaaaactcagcaaaatcacaccatccaccgggtgtgctcccgagctctccaaactacagaagcaacctagaacccgagctcaccaactacagaagcaaacctagaaacgaaagctaaagaaagcaagggaagaagaagaatgttccgaggatcatccagcaagaacatacatacctgcaagctgcagcggggtcgccgcagcgcgctgagccgagatcccgatctgcgatcgcggcagccaggcaggcaggagcagagggcaaaaagagagagagaggagacggaaaaggttggcatgcgccgaccaaactcgccacgcctgagctatattattcccacccgccggaacgagccaaaaacgaagggaagggagacaaagagaggaagcaagtggagtgggggcggcggcggcggcgggggtgcgacgcctcgccggggcggggccggcgggcggctcaaccgaaagtcggctacgcgggccggcccgggacagcgacgccaccccggtcagccagccgaaaggtagtatggttggctggctcttccttctcgtctcctcgtaatactgtacaacatttgtattttggaacacgaaatttgtttagcccttgtttagttataaactttttcttcaaacttctaacttttctatcacattaaaactttcctacacacacaaactttcaacttttccattacatcgtttcaatttcaaccaaactaaacacaccctattcacgggagatgtgatgactactactccatcattttgtttatttgagaaataagctaaacaatatatttgtaaaggaatacttactatgtcaatataagagattttaatattttgcttacactgtttaaccattcgtcttattaaaaaaattagaattattatttttttgacttattttattatccaaagtacttttagcacaacttttcgttttttatatttgcacaaattttttgaataagacgaattgtcaaacagtgcaagcaaaatgtcaaaatcccttatattaggggacggagggagtaataatttgtaaataaaacttttaaatacgtgttttaacgatctaaaagcaaatgctaaaaaataaactacgatggaaaaaccttaaatcaatgaaattttaaatttcggctgataagtataagagtcaatccattttatgccatcgacaaagcgcgggtctacagtatgccactgacaaaactcagttctacaatataccatcgaatgactcattttcttccttatatgcaatcgacgttagtcaaccgttagtcaaccgccgttaaaagatgaaaaatgaccattttacccctagcataaaattgagattttgcataatgccatatcgcggtaaaaaatcttggatgataaaaagacaagcaatttctatttttcatcaatgagaataaatagtggatcatgatcagtgaaatcgatgaggatgcatcgtaccctaggggtaaaacagatattttcttgctcttaacggaatttgactaactgttgaccgccggcgatggtatgtaaggaagaaaagtagttattcgatggtatattatagaactgagctttgtcaatggtatattgttgaatccatgctttgtcaatggcatagaatggattatctttataaacataagcgaaaagataacatcgcacgagtttaaggttatgtgtatttttaattgtttggtgcaatttttttaattgaatcgcacgaatttcatgtgctccgaagagtgaatcgcgtgttaatatggtttgactgtactggtctcaacgtacctccggatgtagtcaacaatgatgtagattgttgtgctgccggtcgttgctcgcagactatggagttaatcaaatagtaaatcagctcatattacctttttttgcaaattagtttaggccgttttctatcgtacagtgtcctgtttcaaacagtataatacttgttggatactggatatggtattctatcagtatgaactaatatatattagtactagttgatatatatcagtatatataaggctgatacccgttgatgacatttgatatccatcggcatcggttggtgaaggttttattgtgagcgtgggacgcgtattgttgccgctcaggtgatgtatatgcatggtgcatttccctgcgattggttgcaagtggagggtgttaggcagttggctctcgatagtagcacctaatgagcaaccaaacctttctagttaatatattatgaactttcattatttttcaaaccttttaaaattgtaattttacgaataaacttttcctaactaaattttaaactctaaacattttgatcacgtcacatcgccttgtgtggcaaaataaaattgtcataccccccgctagactggtgtgacgaaacaatactcacttttggcagactggcgtggtcggccaaataaaacactggcacaccagtcagttcgacatggtctttttttgtcacggttgacgtggtcaaaatgttcatattcgaaaacaagttttgggagaatttattaataaagttaaaaatttaaatggttcagaaaaataaaaaagttccttagagttccaagtttagtatacgcatagactcatgtaagcatgataattgttgatatggaaaaatatcacctgatgcttcatacaattaaatattctagcacacatcatggtttcccaaaccaccgaggccggggttaccgcgcggtaaccgcggtaactgtggaaaactgtacgaaaccgtgcaaaatttatcaaaagttcaaattatttttaaacttatttaaatttaagaaggttaccatggtttttctattatcgtacccgcggtaagtccggtaaccacggtaaccgcgcggttaccgacggtaccataaaccttgtaacacatgcatatatgcatgaaacgtggtgaatttagttatacaaatattcaaataagagttagcgagtcaaacttcaacattaatatttcaagctttaattaaatcaatggctattacatcgtttgtaaaggtgttaggtgcttagggcattagcaatgcgtccttaatctgttatacctgagctgccaaatagactaggaacttcaaaagctacaaggttcacaatgcaatgtgactttaatctggacacataaaatccggagacaatcatggaggctactcaaccgacagtgagcgtgacccagcccacctcgtagtcttgtagcctcaaactcatcgcatctatccctttgactcgtcgtctccagagccacgactcctcacattgcatcgcattcccctcccgtgacgcatcgccttcctcgcctcctcccacgccacctcgccgacgacagccacggctgtgccagctcttgctcccggtgtcgatccacagtgacgacgacctccgcagctatgcctgctgcagctcccggcgtcggttttgccctacttccacggcgagcgaggagaggcgaagagcgtgggaggcgaaaaagagagcggcgctcgcgcgggagggaagggcgagcacggagagcgagtatcacgcgtacgcgaggacgaccaggagggcaatttggggatcgagggggaaatcgcgccgggaggaacggcgcggcgaagccacggccttcccagtgcacctcaacctcctatccccatgccaccgattctcaatccagccaaagcacgggtgcctaactttggtcacgcgcgcttgtgtcttgtgggcccaacgagaaacgtggcggcgattttccaccgttcgcatacgtggaccgcccgggccaaacgacagcacacgacaccgtgaatggtcttatcgtgaccgtggtatattctaacctcttattttaggtaccactgtctactatgacaacagtgatggtcgctatctctatttataatttttatgtgctttcactagataatatgtgtgaatgacatggcgtccacgaggtatgtgacgataaatcccaaatccagaacatggaaattcaaatccagggacaagacaatcagcatcggaatggccaaaatgggggaaaaaaaccagcagaccagctcattgtcacccacatccctgtctctctaccctaccatggacagctcccccccgggagccgcatcgggcggccgtcgttacccccgtcgccgacgccgcgcgggccgtcggatccccgcgcaatcatacacacgtgtcgccgtcgccctcgtcgtcgtcgtcgcggccgcctccgcggcatccgtagtactagtaaaatgcagcgcggaaggcggaaggaggcggacccaaaaaaaaaaaaaccgaaagaaagagggtagcggcctccgagcttgtgtcccaggcggcctctacgtggctcaaccaccgcctcgcgttccgcggccggggggctcgcatgcaagcctagctagcttcacattcccttcccttccccgcattgctgcgagcgacgctgcttctgcttgcttggttcgcttggccgccgccagatgcgatcttctccttcctctccgatcctctccttggcctccttcctcccgttgctagctcgtgcatggtggcttcttcttcttcttgcgccggtttggtgatccttgttgcgccggtttggtggtgatccgatcgaggacggaggaggagcgcgcgggggatccggtgatgggagaaaagctgtgaaatgagatggtggtgatgcgctactccccgaggtgggctgctgcatcacagattgatgattgagtagaaatctattatactacgtcgtcttttcttgtagatggtttctttgtgctgtttaatctgctttttctgtagagctttagtttttattttattttatttttacatatcacgtagaaagattacaggcttttttttagaaggtgaaaaattgcaaattttttgaaagaacgaaaaattgcaaattgagcgtagatgcatttttttactctttatcttggtcgtctgatccatccacggattcgtttgggtctagctaagaccgaaaggtatcaagaagctgggaatatctgcttttttggacaaaaagacacaacaagattggagtttttgcatctactagttcatttattaggatagttcgattcttgcatatgagtggaaaagaacttataatagactagtcttgactcttgactatgactcttatcagttagatggatgcccaactgcgttgttattatacagcagtataagaaaaatatgtacttttgtcatttgtaggggaactctaatttataattactttctaccttgcatgtatgctatgatatgaacagaaaattttctttttgtttatctgttaatcttttcaaagggtcctatttgatatgctccagtgtaaaagaaaaacagactcatgccatatgtcctgcaaataatcctattatcttttagctaaaaaaaaaatcctcttatcttatagtctactgaaggcatatggtggcattcaggtgcaggtgtaaatgcagtcataatattcggcatgagatctgtctctgagctggtgtggtctccggatgagggtttgagcattaaaattgcagcgtccagcttaagtacaaggaaaacttctcttcattggaatgcagataccttgagcatagtaatatcttcacctcaacagagtggtgctggggagagtggtcatatcatagatgctacagtagaagacgcagaaaagatgccatcccagttacgaactcgcagtgacagttcagcgagagtattcatgtctagcccaagtagaataagaaacactgatgctcaacaatctacttctataagatcacatgggcaagattcaagtaagtttaaaagacatgaaggttttgagtagttcaaaggcagtttgttgatgctttgattttattggcctaaggatctgcatttatcagttgttgttcgtcttagcagcacaactttttcaggacaaatctaacaagagtactgaattaaatttttgaaaaaaaaaagagagaaggaaactgctgaattaacttttcaagaaaagtggagactgctgaaattagcataatcagcacaaattgtaaagcatctctactgattgtttgctatgggcatctgttacctattatccaaatagaataaaaatcttatgggttttccatttctttcattggatggccatttcctcacttaatgcctggcttaatacctgtagaatactgtggtgggatggatgtgatgaatgaagggaaagaaacgtctgacaacttctgtgtggataagctggagaaagaggacgaagtgggtagctgtcccacaagatactgcaacgatacttcccacagtctaggtaatcaattaagaaccatgctcttttcaattcctgacagtggagaccttaccgtagcattttacaggttcagcttccagaaaagaggtcatgcctattattgctgaaaaacaggctttctgtgcaactactgtccatgatgaaagatcttgggcagctaatgcttggcgtgctcgattagtaaaagcaattagtcagaaggactctgttttgccaaagaatgcagacaatatacattcaacttcggcctttgggagcattggtaatacagaaaacatgcctggcaaattgacaagtatgctaggtaatagaaatgacagtagccaagatcaggctatgcaggaaaagcataggatgggcttattgttgctagatgtgagtccgtgtctgctgtgaatcctgttgctagatgtgagttagcatctggtgttaatcctttagcaagacatgagtcgacatccggttgtaatcctagaaagctcgagaaggggaaagaaaagcttatctatgatatgagtaattgtgttagcaacacaaatgaaggtgatgacagcaatgagagtatagagagctgcccaagtacaaaagctccgaagcggaagcatggtcaattttctgcagctgagatgacgtctggaaataaaagatgtagaagggaagataatgagagttcttgttcaggattattccacaaaaatgatagctctttctttaactggatgtcaactctcactaatggagtaaaggtgtttgatgaaactactgctgttccacttaatcagaagttttcagcagctacaggagaggaatttccaacaaaccctgtgccacttcaaaacaactgtggtgttccgctgcaatccgttggcttcaattctctttttcaatctctttatagtcagaatgttatgataacttcaagaaatacctgtcaccagtcagaaagcagttacaccgccaacaggctaacactgggtttcaagagtagcaaaccagttagcatgggcagagaaactcttaatgtggctactgagactttagctgcgggcagaattcaaatggattcttatggtgacagaggggcatttcaaaatcaaatgggaattttccctttaagagcagaaagaaatcagaatgggttccatggaagctcttcaaatgctgcatcgggacataaagatgatttctcagaaagcttatgggtaagtagacttttgccaaaaacacccatgaaagtgatggacacaacgcgctgtgatgaagaaactgatttttgttctgctaacccaaaaggtttaggtgatagttcatcaccgcaggattttaatgtggagaaggaattaaacaattcacaatactttactagcaaaggaagtgacaatgaaactacaagtagcaaatgtgcggcgcctcaagacgaaaataaaccatcagaaacaatggcatcaatttttgctaaaagattggatgcgcttagacatgcaaatacatcagcagtacatgtggccattacatgtgaccatggaacacccaaagggcgtaatcacaaaacaagttcttttgttgttagttacaatagtcatgatgagcaagaatctggacaaaaaactcacaagtcttctggtggagaaggaagaatagttttatggacaggtgacaaaggtaaggaacaattatctcctgggaatgacaaagaattaggagaaaaggttttgtctaagcatgaaaatcagaattgtgaagggagctctgatggaaaggtggtaccccctaaatgtaatttagaaacaaacacatatattgaagaaattgatcggaagagactacaaaataaagaaggagcaccaaattccatggagaatcagccagataacaaacaaatggtaccttatggtattgtgcccaatgatgtttatgacgaagcaagtgtagtttttggagccttgcagaggctccgtttgtctcgctccgatataataaggtactctaaaggattttacgtatcatctttgaattctggtacttaatcatttctaccttctatctaaatcatgaatgcttgggtttggagattccataacattttctacatttaaagaagggaacatcgaaagaatcacattaaggaatatttcattgggcaacagtaattctcatatagcttcatatggtagtctgctgtttttcagttatcaagtacttcataggggtgactgggaaaagtcaccgagctactgagcacataaaaaagttaccttctatgaaaaacgacatgtgtctcggctactataaagtagaatatgatacatctatttaaagtgaccattgctaatgagaaaatgaataatgagttgtaaaaaatgatacatatgccttacattcccctaggaagccaaaggtgccttaaaattaaaatagctttgagaaatattattgaaacagtgtctgtagtattagtaggtattttctctagtttaatactaatatcagtgtgttctggacttctgttcattgatcaaattaatatacataggggtatccctctctatgtaagtgatctccaagttagggaaaatcctgagaacctgatatttaattcatgtgtttgtactactatttcttgacagatggatgaggtcaccagttatgcacaccaccttagatggctttttcttgcgtctacgatttggtaaatgggaggaagcattgggtggcactggatatcatgttgccaggataaatggtaaatgactaaacaattgtgcataatatgttgcagaataatgtgttcctttcttttttaaaaaagaaaaaacaattagataaaaggaaaaggaagtgatatgccttctcttacaggagtactggataagaatcgcctttctgtgaccatcaggaattcaacttgccaagtagattctcgctttgtatccaaccatgacttccaccaggtaatgtatcaaaagatagtactgttgtccaagttgttatggaccacggaacaacaataaaaaaaattccaagtcaaatctttttttttcttggagggaattttattgtttataattcaaagtctaagataagtgaatctcatcttttctaggatgagctgaaggcatggtggtcagctgccatgaagagtggctggaaactgccttcgcaagaagaactcaatacgaagctacgagaaagagagctgcttcgtttttgaaacggaaaaggcacagacgccccagctccagatgacagatgccaacatcaattacagaggtttttctcttgcttgcctctggtctgaaaacgccagcgatgcaagcatcatcactaccggtcaggctaattaagttctgcactgtactgctgggattgctatccccacggttgatggtatattgagagagaaatcaggctgccgtttcgtgccgtggcgtaagcagcttgtattgtattttaagtacacgatttgacgatttgatttttacgatcggatgagcagttgcacgagttgttaactacttattgctcatcctatctgctgtaaataggaagctactaacagtcacagtgcagtgcaatcgtacaatttgtactactgctgctgctgagtataaatacttcctgaaagaataaaaaaagttatgctggctgccaatctatgctgtgttgggctgggcacctatggttggaactcatcttggacgtaaatggacgtaaaacgacgcaactcatgttagtatgaattatttaagtatcataacttttaaaatagagtaatacaattttctgaagcaatctttccatatatatatatttttttaaaaatacagtttatcagttcgggaagcataagtgtgaaaaacaaataaatagaagttgggaaataatatattcggactcatggatgatagattgacgggtgaaagtaagtttagaaagtataatactagtattttttaaaaaaaaattaataaatgtttgataaagaaaattttctttaaaaaacggattacattatccaatttaggagctgtttagattttagccaaaataagccttactaaactgtgttaatattaccaaaattttgacaggattttatatgtatttatcaaagtttggtatcaatctaagggcccttttgatttgtaggaaaagtatacgagatttggaggattttaatcctatggaaaatatttctatggaagcttttgaaataattgattgaatcctattctatcctctaaaattcctatgtaataagtaatcctatagagattttggagaaaagttagcaagaggttcaaactcttggaaaaattcatttgagtctatctctttcatccgattactgtgttttttctgtggtccaattaaacggtcattcttgtgtttttcctgtattttctaatcatctgttttacacttatattcctgtcaaaatcctacgtattttctattcctctgtttttctattcttgtgattcaaagggaccctaaatgtaaatatttttttagccactttacttaaaaaaatgacattaatctgaactgtcccttaatagctcgagaagtgtctccacgatgacggggcctcacccttgagaggcggagatcacgcccgataccgtcgaacggcgagcgcggccgcttgcgctttggcatcagagccgcgcgcgtaacgcataaaacggcagattagtcgtctgcccgtgtccgtctcagctcgagaaaaaccatcgaaacctgacgcgatgcagcgctgcgtacgtgctgctgcgacgcgacgcggcgatctttaccttttgcctcgcttctttcccgcacgcgcggctcgcgcatgcatgcacgatgcgtatccccctcccgcaccggtccctaccttagctccctccaccaccgcacacttttggatctccctcccctgctccaccctcctggcctcaaactaacctgcatcttcgtcgacgcgcgacgccctagcttggcgcgcgacggacggatcgatcatcggccgatgcatgcatgggcgcctgtgttctgagccagcatgcggccagctgcatcgtcgtcctcctcctcctctcgcgaccggctgacgatcagccggccgacggagaaggacgacgtcgtagaagagaagagggacggcggcgacgtgacggcggccgtgccgaggctggcggtgtacggcgccggccgcgtgcacgagatcgagcggttctcgcactacgttggtacgtacgtacggtttctctccatcgatcacctaattaatttacgttactttgtttttgtttgaagccaaaccttaaacgtacgttgctcttctcacgttgttagccagctagcgcgtcgcgtcgtttctgaattcttaaattccatgagacgtgtgctccgatagtccgattcttataatgattttcattgggatcagttttacattcgtaagagcaagtttaatagcataactcattactatctccaaatcatatatagaaaatacaatagtcaattcatacaatagcgcttactatactattaatacccgatctcacttgtcatacacacattacgtcttgaagccgtgctgcagctggctacatatctatagcctgctgtttttctctctctttttttatctctttaaaatatgtttatagttgacttatagcctgctattgtacctgctctaacacatgaggcaaagaagcaaagctagtggaaaaaaaaagggggaaacttgaatgcaggtaaagcgactttggagccagtccatggacgcatcctctgtatcggattcgatgcacagagttttgcatctgaacattttggttaagctagctgtagtgtaaaaagttcacatggaccaaaacattttattctcaacacttcacaaatgcaatagaaatgactccggctcgggcgcctgatggagggtttttaaaatcgggagctgatttcagcatgacatcagcgtcacgtatccttgcaaaaccactttaaattgatttttctcttaaattacttacccaaattatgatccgatcgcactattaaattcattacaattaaaatttcaaaacaagaccacacatggatatattccgacgaaaaaatagcttattattgaattatttttaaatgttgcacgatgttccatcaggtatatcggaattgtttcactaagtagatcgaaaatgtttcactcgtttaaatcgggtgttgtttcaccttatataaaaacaatgtttcagcaaatagcgaaagaatgtttcagttcactataacgttagatctatgcatagtgaaacattgtgagtacactaggtgaaacattttttatggaacaaaaaatgaaacgaattcccataatagagggtttccaaaatatgtaggtgatttgttgcaatagagtatttcagttcactgcaacattagatctatatatagtgaaacattgtgagtgcactagatgaaacatttttttggaaaaaaaaataaaccaaattcccttaatagagggtttctaaaatatgtggataattaatttgttacaatggagtatatgttgcaaataagtggcaggtgagagcagagacgtggtgaggctcagggacagagagcgcgcgtcgtggaggagggagcgcccgatatttctccctcccccgagcgaccgatccggggcattccccaaatgcaatagccattttttacgatcatctgtaatagtatatcgtacagttttgtagcgcccgttccgtcgtggcgcctagcgggaaaactatctcttaaaaactctatttgcgaaatctgtttctttgcttgttgtctagtgtccgtgccatctcagatctcaaatccccgatctatcgccgagttcaatcccgaatccaaatccttcccaaatcaattcctccgcaaaagtctattttgcctccccgggttcgatgggccgaatctctctcggcccatctccccctccctccccgggtctctctctctctctctctctctctctctccctcttctccgctctgcccgcccgtcgcgcgcgcgtgcgcgtgagccgcgccgagccgagccctcctgcctcgcgtgcgcgcgcccgcgtggccgctgccctgccgcgcctgcgccgtctgcgccgcccggccccgctgccccgccgcacctggtggccgaccgcctggtcgccgccgccgtcagcctctgccgcgtctgcccgcgcctccgcccgtgtcgtcgccccgctccaaaccgccccgccgtcatcgccgtcgtcatcgcccggcccccgccactccgcgcgcaagctgccaagggacggaggcagagctcctcctcc

SEQ ID NO: 6587 - DNA, 11000 bp, Oryza sativa
tcccaattttgatggagctgaaactgtttggttgagctccagctccaggaggggtggagctggagctggagctgtgctaaacaggccctaactacccgggctcaagctctgagatcgtcacgccgttcgctgacacagctggcggctgccctcctcgcgcgggtgacggccgtcgatcgttgtagtgatatcaccgccagaacggaggcgtcgtccaccgagcgtggtctcacttacgatagcaggagcagtacgccggccgggatcgagggataacctgcatgccgcgacgatgtggacgtggagtggctgtgtcgtccagcatcagcgccgcgcggccgacgcgtcgggccggagccccggttaaatttcttctgcacgcagctgagcatctcggcacgaggctactccctgcccagcgacgccgcgtcgccgacgtaccgcctccgctataccgatccggcacctcatttgtcacatacccgtgccttcaggcacgggaggggagaaagggtgtgcatatagatggccatatggcccacccggcacggcccggcccaggcccggcctaggcacggcccgaggcgatcgggccggcacggcacgcctggcacttcgtgccatgccgtgcctgcccacgggctgaacctcaggcccaggcacggcccgacagcagtcgtgccgggtcgtgtcggcccgacggcacgctgagcccaccgtgcccgggccagcccaggcacgccaaacactaactgccacttgttcacttcagttttgcacatacatatcgaaaatgccatgtccatcacaaaaatcagcacaaaaccatccaattcacaagttaacagatcacaatatcacaagtctcagattacaatatcacaattcacaagttatatagtatgtgcagtatgacaattcaattcactaactcaacttctaagtctcacagttcacaactcaagtcacaaatccacaatcacaaaacactttcaaatactaagtctaacagttcacaaatcacagttcaaactcaagtgatcagtcacaaacactttcaaaaataatagtagctgtgtagtgcaatggttgcctcattaaaaacctttctaggtaaaaactcacacctcgtgagaaaaccctagaaaggaaaaagagtgcatcccacagctttcatctaattatcacattaaagtccaagtccagtacaatcatccagttccagtggcactgccactggttacatcatcaagacataaattctcaaacgattttataagctctacattctcagcagtgtgctgcaacttcttgtctgcctgcacccagtccttgatcaatgccaaagcttgcaccatgttaggacctagacgtcgtcgtcgctcctcgatgatcctgccagttaagctaaaagcagactccgacgatatagtagaaacaggaacagtcaagacatctctagctaatatggacagaacaggatatgtgtgtttgtgctcatgccaccagtttaggatattgaagtcatcgtcgaattggttgacagtgtcactatcaagataggcagacaactcagaggcattcaagttagcattagaagaaacagcctgaatcaaagcagtagcagaagttctcctggaaaatggaccagcaccaagtccagaacctggactggcactagcaccaagtccagcaccaagtccagaacctggactggcaccagcaccatgtccaagtgcatcactggcaccaaaaatctttccccaggctatctttttcttaccagcagtacaacctggggttattctttgcaatctcacagcaccaaacttactttcatactaagagaaaatgtcagacaatgcagccctaacctcagttaaataagtagagtaatcagaggtcaaaatttgtgacataatttgtagaacattgctaaaacctctgatcttagccctaggatccaagataaaagcaaatgaatacagaaatggaatctcagaccagtatgccaagaacttacttttcatgggaacaacaacatttctaaagttattatcattctcataagtgttaagatgtccagcaatctcaagaatgtgatgcataattaatggagatgttggataataaacaccagacaaaataacagttgaatcataaaattgttcaaggaataaaagcacagtttcaacaattgtccagtgcaaatcagtaagcaatagtctaccattttccctaggataatgagtttcaataaacaatgaaaaaagctccttatgtgggaagagatgcttgagcattagataagttgcattccatctaacatccatgtccaaaccaaacttacgaggtcgaacacccttagcaatacaccagtttttgtataaagcaatgcgctgattagatgcattcacaaatgagatggctgttctaaaatcttgaagcatgggtttgaaaacttctagaccagccttaacaatcaagttgattatatgacatgcacagcgctgatgcaaatataaatcaccaacatatgcagacaacttaggttttagaaaatccattgccttagtattagaagaggcattgtctagagtaatagaaaaaaccttatcagtcaaaccatattcttcaacaacagaaagcacacgttcagtaatattctcagcagtgtgcttcacatcaatcagcaccaaacccaaaatccttttctctaattgccaatcagaattaacaaaatgagcaacaacacttaaataatcctccttagcattaccagaccatatatcagatgtcaaagcaacagagttaacagacttgaacctctcaataagcatagcacgactcttgtcaaagtacttaaaaacatctctactaatagtttgcctagagacagcttggaatctagggttatgaacattctgaatgtactcctcaaaagtaggagattgaccaaaattcagtggtagatcctctacagcaatcaatttaaccaactcagttctagcataatcaggatcatattcccatggacgaacagtaccatcagcattgagcttaagcatagactgtgacaaattactagcagttctaggtttgcatgacttgagatgcctaagcaaatgaccagtgccaccagatgaatgagcagacaaagttttttttgcagtgattgcatttagcagaaatgcgaaccttcgcgccattgcgtgattcaaagtgttcttcgaagtcatcccataccttggatgatcttggccgcttgttggtagcactggagtcggtgccggacaacgcgcctgagccaccatcaccgtcaccgccaccggtaccgtccacgtccggctccgtctccggctgcgacccatcgaagtgaggaggtgacgaagtgattccgaacacctgcacatgttcctcctccaagtcatcttcgtcatcaccccgcatccccatcaacctcaactcgtggttgcaagaggatggatcgtccatcgtcggcactccggttcctcaacggcggctaccgctcagcgacctgcaagacacacagaatgagagaagagagcagttagggaccggagagaagtagaaaaccaagagaggagagaagagcagagataggtgtgtacggtgtacctgcgcatccggagcaccggagttgccgttgatgatagagatcgacggatctacgagaagaagatagcagagactgggtttggggagtgatgtgacaaagagctcacggagaaacggtgagcgggcgatagtggcaaaaaaaatgaaaaagaaagaggaaatcgagagcacggccaacgatccaaagactggagaggcggagatgagacaaggtcacggatccggcgaggcagcgaccctcggtggtagatccggcaaggcgttcatcagagacggcgacggagagggatggagagatggaggcgtggtcgcgtggaggtggaggcgtggatcgacggaggcggaagcggaggcggagcggtcaaggcggaggcggaggcggaggcgtgcgtggatcggcggaggcggctagggttagggttagggttgtgagggaggcggactggcggaggcgagaggacgcggtggcctttatatatgaggcgtgggcacgcggcggcggctcccgatgggcctcgtcgggccgtgcctaccgttatacaggcctgggccgtgtcggcccatcgtgccgtgccggcccatcgtgccgtgccggcccagcgtgctgctgcgggagcctaggcatggcccggctgtcgggccaggccggcacgggcacgaacactgacgggccgggccgtgcttgggccgggcagtcgggctgcgggccatatggccatctataggtgtgcagtttgtaacagcgtgtagtgaggcgtgtttcatctacagggtactagtatctactggtgctgcttgatttttgtcaggcgtgtgcttacgtagctcagcaattttggaccgtgatgggggttggcggcatcggtcttcgcatgagcacaatgaccccgaaggcccgaagcagaacatgtccgacttggtggacacatgcccgcacctactgcacgaacaacagcggatccagaaaaaaatagcagtatgatctgagcaaactatataaagttatagtccaccaacccatctacgtatggtaaaaaaatttagtggggtcttcgtggaggttctcatagtcttcacacctgtagtgaggctcgagacaccactgcccccatgctggatccgcccctgtgcacgaatcacaccatgaaaattacttagagcggatacaataaactgattcagcatgcatgctccaaaatacgacatatcatcttattcttatatggatgggaaaaaattgagaagggagagaaaagtgggcgactaatctggcgccggtgctagcacggcctcacacgctcatgcagccgtgaagacgattaagagcaagtttaatagtaggctgtaaaccgactataaatttatatggaagaaagataatttaaaaaataaagagggttgactcttatacaagagctagccattcacatacttcaagataaatacattaaatgcaaaggtgagagatagagagaggaggagaaaaatagagataaccttatggctgatctactatatatgttaacctaatataagctataagctcatacttggctctattattaaacttgctctaacagcatttacaatgctccacgctatacagtggccaacaattttcttttttaattatttttacatatattaacactaaacatatccaacgtgtctcgagctctcaagctactactgtactcttggacttcgatggggagagccatggctgcggtggagctcggggcttgtcacaaagacaatggtagagttgaaggtcggtggagaatctagtacatggaggttaggtggggtgcctacctcgtgaatgtgggggtggataattaagctcatgagacgacaacgaacaatgaatgagctcggggatataaagctcgatgtaggagatgcttgagcttgcgagctcacctctgcgagcttgtggaggaggaggtgatggagttcgaggatgtagagagttcatatggagcttaacgatagaagctcaacaagaagacatagtggatctggagcttatctgcaatgataagacaatgattagaaccatgaaactcgacgaaggagcttaacacgttattagaactcaatctcacctatgcggagtctatgaagcatgaggcactggagtttaaagaactgcccttaccgtcggctgatatagtcaataagtaagttagctggtaaatggggagtatataagatagtcctgatttgtcggcttgtcattttcttaaaaaactttgctagactgtaagattagtttcacgtaagtggaaatcattccgatttagatgaagggatataaattaaaagtttttgggttggatagtcttctataaagtaaaaaaaggtggagtatgttttaaacaaataaaattcatgagattattaaatggacttatttctttggtcgtagtattattttctgttggcccgtcttaagttgttagaaagagagaataggatagtggcaagaggtgtgtggtttttttttcttaaactccaaatctcttttttttttcaagtcgtcgaaagaaaagtcgttaataacctgaagagactctcccaagacagaaggagagaaaaataatgcactcgtgtaacttaaatagtgtagtttagcaaattcgttaaaatccccttttgggaatcttcggcctccccagcggcaggcaggcagcgcggcggcacggcagcctctctcccctcctcctcctgctgcccgcgtcccccctttacctcgcatccgccgcggatctccgcctctcccgccatgatggacctggatccccgcctctacgagaacgtcgtaagctctcattctacctacgcaccctgcgcccttcctccccacctcatctttgattacctctcgcaactcgattgctttaagtattccttgttggttagtaggtaggttttctaggaacccatctctgctgttgctggaggaggggggcaaagtaggtgctttagcgaatcttgtttgcttcgagcgctgccattatgtgcccctgcttgatcttttctccgtctgggtgcgaattcggctttcttgtgtaggttggatccgtttagtggggaggatgcgatggttagtttggttgtttgggggtgctcatgctagggcttttggtgaagaaagatcgggaatttgttgataaggtgcttgcagtgcaaaaaaatcggtacttccacgatgaggtaggttgaagtggtcaaatcaggaactttcttcattatgtgtggcttctagtgcagaaaaagataggattttactgaaatcgggcggaattaattggcatgagcgctggaatccagcagaatgaattggcattctactggttatgacttaggcggcatgccatgccatgccagcaaccacagcttaacgtatcattctcttcggcaatactccagggggaaatccttgttgaacaggttgtgctgagtgtaaagtttgaaccaacagtgcacatgtttctctgtcatgtatttgttgaataagaccttgggatactggagcattttagacagtagtgcccatttggtaaaatctaggtaaaaggggtatgcctgatatttttccacaaattgatgtgacaccaaagctagcgaaaacgtggtgttgaagtcttttctgttgttgccctaaaatcagatgctggtctgtgctatctgctcatagatacttctgcatttatcatcgctcgattagcatcaaatcattattgacaatgctagttgcatgaatatgccatatttttttgtttgcatagatcataaatgtagctgtgttcattaagcaagtatataataatatcactgctgatattttccataaacagaacctacttataactgtcatttgtcgaggcttgaaagttttcttgttctaaatttcggctaacactggatgtctatgtttaccttcgtatttattgaaggtatatactgctattgacactaaattttcattttttccagtccgtgagtgataacgatgtccgcaacatagtgttgtcttatcttatgcacaactgttttaaggagactgctgagacattcttatccagcactggtttggaactgcctgttgattacactgtagatgtagataagcgtaaaggtatttattcacatatcaacactgaatcttgtatctttctttggatgttcaacacttgtaaaattgctgcataagcactttatattgttatgttagttcatttgtatctttttatgaatgctcatgtttttgtttgtctacacaatccttagcagcttccctttcaagtttcatgctaataaaagatgtgctctcagctcacttgttttagggacaaaaaggctgtgctaacgacaccgttcattagctgaaataatctttgtaaaatcaacccatcaatggaattgcagcataatttagctagtgggacatggagtcatttcagttcagtatagatgcagtttttgtttacttgtttgttgtcaatcattactgaacttgttggatgtgatctctgttgcacataattgcaaatgcaagttttattgaacacttactacataagttacacatgttatgaagtaatagaattgtgtatagctatattattctttagtaccttttccgtacaaagtgtaagataggtttttttctaatagcatgccattaatatagggtttatttcatggtatgactctttactgtgctgttacctctatactcctcatacaaggatacctaactttcttgtgcaacatggatttaggattaaatatagcccttagaaataataaattaataattatggggtttctggaaatttccgatgctctgttatcttggatggaatttgtaacttcatttgaaatagttggtggttaaagcagataatatggattgtatctaatctatcatgaacatgtacactgtgccagtattaaaaaatgcatctgcattccatttgtctagtcgcatgcacttgcatctaacgcttttgttttggtttctttcagcgatttttagttttgtgttggaaggcaatgccctgaaggctatagacctgacagaagagttggcacctaacttgctagagaatgatatggatttgcattttgatcttttaagtcttcacttcattgagttagttcgttctagaaaatggtaagtagctttatttttggaaaaaaaataactgtgccatgtattttggattaatctggatgttttgactgacagcacagaagctcttgagtttggtcagaaaaagttgacgccatttgggaaagtgcccaagtacgttgagaaactagaggtaacttttcctaaacctacatatgcttatattagacagttttcaggtcatgcaaattctgtcttcttgtcaggccatcaatttagagaactggcaatgatgttaaagaacttcactaccatttgttacccatacaaaagaggcaaaacaaaaatattggtcttgaaaaaactttcagtatggtgaatctagtttatcactatgcatgagatatagatttctattcaagtacttagctacttgcaaaacagtattggtacctggcacaccttcatttgccctatgttgccgccttgtagatctgatttgtcatcaaagttatgtcagcctgttttctgggctatcatgtattttgttatctttattaaatacatcagatttaaatggcagcgcggtttttgtattgcatttgtttagtaattgctggtgctatactgtcctatccaagtaccgatgctaggtagtccatcattatcaacgccggccattgggtattatatttattaaatgcaaaatatggtgaaaacgtttgaagtagaggtgccgcttaacaaaataaatatggaacatatggtgacatactttttgtgtattgaacttatgattggctgctttgtaatgctatgcttggaatactatgaaaagttaacttttgttttatatgtataggactttatggccctcctagcttatgaagagcctgagaagtcacctatgtttcatctactaagcccagagtacaggcagaatgttgcagatagcttgaatcgggctgttcttggtatgttctaagatattgttcttggtatgttctaagatactatttgctgtggtctcatccgctgatgacacgattgtgatctttgtctcatgatcaatgacagcacatgctaatcgaccagcatattcatcattggagagagtgatacagcaagcaactgtggttagacaatacctacagcaggaagttggcaaggtaacatctctatctttttcttcatctcacgatcaatcatgattctgtacggctgcatcgtatcttgttgaacatctttttttttgttcttatctatcttaattattgctatttcttttattggggtgcatgtttttccataatcataagttactacagtccacttaaacttctatttaactattggtgtgctttaacatcatgatgcatacatgacatttcaactcttggagcaggattcttacccgccattttctttgaaggcctttctgaacaagtaaggtgcaaccaatcaatcgttagaaagatcacctccagggctccagtcctatggccaccagagttcccttcagaatgtgtaaaacagttgcgtgaaagcaagcgacgggatgctcatgcacatattattcagagaaccgccttctggattaaacgatatcatcagtggtgtaccaacaatatcatctgcatcgaaagaggaatgttgtataactgttgtttcctcatttacagttccccatttcccctttacccgttgacgccatcgaaagttgtacatatcagaaccttgagctattctgtatgttcgtgcagagatatcgtcagtttgaaccaatctgcagtgcacttattactatgcctgatgcttggtctctacaaactattggtgtgttttatggcgtccatttcaccatatcgactgttccattcaaccaaagataaaaggaaagcagagcaagtgacaagaccatgggaggagaattctcaaaaatttcttagaatgtgcacttgatgctatgcctgatgcctgatgctggtttctacaaaatattgatgtttttcatgccgtccatttcacgacatcaactgatcgattcaacccaaaagatgaaggaaagcagacaagaaagtgacaatacaatgggaagagaattctcgaaatcctcatataatcagaaaaggaaaacacgggtgccaactttagttttccatcgtgaacgccgggaatcacgaaagatgagagcgagcggagggcaacaaaaaaaaaa

SEQ ID NO: 6588 - DNA, 63365 bp, Oryza sativa
tcgtctcggcagctcttggctccgcctcctatcctctcctcttcccctactctcctctcttctctctctccgcctccaccagtctccccctctccctctccaaaccctccatagctataggcagcagctgggggtgctggcggcgttgaggcattcttgaatccggcgtggtcgcttccccagatccatcttttttggatcgtttcttcgggcgatttggaggagcaaagaaagccctcccaaatcgcagaaaggagccgcctttgcgaagctcctgctgccttctctgctcgttgttcctggcctgggatcacatatccccgcaaggaaaaaaaaggagccgcctttgcatttattcttttggccccttgggagatcgccctcgtcaagatttggtgggaagtgggaacccaattcgctcgcggttctcacttctccttgtgtggaaaggcgccgctttggctcctgtttccccccaccgctcgctcccgcgccgctcctctccctatatatctatctctctgactatcttgttcacatacgcctgcgcgcctgcctaactttgttttacttcgatccatccaccggttttcggcatcccccgtctcggcatttgatcgttgcttagtcgcttgttgatttgacgcaggccagatcgctgtctggcgcttgttttattttgagttgttgcggtgtgtttgctgttcttggttggaggcatggctgcggcggcgaacggaggtggcgcggcgctgttcagcgaggaggagctgcgggacgtcagcggggtgcgccggtgcgaggatttcgtggaggtgacgtgcgggtgcaccagccaccgctacggcgacgccgtgggccgcctccgcgtctacgcttccggcgacctcgaggtcagctgcgagtgcacgcccgggtgtcgcgaaggtccgtgctcgccactgtgcatcatcagtacaccacgtcctttttgcttgcttgcttgtttgtctcgttgttcttgatttcatgtcagcgcgcgcgtcggtgcacgggtggtgtttgatctctttggttgtggcgtcttgctcccatgactggacctgcatgcaatgccggctcatgcgcctcgccgctgcctgcgcccagcgtcgcctgtttcttgtactttgtaccatgctcctgcccatgcattgctagtctggctcgcgggactgtcgatttcggcaattaaatcatccccttttctgcaatctgcatgttcatgatgtatctttttttttagacatgtccatgatgtatctgagcgtaatatcgcctgcatcttacctttggtttaggaccattaggttcctcttcttctgtggtacctaatgcacgtaagttgaattttgacattgtgtactccctgcatgctggggatgatgaggttcccctctgttcagtggctgtgttcaatcactcacattacattgctacgtctctgtttagtatgaggttttctttcgtgtgagagctagcttgggccatgttctggtttgtagttgcatgctgctctcttatgcaaatgtgtgaaattgataattgcgatcttgactccaacataggatgcttgcgtttgatgagagcggaatggaaaacttactgttgtgttgtctctgttctaatgttgttacctggtggctatattttttttgtttccgaaagctgtagatgctgcattcagtttctctatccccgatgtctgtatttcagtgtgtgtccgtactgtgctgcaagtatatttagttgaggcatataacatcagtgctatcactgtggattttacaatacattatactcctccttgaatggtccccagagtgttgattgcaatggtatgtaggtacacacaatatttgtttttaacatatttaatacatgaaccaagatagtcttgctttaatcaaatgtggtttgtacttgttctagcatggttcacccatgtaactgcagagatgtgtgaagtgataatatcataggcaaagctaaatatagcaacaacttatgactaccccatcttgtaacttatgtaccactgcacctttcagttttcaaggattatgaaatctagatataagtgtgatataacaaagaaaaattgtctagattaaaatatgcagttctttttttttttgtgataatttataatgaaggccttcaagcattattagcatgcccatttatctgggagcatgcactgtggggttatctatatatagctgggaatttctttgttcagcatgctattgctctaggtttgcatgcaactatattgatttaactatttaagtaaaggatgttgtagatgcatgtatttccaagttaactttgcagtacttgcttttactttattcttttgggaaaatctgtttccagttacatgttgtacatggcatcgctttgttgtcatatttctctatcttctgactgtatccaaatgcaagtaatatctttgtactagtatagtactattacaagcattgtacaaaatcttggtaatatatgccagttgcaactattatcatgctttttaagcgcataactgccatttaagttttgtaagttgaaatttgcagacaagttgacgccttctgcctttgagaaacactctggaagggagactgctggaaagtggaggaatactgtgtgggtcatggttcaaggagagaaggttccattgtcaaagacagctctgctgaaatactactcgctgtctcacaaatctgctaatggttctaacaaaggccgtaatggtcgcctgtcacaccgagatgagtttattcactgtacggaatgtggcaaggagaggaggtttcggctccggtctaaagaagagtgccgtatttaccatgatgctcttgctaaacctaactggacatgtgctgatttgacaactgataggtatgtactgtcaccgcttgtgttagttaacagtctagcttgctaatatcaagctatactgtttgccgagatatatgatatgttcatgtcattgttccaaagttcatgccaacctactgtcgggttcttatcgtttttctttttgttagtggtattgcggatacttcttgttaagtgttattattggagaacagctgctacagttgtgctattttattttattattattttttgctttacatgtccatcctttttttttaaaaaaaaagaacacattgacataattgctagttttcttatatttctgtgctttgttagttgatgaaattgacacgtgaactaaatattggtggtgcgcataccctttgattgctggagtacacttagtgtccatatgcatgttacttttctgagtttctcaactggtagccataacaatgatagtgacacaagttaatgaaaatccagcactccagccgcaggctttgcaatccaagatggcagcccatgtatctctagttctctctaccatgaccatgattggtattagcgtctctggtagctgcctgtttcaagcctgcaatataacaactatgaattattgatgcactgcgaaatatttatgctaattaccttaatcaatgttttgcacaacaaaattgtgcacatactccctctatctcccaaaaaaactcaacttaggaggggatgtgaccccatcccctcctaggacaaagggtagtccaaattcattgtcctaggaaaggtcacatcccctcctaggttaagttttttttgggacggatggagtagttggtaattatctgtatattataagacactttgacttttttctaagttaagcttcttctagtttgatcaagtttatagaaaaacataacatttttaacacaaaactaacttactatcaaaatatattcgatgttagatttaatgaaactaatttggtattgtagatgatgctaaattttactctctccatttacttttgatagtcatatttcatctaattctacttatcatccatctaaacatgctactagttattcctcgtaaacaagtgattcaataatatttatatttctcgatgctcatgtagctaatcttgtgtggaagaatgtagagtcatgcattaaatccaagaaagtcattaagatgatatattgttggattgaaatatacctattaaaaataattttttcagatttggaaatatgcttatcaaaagtagatagagggagtatatataattggtcaaagttcaagaagtttgatttgaaaaaaaaaaataaaacgtctataatatgaaacagagaaaaggaggggaatttagcccataaatgccctacagtgtctgcatgatcaaactgcaattgtaggaaactactaatgctttacagttaacgtattagtagtttagtactatgtctttggttttctactatctactgtgggagtagcaaagtcgaaactgctgccctgtagtgccgtctgttggaactgttgctatgcaagtttctcgccaaacacttccagatctctgcagggtcatgtactcatgcggcctgtagccacaggacacattcagtactgtatccctgtagcattcagtagcatgtagggaaaattttctaggatcgctgaagggtgctgttccttcagtaacatgagtacatgcattctaaatttggctgcaatgtttacattaaattttcctttaaaaaagaagcattgctttgcctagtgaccagtagtgtacttttatgcaccgttacctgttctgtgttccttccatcctcagtttgacatttcttggttttccatatttcatatatttgctttgttcttgtgtacatttgcatatatatataaccttgattgatcccaccagggtcacctgcggcgatgaggaggagcgcgcgagccgcaaggtgctgagaggctgctcccgctccacgtcgtgcaccggctgcgtgaagtgcgtgtgcttcgggtgcgagatctgccgcttcaccgactgcgggtgccagacctgcgtcgacttctaccataactccaaggagtaggaggatgaaacaatgcatgaaacaccaccatgggacatggtaggatgaaacaccagcatggtcgatatacccttgcagacccagatgttttttagtcaaaccccccaggtccaatgattccccggcttcactggggggggcctcctattctgagaactgagatgttctttgactagcttcttcccatagacaacaactagtaccggggaaagccggccgatttttgcttcatataatttaccaaaattctattcatgttcattttagtacattgctggggaagtgaatcggttgccattggttgaatctttgtatgcaatgcaatgcaagggggtttcggcgtctaagggtgtgttttggatggagggatatgggtagataggatatggcggcccattttttgtgggtgtttggttcctgggcaggggtgggatggggcggcccggggaggaatattccccccagatgccggatggggggatccggccgaattggccggatgcagccgcccgagcgctcgggcgagtaggggtgagcgacatgtgggtcgcgtcacccctctcaccacgaggcgagctcggcggctaggcaaggcgacgaccgtggaggcgagctcggcggcggcggcggctagggcgagccggcgacgagagaggaggtgagccggcgacaaccggatctaggggggcgccggcgagagagggcgagcggcggcgtccaaggagagagggcgagcggcggcggccggggagaggatacgaggcggcgggggagagaggaagcgcggcggtggggttgccagcgagaggaggcgagcggcgaccggcgatttcgagaaggcattttttttctccttccccttttatttctttctgcttttttatttctatttagatttttttagtagattgatatttgttgggtgagaatttggaggggtatactcaccacctgtaatgaaagggtgattgcaaccactcatccatcccactccaaccaaaaaaaaaatggatcaccatatccactttcatccctacaactaaaaaaactggatcgccgtattcactccaccaaacaaaaaactggatcgccatatccagtaaaatatagaccatcatatcccatccaaccttgaccggaaaccaaatacaccctactaaaatgcttgagctcgcgatggatcgcttggatggatgcgctccgtgagctttggtagaaatgtcgcgagcggcatgcgcacgtagcatggggatgttgtccagtgatggcgatattattcggggtccccctaccgcggcagcgctggttgcagggcacgtcacaccacccacgcggcgccaatgaggcggcggtcgtggctgccgcgcgcggcgcgcgcgccgcgggatcattcgcgcggccgcggccgcggcctcgcgctgttgcgcactaggcgtctgtctgtcatacgtcgcgcgacccccacgtctctgctgcctttccgctgtggattggttggtgttcgcgctctctccactgctgcgcgcggctggtggcccagagagccggcgcagagagcggccgcgggagtttgcccttgtcaacttgtcgcttgtccgcgagcggtgggggtgaagcgacggcgtctcccgaggccggtgtcctgcacgagtgatgaagcgacaccggcttcgtactggccggtgtgtctcaaccctggtgcgtacggacgcgctgtacgatggttcaccagctcagagacgtgccatgtactgtacgatgtggctcaccggctcagagacgccagagcagagactagtactccagtactagtaggttggtttcgcgtataagacggaacaaaaagcggttagtaccgagtacacagtgttaacgccggctcttcctgctgtgcaactacagtggagggcgcgcgtccgggctccggggtaaccaccacgtactacttgagcagtggaaggcacgcgacggatgtgacaggaggcacggtggatccagcaagagattcgctcgcctgtcagccactgtacctataaatcatttatagtcaatttatacaccaattaattaacaccaattagttataaacatatattactttattaatatttgatcccacatgtcatatacacattgcgtcttagagttcgtgctacagctagctactccctctgtaccataatataagagattttgagtttttacttacactttttgaccactcgtcttattaaaaaaaataaaattatatttatttatttttacttactttattttattatctaaaatactttaagcataacttttattttttatatttgcacaaattttttttaataaaacgagtagtcaaacggtacaaacaaaaactcaaaatctcttatattatgggatggagggagtacaaatctatagtcagcttctcttgtctcttctcttttatcttgtaatgtgcttatagttggcttatagtctgctactacatgctccaatactactagctacaacatccatcccaaataagtttatttataagtttttatgtccaacatttaactatttattttatatgaaaaaaaataaaaataataaggccctgtttgtttcagcttaagattattgtaatctagattattaaatcagattactctaagctggattataataacctgacataaaataagctacgagttgtttgtttctctagataattagaggcatctaagcgtagtgggtctttagccactcaataatctagaaaaggctcctttaagagaagattattggattatagtaatctggctttatagattataataatctagcataataatctacttgtttgttttagcttacttctaataattcatattataataatcctaagctgaataaaatagagcctaaatcgcacatacgttggacacataaaccacgaataaatttattttggatggaggatgtagctgccactgccaagatcaaatactagtacagtggtacgagtactgcaccgggagctgtggcgtctgggctggctagatgatgcagccgagtttgctgacgtgggtgagtttgtggctgacaaaactctcgcgttcgtcaaaaagttgtcataaaaaaggcggttcactctctcagcctcgcagcatcgatggtgtgcggtgcggtggaatctcgccatgcaccgcgtcgcaacacacagtagttgcacaattgaagcctgcctctgcctgcgccagcagagcatacatgtaccgatcgatgtactgtacggccacacccacacgggactacggatggaccgacatacatatacggatcaccagccagcaattgttacctgctaaagcgccaaggactctgctgaacttgcagcatggatcggcagcctcagatgcgtggatctagctggacatgcgcgacggagggagacactggccaagcgattttctagcagatgcacggtagtgaactgtgatcatggagggaccgtcagggtctaatggtacaactgtacaagcgtacaccactacaactagctacaacgactatctgaacctctctctcctaacaggaaggtgcccgctcattaatgtgtgaaaatttttttacgaatgcccatgtgaggatgtctttctagtaaaaatatttcttttactatatcatgaacaaaattaaatttatttaatgtgctttgatcagctgttatgattttttttcaattaccttcgcagcatataaattctaaactaaaatcactttaaatcgcataatttttaatttatgagaaacttgtgtcaaaaaaatagatctttttcctatgaaagtccaatttgtttttgttatattatgtttgaaattttagatatgttcattctattagtcatgctaataaaatgtttgaaaatttctatttagaatgggtttaaaacccaacagttttcattcttttcatcttcattttttaagaaaatggagaattccactctatgaaacatccttgaaatgatttgatctctataattgaagataaaaatataagtgggttaagcctacaacccaacataggataaatatgtccattctaaattatctctctaattaagtaaggaaaaataaaatagaggttgtagtatttttttagcaaattaccactaaactgaagtgtcatgtaacaaatatacatttctatattattcaatgctaaatgtgaggaacttacgatgtaccatagcaagttttaccaaaaagaaataaatggatatggtcttttaattcctatcaggaattgacttatatattgccgaggccacatcatgtctgtttcactgctaagatttattggtgcaacccacgttcttggtatgattggtatgatattcaactggccacatttttatttttaaaatgttgtctataaaaaataatgctagatggggtacatgttatgatgtaaaaaaagaatatcatttcaatatttttatttaatttatcagtgacttcatagatcatatatataatttagatggtataatcatcttaagattatttatttatctcctaaaaagatcatttattgataaaagcatcaatatcaaattgtatgggtaaatagctcctatatacatattgagaaataaattaattaagttgatagaaaatcgttagatgtctaatgggatataagtaataggtcaaccaattgtataaaaaaatcatgtgggatattttgatttttagtgagaaattttagtagtttcttttatttagtggacgcctcaatacatatatgggtccagaatataatttttctattagcatttaaatatagtcaatatttgtattaaattattgatttcaatagaaaatataatagttcaaatagatcataagagacacagggacaactagctagacctgatagctagatccgtttgtgagaaattatttaagcaagacaagtacaagcaacttataagagcatttatgtactttaacgcccacagggatggggaggaagggaagaaggttgagatttttctttaaaaaaatagatctaataatgacgtaaaattatgtgtctagaaaccaatgattggatatttctttgacttaagaccgccatataacggtttagaaacatttatagaatgtttaatggactttaacacgtatgatgtctacttgtgggatttttttcctataaagataattttaattttaattatgatatggataaaaaaacggagaaaggaacggagggtgcgtacaacagtcggtacttgcgtgcgtgcacatgccgcaaggaggtggggatggtgggaggttttggtttggtaaaatagatatagtgatatactttattagagtatcacgtattgacttagatgtatttatagggtgtcgcgtagcagctcgagagcgtttgtagaaagtttaataaatttttagtagtctctctgtcgtaaaatataagtgattttaaaatagtaggatgtgttttatccgttcaaaatatctatattttaagacagaatatataaatagatagacaggaagacagatagatagatagttgtatgatctccagcgaaaagttaaccaaaaatgcatccgattgcaattgcctgaccagtgggacactgggacttagcaaaccacaaaccacagttaaacaacgacctgtgcagttctgtttaaccaagccaagccagctgccagtatccctatcacaccagccaccggctagtgggccccatgacatgagtaagaggaatatgggccccacctgtcagagagtggcagagagattagctctgttcgtgcagatttctcagctcacctttggacccgggctatcctttgaactggctatgcggctttccttcgcccttaccctgtctctctgcctgcatgcatgcagcctcagcagcgagtgatgcatgcacaagcatagcacagcaacctgccatcttctcctttaaatacgtcatcgcttaatttccaaggcttccgttttctcctaaacataactgcgtagcaggcagatctcgtcggcatcttgttccagtttgacagttacagtacagatcgacgtgtagaataactgggagaaggaagaagacgatggcgactatgaagttgggctccaagccggaaatctttgttctggaaggcctcacatggttatcctgaattcctcgtttctttctgttgtgttaattttctgtatgttgaatttatttttttttctagttcagaattctcttaaaggatctctatcatatgttgagtttaagagatctgatagttgatgttcatttactaaccatatcagtaatcagtatgtcaactagtgctttaaaaccatgggtacttctgtgacagattgtatggagatgcgtaggttctcaaacaatgtaaaacacaatcaaattaatttctgcaccgtaacgtaacaacagattgagtttcacgcatgaactatgtcattcccaacctctgatccatgttgttcactggcaaatcggctggaaatctttcatggcacagtatgttcatctgtttgatataacacattcacgtcccaaactcccatgcacgcacataggtcgattcagattatccctcattgctaatctatacacgtcaattccaaacgcttacattctgtttgatataacacattcacgtcctaaactcccatgcacatactaggtcgattcagattatccctcattgctaatctatacacgtcaattccaaatacatgcttaatcttaatcttgtcaatcgccaggagatgcatgacggagctggagagtgatgtcgtcgtggaagtaggagaaatgtcattttacctccacaaggttagcgcaattattctctaaactaatcaccgtgaattaaaatatcttgaattgcattgagctggcctggtcgagctgacgtgtagcagttcccgctgctgagccggagcggtgtgctgcagcggatgatcagcgagtaccaagcgccgcaggaggacggcggcggcggcggaggcatgtgcacgctgcagctggacgacatcccggggggcgccaaggcgttcgagctggcggcgaggttctgctacgacgtcaagatcgagctcaacgcgcacaacgtggtgtgcctccggtgcgccgccgagtacctgcggatgaccgacgactacgccgagggcaacctcatcacgcaggcggagtccttcctcgccgacgtgctcgccaactggaaggactccatcaaggcgctcgagacatgcgagggcgtgctccccaccgccgaggacctccacatcgtctcccgctgcatcaccgcgctcgcctccaaggcctgcgcctccgacgccgccgcgtgttccaccggccacgccgccgcctccgcctccgccgtggccgtggccgccaagaatgccagctacgacgcgctgtggaatggcatcggctcggggggcacgccacggggcgggggcggcgcagcgggcgcggcggcggggtgctccgggatggactggtggtacgaggacgtgtcgttcctgagcctgcccatgttcaagcgactgatccaggcgatggaggggaaggggatgcgccccgagagcatcgccggcgcgatcatgttctacgcggggcggttcctgcccgggctgaagcggaacaccagcttcagcaacgccagcttcggcggcgactgcggcgccggcagccgcagcatcacgccgcgcgccgccaacgtgtcggcgccgtcggagggcgaccagaggtacttcctggaggagatcgtggcgctgctgccggcgaagaagggcgtcgcctccaccaggttcctgctcgggatgctccgcacggcgatgctcctccacgccagcccgctgtgccgggagaacctggaacggcggatcggcgcgcagctggaggacgcctgcctcgacgacctgctcgtcccaaacctcggctacaccgtcgagacgctctacgacatcgactgcgtgcagaggatactggactacttcatgtcgtccacggacgggctcgggaccgggtacacgtcgccggcggtggtggaggagggcagccagcttggggcgctccatgccgggagcccctcgtcgctgtcgccgatcaccatggttgccaagctcatggacgggtaccttgccgaggtggcgcccgacaccaacctcaagctgcccaagttccaggcgctcgccgccgtcgtacccgactacgcgcgccccgtcgacgacggcatctaccgcgccatggacatatacctcaaggtgatcacacacgtcgctctatctagctagctgcattgcatttcgatttcatctcgtgatcaacacacgtacgatgatgatacggcgtccatgcacgcagtcgcacccgtggctgtcggagtcggagagggagcagctgtgcaggctgatgaactgccagaagctgtcgctggaggcgtgcacgcacgcggcgcagaacgagcgcctgccgctgcgggtggtggtgcaggtgctcttcttcgagcagctccgcctccgcacgtccatcgcaggctggttcttcgtgtccggcaacgcggcggcgggcggcgacggcgctccgcagccgcacccggggggcagcgccatcgtgcctaagggcgcggcggcggccgggcagtccgacgccgacgcggaggccgacgaggggaaggggaaggagctccccgccgaggccatcaccgacgtgaaggcgagggtgtcggagctggagaaggagtgcatgagcatgaagcaggagatccggcggctggggaagccgaggagatcgtggagcctcctcaccaggaagtgcaggttcgggaccaaggtgcagcaagcgcagcccaccatgagcagcaaatgagaggcgcctcacgccctgcctgcttcctgcctaacccaagtatgaaatcagtacaagtactaatcccttcaattttgatcctatagtctctgagctttgctgtaccgagctagttaatgaaatgcaataagatgcttatgtttcataggataataagctagttttaggccttgaacagagtccttcaatatgtactgtcatttctgatgtatttcagggatttattcttaatatttatatattaacaaagaagaaaaatagttagtaaaccaaactgtttcctgccacaaagaatcaatacggccctaggaaccattgtgatcatgcaggatttcaaaaggaaaacattaactataggcacatctgaacctaggtaaaaagctcttgaggtatccataaaaggccccagtgaacatatattacattaaggcaggaaaatcctttagctatatgctgctgtaaaatggaataacttagatacgaacaacataggtgtagggatgtacaaggcgccaccacagaacgacacatcctattctctcccgtccatcgaagcagctctatcaaaaggccgatctcatagcaccacgagctgcctcacgtttcatctcagcagccttcccacttccacggaaatacatgtatacttgctgcatttcaaacggccaagttcagaatgacatctcccaggagaaaatgaagacagcattgcagcggaaattttattgcaacaagaacaaaatcttaggggacagcacattctagttgggagtggagacatcaatgcaaatagaaatgtatatattctgaaggcacagcatgacgcatgatgatgaacggcagaatgaaggagtgttgctgaacagacaccaaggtgttactatttggctttggctaagatcaagttttataaaactcacctggatgacaacaacgctgagtagtgattcaaggcagaacagtccaaatccaatgaagtaaaatatctgtcgaaagaaagtgtgaacaatgttgatgactcaatcaattgtatgagacatgccaatcaaataaattaagcaaagcatcacgaactcccagagtcccagtgcggcagtgcttactcactgaggcaaaaggtctgttaaaaaaatgcaaatagggtcctcccaagatactaaccctgatatctcaaattaacttgaatctagaagaaaaacattaagtaaacagtgagacttacccccacaatagcattgtttcctatgacatcaatagccggcaaaatcccactgtggcaaaaaaaaaagggagaggcaattagagaagtggtatttataaattgaagtagagaaaatggacagcctgcaagttgaattgctacaagtttgtaacaatttagagcatcaatagcagtgatccaggtattaccctaacaattaacaccatcacctaataactatgcaaatgccacgtaaaagcaacctagaactgttgcacaggtacctctatgagccaaatactaatatatatgctaaaactgaagaataacaaagtctcaaagcacttttaagtcatagccactaagacactatccagtgctccaatgttgctgcttaaataaaatgtatgtttagttaaataaaataacagaacacttacgccagagactttcctttgaaaggaaatgggggagccacagcagaccagatgcagaacagtatatggatctgaaagggggcaaacactgttagcactgcacggaatatctgcaattttgcaaccaatagtgtggcaaaccattaatcttatactagatcattttaaccttacagttaccagaaggtaagggtcttaccaagtaaaacaggaaaaaccatccaaacttcaaagcactctcagtcctgcaacatacattgtaacaatacactatgtcaaatataagaagaaatagtgtgcagaaataacaaaaacacaagtatattcacaacctcatcgcattgtaaagggggcgataccataacacataggctccaggtacaccagatataaagtagataatggctagcaaccagatcataacacctattgaattgaaccgcaggattagtttgaagtgtcagtgcagatggcagctgatccataagataaatatatagtaaggtactcagtcagccatacctgcccctttaatccatgctgctgtagttgcaattatgttccagaaaagacatgccgccaatcctgcatgacatcaaagtttgcacaataagaagcagctttgtagagcaatgctacaccaacatgcaaataggtactagctctcacaaccaaaattcagtccactaaatagtgcttctttttacaagatgccaagtattgttagcgttgctttgaaaatctttttacagaaagacatttagcccagctacaaaacagggtagacaccacatgcttatgcttattaggcttacataattactgcaccaagaagataataactatttttctcaaaagacacaggttgcaacttctatttttttaaaaaagaatctcttaattggatatataagtcaagattagagaagttcattgatatcaaaatgtctcaaagtaggcacgtttttctcatgtcactactcacttctggcattgactcagcagaaattcattgattggacagtaaatgtagtgattcaggcagtattttattcacaatgtttaagcaaaaggatataaagaattgtggttccaccaggtattttagttcttgtgacagctttcccaacatgagggaacaaaaagagagttaaaacttaaaactaaaactaacacttacccaacaatgaagaaaatgcaaggtattgcatcctttgtaggtggattggtatctcatttgaaatgtcatgatgaataatagggaagaagggtggccagtttttctcttcaatgacaatcccagctgaaaaataaaagaaagagttgaaaggcagaagcaacaactaaaatggaaaatagattgcaacagaacaaacataagcacaaaattagcaagaatagccttttcaagaaagacgaacacaatgtactccctccgtcccaaaaaacacgaatctagactggatgtgacacattctagtacaacgaatctggatagagatatgtccagattcgtagtactaggatcataggatgtgaaacatccagtactaggttggttttttatgcgacagagggaataatatagcataaacaggagcatttctaaattgtacaacaagggatacttgcctacaaatctcattatattgcaaagtgtaacttaagtctcaggctctaaatctaaaattagctatagttttctagtcaacttcctaattaaccaatcgacacaaatatcatgaacaactgtttcctatcttcgaatattttttgttagaaacacaaaaacaaaaagattacacgtactcagctgcgagaaaaaaatatacctctggatgcagcttcttctcttcttctcaattcctgcgtatcagggaatcacaaaaaatcaggtggtgtatttaaagaaaatacaagagcatgcttgtacgcaaatctagggtgttttaacctccaatcatgtgaaacttgttggatcaaatttttactctatgagtaaaactcagcacactcacagattcagcattctatacacgtaattctcgtgcgcaatattttatgaaaagaggagatatctagatgaaatcatttgataatgttagtttgcattagcacgctggtatccttctgtttatctaaaaaaacagccatccttcttttcaaagtgctataattgagtgtatagatatccatgttttgttcatcatttcaaaccaattgtgcaatgtcaatgattcaattaatggttagatcagcgaggtctattgggtgccggatctttgtgtcaaatccatgccagctaaatatctttcacattgcataatggttactagttcaatactcaatactaacacaatatataggtgcttcccaatacatcataggaaaaaggttaggaattaggactttggccaggggaagttgacaacttgattcattagaatagttttttacttcatcaaacattggttaaaaatcacattgctcatgaaaagatcaattgaaaattccaagtttcaagcataactacagaaggcacatacgctttcccgtttgtttagctcagcctcctttgcctgcagttctttctcctttttcttcatgtcctgaattacatacgaacatactcaatgcataagcaaccaaccacaaatacagcaacaaaagaatatatggtatcaaacatccaaaccaaggaatagtgaaaccatcattactagattaattgtgttcttcagccttttaaagagataagataacaaaaaatgaagcatgcaactgttgttacacactaacagagtaataatatcagagtgaaagagctaagtacagtatgattttctcacgctgaggtacagaacataacttgtaaatatagtagcacgtagtattaccgctcaatggaaatacaagtaccttggttgaatcaagaggtatgtccactgtggcaccacgatcattatagaacccaggttcgtgaggaagaggtggcatccgagagttggaagctggaggtacacttccaccctgcagaacagggtacatttaaaaatgaaacaaacagatagttgaaggaggctgctaaaattagaatattcagccaactctgttatccctttttacgcctattggccgaaagctcaaaatttgacagtttagaaatcctagatggagcatgtgcacgcatacgcacaattcacatgattatggactcgctgacacgtgcatatccagcaaactgagagtaaactgactgcaggcttacgacactaaatgtttatactggcagagacaatcttcaatctcctaatgttatagacgatctgaaccaaacaagtgtgaactgccccattttacggatattttccaataattctaagagtagaccgaccattttcacaagttatacatatcgattgcaccacatattccctcgtaaaaccagaaacataacgtcccaacacaacctaagagccaattttcaatccgagcatcatttctcctatgaaaatgtataacaatacaaggggaaaagttgccacgcctcgcgatcagctagcaaatagacaagcaaaaaaggccgtattcgcgccatccaagtccaaccccctaacagcggatcctaaatcactaaccctagcgccaacaactcaggctgatccaaagcaccccacatggcgtgccgcgtgcaggaccagacgaagcggccacggccagaaaaccagcacaacacatgccaatccgggacgcagctcgactaccccatccacacaggcgcgaggacaagcttctccatgcctagatgaagcaaggaggaggcgcgattgcgacgcggagggggggtttagccccccgacccagctacagcctaacccagcagctcaccgcgaaggggttgacgtcgtcctcgtcgaaggggttccggtcgtacctccccgccatagctcccctccaccccaactcctcctcctcctccggaagcggccgcgtcggtggtttctctctccggcgagggaaggggaacgcgcgtgacggtggcgaccaactgctccggcctccgggcttccgcttttacgtaacctagtgggtttggaatttgggatttgttcaggaggggcttattttagtggtacttcctgtctccgctggtgctaatctctgacctgtgggattcttcgcgtacttgctcaccggccgacaggtggggccaggtgaccggtgggcggttgagacttgagagttgagactagtcggccggcaaagaggaacggacggggtggtggtactgcacaaatgcaacaagattgtcagcgtttgtgttagtacttgcaagtacgttcttaatttggagctgaaatttgtccctcatgatagtagtattagcgaaggggatctgatttaattcacggttagtacgatcggcgggttttgattgacctgacaaacctgtcaccaccctaagtttaaagaattggaagtttctaaatggaacacaaatttgtcctgacgtacccgcttagtaactgagcaaaaccatcgccagccagaattggtaaaaaaaaatacagacgagtgttttcttaagaacgaaggaaacagggcttaggaaataatcaaatgatgacaagacagtcatcagcacccagctggtttgaatttgaagtcaaacggggaatgggtaatgcgttcaaaccgtgccaaactctgtcttcaaaacttcaaccacttcgttgatggtgaattgaattatcaccagattccagattacacgggcaacagtttcattacatgaaagaagagaatgaatcaccacgttgaactgacatcaaccatttttgaacttgcttctccctcatccggggctgtccatgtaacaaatgttaattacagattatgcacagccaagctcacatgtacaacaggggactacgccgaatcaaaagccaagtcaaaacacaattacacagctcaattgcaaagctatggcaacaagctacaaaaactgtatggcgctggcgcgttttttgccaaaaagaatgatgtctagttatctactctcactgtgttgtactagtatgaatgaacctccccgcttgtttcagatcaccaccaagtcttgcaaagacaggttcagttcttgggcaagttgtgctgattgaccaccccgcctgcaccagcaaaatatgaaaccatcacagaatgtcaggaaaggtagctccaacaaatgacgtgggtagcaacaaaaataaacaacatggtgcacacgaacaactgtcagcaagcttaagaaaacaatagtctgataaagtaaaggataaagcatctcatacagggaggggaaggaaaggaattacataatcaacgggtgtagaacttgctgaatcttttgcaaatggttaaaacaccgactgcaacgttgcaacctgtgacatcaacgaagtcagcaacagtccagttcatcttggcataggcagagcaataggttataggatgctacaaacactgcagttctttaaaacaatggttcctaactgaagtgcagggacagaacccacttgtcacctcacatccagtgtctctttgcaatttgcaggttttgcggcgtcctttaaatagcattcccttgaataacattaatgcacgtacctctgctcagcctgaatatcaactccaactgctgaatgagctgacaatgttgaacgaataactggtccaaagatctttataagatccaacaacaattccaaagaaacaatggcatgcctacaaattgaaattaaaggcaaagtaaccataagacaaagttactactaaaccaaacattttctaatgtaagatgccaatatctccatggttttgtaaagaaaatagatccatgaccttgcttgcaatagaatgaacagactaacaagaggatagacaattcaatttaacagcagcatcttgtgtctacatgtgtgcacagagcatgtgcgcttaagttactatgtatcacttggtccagtcagacaagaaccaacatgcaatggaatagagacatccaatatatcacctttcagccttgctggtcagtaaccccgcaagaacaggcagaaagcttaagaaaatgtctaggttgaagagatcaagtttccccttcagagtactaacaacatcagctagaacctgtaaaaaaaagggtcaaaccattagcagctaaaaaatatgaagtacatgtacatccaagaatatcgcacggcatcttgagaatacttacagcattgtcaggcaactttgccactgcagcaatcgctcctttgataccattttggtcaaagacatgacgcatcatctgaagacagttaacattaatatcatatgctgatggagtgatggctatgatatatgcaacttttactagttttcaaatgctttcctcactgactattccccactctccacttgtaggataattagtagatggtgggaaaagtgcatgccaatgcataatttacatacaagtgtagatcactctcatcttatatcaggctatcagaaataatggattcaaagctagctgattaattttagggtgttgcgggattgatcaacaatcttcactagagctgacttcaccttcaatttataggtgtgtccacaccaattgtctttaagaaaatgccaataaatcatttaacgcaagtatcaaagaaaaaggtaatgttcaattctaagttgtctaattgtactcaatagactaacaacgataagccattttccctgtactgaatagcctaaagaacacagaagagcttcatcatatgtataatctatcatgcaatggcatgcaagattggttccctgtttattggatacaaaaggtcaaggaaggaattctatggtgcacatgagctggtaacaaacagaagtccgcaagtaaaaagatcagagacaggacacacctctaactttgtcagccgagattttacggcatttataaattcatcatggttctgcatcaaattgattggaatcatcgcctcatcaattgttgacaagtccttctcatatgcctgacttggttctgcctgtccattacaaccattgcaaaatataatgatttgagtaccgaaaaaattcgtaaatgctagagagcatgaacaaataaaaatggagcaaaggtaaagtcatatttttctagcccatattctgattttatttctgaaaatactccaatctcccagaagtacttaagtccacaaaacattacattatgatttatgacaatctggtttctaacaatactttatcccttctacttctatctccagatagaatgtacttcgcagtaaggggaaaaacgaatacagaaatttacattgtataatatgcaagaatgagtatgtatgacatgtcccagaaagataaattggtttaagaaaaatgtttgagattatcaccaaggactttaggaaaatagtaagtacagttcttaaacattcatgcattcatgaatgcaccaaccaaccagataataaggtcaaattgctttgaaattaattgggcttaaaattatgggtacatactgaaaaggaggaaggaccatcagatctcactgcacggtcaccacaagaaccagttggtggtgagcactcaacattagtagcctctctcttttcccatctctcaacaagagactttgtttttcctaatggcacagcaactgcaaaaggagttaaaagtaccattaaagaactaattttagcacaagtagataccgagacaatctcttaacgtacacacacctcctctgacatatttgaccttggttgtttctgtagtagaacatggtggctcagaggctgtagcaggaaagagtttcatcgtcaatttgccaaaatgaacagaactgcagagtgcaaacttagaatgtaggaaaggatctctaagacttactatcatttgactgaagttgatgctccaacgacactgttctgtccaatttttctgtcatttgtgtattatcacctttatccatactatcaactttatccacattatcatattcttctttcttgtaatatggagttagtccaaaagagaattttaagccagagaaaccctcagagcaaacatcaggatcagttagcatggattttgttgagttaacactatcacccacaaaactattaactgaaagtttccttgaatgaacaggagcatggaaatcatctgcaactgcagctctccctctgattcctccactaatgctgcctgctgttttgtcctctaaaatgtctctaggcataacgacaggcacagaaacagtctgtggtgtagtgtaaatatcttttacagatactgactcagcaagatggccttttttaacagttgaagaattattagctgttcccgtacgggatgctagcgaggcatccctctgtgcaaaattgcgctccactgtttttctatttgtgtatggactatcagcagctttcatgcgcctcattggagtagagctctgaatagatgatttgaaagaagaatcaggtcttcgaggagttgcaccactcttatctctcttggttttatccatacttgctggagtcaaatttgagccacgaattccactttcagctactaccagaaagagagagagagagagagagagagagagcatcagtgtgaagtatcgaagtaaaggtacttcaatacattatacataatgagagacaaatgggtgtttgaagcagtaccagtccctgtttccttgaccttgtacagattttttggatgtgtcgttgctagagcaggaatggacttggcagtggtatcaatcgttttcgaaggattgtcgtctaaagaatgtaccagctcagcaaagaaatttgctttgggcaaaacaccaagagcatagggcccaatgagctggatgaaagatattgattagaccatagaagaaatacatcctatgagacaaaaagtaaaactcaccgatatatcagcaacccaaacaccaactcggcattcgtggtaggagcatcccaagagttttccttcataaatactaaggtcagccaaattgctccatcccatgtcaacaacgtcatgacatcttactggctcccaagagaatacctaacaaagtgctcatatagttgaacagggaccaaaatattgtacatcaacaacccacataacaaaatcagatttacctttaggctttggtctaacccacagaatagggtttttccatctgggtgaaagaccgtagagcgaacaccagtagcctggaagagaagaatgtaaagaatatcataacagaaagatgcatttacccgtcatgcatgtttgaatacaggaacaacagggaacagggtaagaaagtttaaactagatgtaaaagcatccattaaaaatctctaaaagaaccaacccattgaaaaatgtgacaagggaggtcataaaccatttttaaggattggaaacaaaatttatccctagcacatctttcgtgaagttacagtggtgctaaatagaaaggagacaatggatgtaaaacatgggcaccaacgaaatcaaatgcatgcgtacaaaataatgattgttataatttgtctctatggtttaccaaaatattgtgttaaacatacgcaacaattagcctggtattacaaaaatgtgtaaagcaagtacctcgggtccagcagaaccaatcaattcaaaagtttcaagatcccaaaacttaactgttcgatcagctgagcctggaaaatattaatgaattcaatgagtatacccttaaacttcttaaaacttcacttactgcacatagaaaagcaataacacattatatttatttagatcatatatcctgtgtattctcaaaaaattcatagtatcatactaaaccagaaacaatttggtataacaaacttcagcattagctttatcaatgattatactgcaaagaaaataaagatgctgtctccaaaagtctctgttttacaaataactgccaaacgagtaggtacctgttgcaagcaaaaattcttgcggatgaaaatcaatacaccggatttgcccactatggaacttgaagtcatgtagaagctttccagctgtcaagtcccacacttttacaatattatcttctccgccggtgacaacccatcgtccatcaggtgtaaatctgattgttctaattgctcctctgtgacccttatatgtgtgaatgcatccttttttctttatatcccagatcttaagatctgtatctgaagaaccagatgcaaaaaactcgccaaatggatggaattcaacagaggtgcaacttgatctgtgcccagtaagagaccgcacaactgcatatcaagacaaaacattaataacatatctagcttactaaattactaagaagcacagttgttatgatctatgggaacactattaagttatgctttcaatggttatccacattagccaagcacacttcttttatccaaatacagaagcgtagagcatagacattttgacgaagatttgtgagtttcctaaaatcgcagccactgaaaatcagaaaaagaacctaatacagcggataccaagcatttgtatcaaaatataaaataagtttgtactaacaactaacaagtacattgatagtaccactatcacggaatgtaatggctatgttttctataattgtttagaaatgaacagacagttacaacaaagcaaaaggcaagtcattaaggtagcacaatttctaggacttataaagcaataagccaccaaccacacccatggttcaaggcgctaggcactagagggttagcagggctgacgcctagctagcaggtgcctaggacaaactaactagtaaaacccaagaaattagcaaacatatctctactattataaaaattgaagatgttttttaccggtattttggtacgtcatatgtatttgagtcggtttttaagttcgttcgcttttggaaatacatatccgtgtatgagtcggattttaagtttgtttgcttttggaaatacaaaagaagtcgtataagaaatttcttttaaaaaaacttgcatgctaactttcgatggaagtcagactcctaattgcagctcacgatttactaaaaataagccgtataacaataataaaattaaaatagcattcactcgttgcaacacacaggcattttttctagttacataaaagttggataatataacactaaaatagccacctaatgcaccacctagtgcctaattgcagttgctacacggtgcctagcgctgattttagaacactgaccacacctttagcctcttccaagtcccagagcttgatggaaccatttgaagaaccagcaagcacaagcacctctgctgtatcaaactcaacagcctcaactgagccagtgtggcctgataagctctgcacaaacaataagccagaaacacggcatgagtcaaattcaacataaccaatagaagtgtccatcactgtgataggggcacaaaccagaagtggtgtctgtttgccaatggcccacaggttaaccttgcggtcgctgccgccagtgataaacacacggcttgacttcttgccgatagacaaggacctcacttcagcatcatgtgcgacaaattcctctaatttgggtttccatgttaaggagttataaacttgagcaatgcatgcttccaaaaagtagccagtaacagcttccacagctatgatttgtagtcaactaaaaaaggtgaataactgatcaaaccgtatcaatacatagctgtttttttcccggatgaacttcacaatttagttatagttgcttcggaagcaaattagacttggtgattcggaattggcgcattgctaacctaaactgggcactaaaggaaactatttgctgaacctgttgaaacatttagtggtagttcagttccttcttgaaatcagaaacgacttcaaccttggcgcagattgccaagaaagaaaaaggtggcgaaaattttctcgagaccaccactgtcgctccaagaaactacccacaacaacacaagactagaatttgagggaggggaaataatactccccctcaaccgctcgagcaaatgcctacccagattgctccggcaaaccacgattccttcctcctccgagccaaatcggatcaagaaccgggcaaacagaagggcaacccaacgacgcagtagcagcaaaaaaaaaaaaaaaaggatacggagcctgtagccgcgcttctcggggtccatcctcccgtctctccgcccctgctccgagccgctggggcaggccgacgcgctggcagcggagtcgtcgtgtcgccgtcgacgacgagaggggggagagggttcgggatccgagtacttggtattctgagcaggagaagggaagggagcgggggcgagagagatgacagccgcgtcgccttcctttttcctcttcctctctctctctctctctctctctctcgcagcaagcagtgaaaacgagaggtgtggagcggcgtgggtaggtgggtggggggagtgctgtgccggagtgagagagtggagtttttgtcgcctccctttctcccccttcgcctccctttgcttcgcttttgttctcgtttcttttcttttgtaccagagctggctaaagtaaggttctcttctctcgcgttccttgagaatgaaataaaggaaagtccccacatgaatctggacctttctctttttttctacattttgatactactagtagttcgtagtagaatggaatttttggtacacaggccattttgcaatatatataggttttgcaatgaatactcgctatggctttgagaagaaagttagcagcctcaccagcactccaacagttgtaaggtggtgtttgaatacagaaacttaactttagcctatgtatttagacactaatttaaagtattaaatataaactacttacaaaactaattatataaataaaagctaaattgcgagataaattttttaagcctaattaatccataattagaaaatatttactgtagcatcacataggataatcatggattaattaggttcaatagattcgtctcgcgaattagtccaagattatggatgggttttattaatagtctacacttaatatttataattagtatccaaacatctgatgtgatagggacttaaaagttttagtcccatctaaacagctataagatgattggcaagagtcaggaggtatgtggtagatgtaaaccattagtatcacattgagtatatgggatatgacaaatagagaatatgttgaaaagaagcttacccaatacccatctttacaagagatttagggcgtttttttttgggggggggaggggtggagagttgggagtacgattcactaccaaataaatatgcatggcacgaagtggtgaagataaaaccatacttcaatagttggaggacacaaccgttaacctagagagtcggctagcaatcatcaaagtagtccttcctacatcggtttcttcctctctttttctctcgggggaaattgatatgtgttaggctactttgaaaagaaaaacttctcatacatatcataatctcgcatataccctcgaacaaccttacgtatagtttatacaaaagcccaccatactattatagcaggatctaatggttgcttctcatatttatatttatagtcccaaaaaagacaaaaacatgttagaagagaaaagaaaaatatatctttcatgcatgagtaaatacaagatgatgtgttttgtaaacaatctagacatatgctcagaccatcttaaaatacttgcatgagtacactcaaagcatacacctagtagaaataaaaataatgatgagtagtaattttacagtagggtaacttggacttcattcgttcctgggagatccgggagattgagagagaaaaacatctcgttttccgcgcgcgcgcttccgttttttgcaaaaaaaatttctataggaaagttggtttaaaaaaaccatattaatctatttttgaaatttaaaatagttaatacgcaattaatcatgagctaatgactcacctcgttttgcgtatattcccaatctcctcaatcactttctcctcaaactcaccttggtataaggtgtgtttgcaagagcaagttcccaatactctcctctcgttttccgcgtgcatgcttttcaaactgctaaatggtgtgttttttgaaaaaagtttctatacaaaagttgttttaaaaaatcatattgatctatttttgaaaaaaaaagctagtacttaattaatcacgtgttaattgaccgcttttttcgtggataggagatgggttcccaaacacccacctccaaacacagccataagcacggaccaaaataagcgaaagcacatatatgatggtgtgaatgggcacttgcatccctccttgataacggaaacatcaaaacggttggtattcggtactcccaacccaccacccttaatctccataaatacggtgttactcgagagttggcatgagctggcccatagatgccaccgcaaccggtatgaacagtggcagtgtgcaaacaccataaaacctcagcttggcctaccggccgccgcccgccccatggacagggcctacgacaagcacaaattgattactctatccgacttgtttggtaggtcgaggagtcaatgtgccgtccggtgggaggtcgctcgcgttcgcgggcatcatcaggcagcgaaaaaaacgactttcccgatcccaaatcctcctttccccttccgtcttcaggcgagcccacacgagcatcacgccgcggtgcgctgcaagcctgcaacggaataatgcaaagcgaagggaagcggacgcgcgccgcgtacgggccgcggggcgtggcacggcacgatttctcgaaagaggcgtgcgaggcagcgaggcgcgacgttgcgggcgaagtttacagcaggctgcagcgacacgagccggcccggcgccgcggtgcattggcacgcgggcacatgacgtgccggtatcttgtgcgggggaggtgggccgcgcgcgcgggggggtggggtgtgtgtgggggtggtggtggtgtcccgagcaccccgagcgtgggggcgtgggggaagaggtgcttccagccttccaccgcggcatgtggcgcggacgccgctggctccaaggccgacagatggccgtggcgcacacgtggggaatcagcatagatgacagtgattgtgcttggggggacgttcttagttggagcttaatgacagctttcgtcttaaaaatctctctgggttgatgacttgatggctctgttttctgtcagatcaatggatcatcaactggatccaaatgccaaactccagtctcagaaagacaaggggaacatgtccaatctcgatttctcgaaagaacacgtgttcagatagttgaaacatatgctcgtgttccttcaatcccgcggtctagtacaattcatgggcctaattgggccttaaagttgatggaccggactttgtgttaaagtttgtggaccagcccgaagaacgccgagcaacacagaaaggaataagttcactttaactcccttaactagaggccgaatctaactcatattcctaaaccacaataccggatatctcgaccccaactattaaaactggtacaatttaactttctgattggttttgaagagcggtttcgctggcgtgacgcctacggtggcggtattgacccaatcttactttcacgtgaggttgacatggcgcttacgtggcattatagttttaaaaatatgtgtgcgacccaattgcattaacacaaaaaaaaaggtgggccccactaacatgtgggcccacatgttagcctctctctgttcccttcccttattcctcctcctccctctctctctctttctatcagcgcactcttccccctcggccattgaagggcggcgtcaggtgagaggacaggcgatggcgccctgtgtcaacaagcagtggcgcgtcgtcgtgcaggcggagccacgcccctaccacttggatgtcgctgccatcgctccggccgtcgcggagtttcggtgcaccagcttctaccgcctcagagcatgtggtagcaacttggcttcggcgttgatgatgcccacaccttcaccgccaattcgcccaaccccaccacccgcgccctcctccacctcactatgcctccccctctgactccacctcctccgccaccgctcatctcatccatcccccgccgctgatccccaccgttgtccccactaccagatgccaccgccgccgctcatctcatccgtcccccaccgctgatccccaccgttgtgcccaccgcccgatgctgctgccgccgctccgactgtcgtggagttccggcacaccggcttctcctgcctcggagcatgcggcagtggcttggcgtcgacgtcgacgacgcccgcacctccacggcccactcccatcttcccgtcgcccatccccaccacccgcgccctcctccacctcactctgcctccccttccgacttcgcctcctcttccgccactcatctcattcatcccccaccgctaccgtcaagtgcgacgacggcgtgtcactctctaccgagaaagagaaagagaggaaggaagaagaaatagatggaggctgacatgtggggcccacatgtcagcgggctccataattttttttgtgtgaatgacaaatgagtcctacatacatgtttttaactctaatgccgcctaagcgccacatcaacgttatagaccaggtcaacactgccatgtggacgccacgtcaacgaaaccaccatccaaaaccaccgagggagtcaaattacaccggttttatgggccgcgatatccggtattgcagttcaaggatacaaatcagattcggacgccagttaagggagtcaaagtgaacttattccacacaaaaaaaaatcagctcagactgctagaccttgggcgaatgggccaataaggcaataacacactttccaggcaacacagacatcgcaaagagtccccagttcccgcacaacacaggagctgcctgctaaatactacctctgtcatatccaacgtttgaccatccgtcttatttgaaaaatttatgaaaaaattaaaaaaagttagtcacttataaaatattattcatgttttatcatctaataataataaatgtactaatcattaaaaaattttgcggaaaattggtagtgtcaggattagagccggactcccaatcttctggaaatcgatttgcgacaaatgtatttttttcagaagttaccagtaagattctacgaaaaaaaaacgcgtctttacccttaaaaagagcaagagacaataaacactcattttgcaaggattgatagatccgaactaatcaaacactcatttgcaaggatcggagtatctttctgtgatttgattgctgaggtagaggtagacttagggggtatttgggagacaggggctaaactttagcccctctctcaaaaccataagtccctaggagcttagcccctctattctaaatacccccttacccaaggcacccaagacggaggaagaggagaaatcggtggagtagctcgggagggtggagagatggggagaggaagaggataaatcagtggagtaagctctttcagtctctcttgctcctgtaatcctgtccggagaggcggagaggcggacgacaatggaattttttttattttccattttttttattaaaagttttacaaaaataattttccatttttaaaaatcgccatcccagagggcggcgaaaatgacgtggcagacggccgttcgctctcgggcgacggccgtcaacgaaatttgcaggcggcccccttgccgccctccgctagggcgattatgtactgtgcggggggccgcctgcaaatgggcggcgagggggcatggaattttgcaggcggcccccttgccgccctgggggagggcgatttttgcctcccccctataaagcacagtcccccctctctgaaatttcattatattcactaaaaatccaaaaaaaacgaaagagagagaggggagggcagcagaaggggagcggcgaagccctgctggttcgctcacttcatcacaggtttgctcccatacatcttttgcatttgtactaatatgttatgtttgagtatatatgttgcgttttagttttagttccatatattttagtatatctgtagcacacaacacatatgtgtagatccagagcatagaatataatagtatgaattgagacatagacagtagtgttaattgtaagatgtagtttagtttgatctggagaatataacctacttttagaattttggagaacaatattgtagagaatgtaacttagggcgtagtacagaaatgcgaggttaacgcagttattgttttcatcaggcacaatgtcaaataaggtcacatttcagatagttcacggtgaaggaaatattagatttggtccagatggtgttgatctgtcagattttgtaatgacatctaagggcatcgataggcctgcggagagaacatttcaatcaatttatagttggttgttgagaggatttagaatagaccaagaagtctacacaatgtcagtatcagttgtagtgagtcgtgcaacagaaggttatttttgggaactaatgccgatggacagcactgctgcttggagacggtatgtggaaatggcttttgaacggtcatggcccctcgttatatttgtgtcggtacaagagaaagatataaatgtttcaatgcaaaccgaagatgtagagggtcctatcaatgcaggggatgttgttggaccatcgatgcaaaatgaggaaaatcaaccaagggaggagcaggccatgggcatggcggatgagggggagagagtcggtataattgttgatgaaatggagagggaagattcggataatgaggaagcggacgacgacgcatcatccgatgaggaaggtgatgtaatggccactgattgggcaaatgaggacttctctggacttgtgtttgtctcgtctacatagttcttttcattcatatggtgctagaacaacttatgctcacgacaacacactttcggcgcttcacggtagtgtcagatccagtagcgcgcacagtccacaacagcacacatgaaaagcggcagctcgagttgtcactatcaactttcggcgctgcctgttgatataaagtgaatcacgcccacgcgtgatcgtcttgtcacatctaatgaataatgtatctcattgagttcacatatattgcagtgaaaacgacgctatataattgacaatctgaaggcaacctcttcatatcttctttcccactagcacacaacacacgaaaatggaagcgccattccttgagcgtctcaactggcgaagcgatccttttgctggttggtttccaccatggtgtgaccgtcctttgtgcgattgtggggatggatgcatactcaagtcttccctcatgatacaaactcgaggcaggagattcttccaatgcgcgaactttgatcaggtatgcttcatctattcgaagttcaaatggataaaaaaaactaacttcttcgtacacaattgtaacatcttacgcagacatatcgtccaatgtgcaacttcatcgagtgggtagacatggagaacccacaaaacgatggaacccgtgcttacccacgtagtgaaacaagatcggactacctaaggcggaaggatgagcatgaacgtcgaattgctgctgaggctttagaatggcacgtaaatcccctaggactccccacgtggcgtgagcgtccggagtgtcgttgtggtgaccgttgtcaggtcataaggtccgtaaggcaccgaactcgaggacaaaagtgtttcgtgtgtccaaacattgtcgacgatgatttcgtggtaattacaactattcttttcatcactcctcagtactatcattaacttaactatcccaaaatggatgtacataggaggatgtaaggaaatgtcaattcgtacaatggattgacacagtcagagttacttcaagtggcgggccgataacgcaacctgaaccgaccatacagttcattcatgcttggatggagtacgaacgtcgggtggaaattgcaagcttagactggaggaacaatccattagggttacctaaatgatccgagcgtccaaagtgtgggtgcagagatcgctggcaggtggctacatcctttgctgaacaaacatttcgaaggagatattttgtctgccccaatgtagacaacgatttcgttgtatgtctaaccatttacaaaatccgctatgatttgcacaaaattactacccaaactgaataacattactatttttacagggcaatccaaggatgggtggatttactcgatggatcgacaatgtcactccatcatatcatggccagaagataacagagtcagaaacacaagtagagtatcaacgattgaaggaccacgagaatgcaatgcattctgaccgacctagaaggggccgataggttaccgcatgcttgattcgtcgggatcgacaaatttgtacagtgtatcgatggcacttcttatctatcttatcattacaatgtttaattatggtggtgatttttttgtatgcgtaagactaagggcctatttggattgctaccaaaaacatgccctaccaatattttggtaatttgaatagtacttgtgtttgatttcgattgaagcctattcattggtaatacgtaatctagatttgagattatgtagaacattcttcactacaattttacattttggcagcaaaccaaatatgatcaaatgcaattttaccttaccaaatatttggtagtgccaaaacttgcttatattttggcactaacaaaatatttgtacggtaacattccaaataggccctaaaaaataataaaattatattttaccagtcttggagattttaatcttgtatagttttcaatataaaaagatttgataactattgatatttatacaaaaatataaagcacaatataaaatcgccctcccccagggcggcaagggggccgcctgcaaaattccaggccccccgccgcccatttgcaggcggccccccgcacagtacaaaatcgccctagcggagggcggcaagggggccgcctgcaaatttcgttgacggccgtcgcccgagagcgaacggtcgtctgccacgtcactttcgccgccctctgggatggcgatttttaaaaatcgccctcccagagggcggtaggcgaccacttctgtcaattttcaaaatgaaaaattatttttgtaaaacttttaataaaaaaaattaaaaataaaaaaaattcgacgacaatgtgctctggttatgtgggcttgtttacaactgggccagcgtgggagaaacggaggcctttaacgtagcagcgcggatcttatggcatctgaaatttgccacattgctttctgttcaaagacagacagaactcagtacaagtgttgaggaagaaatggtcgccgcctgatacagatgttctgaaactcaacattgatggagctttccgtgcttcagagaagactgggggtttttggcttcttggttcgagatcatctgggatgtggagttcttgcggaagctgcacgtctgacttatgtacatgatgctatttcagttgaagcggaggcttgcctggcagcccttccagctgttgtagcgcatggtatcacatctatcctggtggaatctgatttatctgtgctaatttcggctcttcagactaatgagtatgcctctgctcctggtgggtccatcttcagggagatcaaagtccttgttcaggtagattttgccaatgttgagtctgtttttgctcctcgtgcttgtagtacggcggcccatgaactagcccaacgtggtgtgaattgacacccgggtcatgcaatggtgtggactgaccccctccctgattttgtacaaattctagtggattgtgataccactgatccagcttggtaataaaatgtcagtgttgaagatcaaaaaagatgatcgatcgacctttacccctcctcctgttccaacttccaacccatcctcgcatgagacagtgcaggccgacgcgaggagattcgccgggttcatccaaccagcacgtgagacgccggtgtttgctggaactttccgtcgccgtgaagcacacgcgtgtcgattcgcgtcgatccgcccgctgccgaagcgacgtccggtcgctgcggcgcgcgattcgctcggtagtcactcacaagatcagagctgttgcggtgcggagcttttgcttggaccaaagataaaaaggcaaaatcttctcttgctctaaacggtactccactcgggaaaacttaaatcatccctataagagatatccctttatttttcatgttacttaaaaagtcatcaaaaaaattataaaaaatagtagaatagatcaatatgtgatatgttactttacaaacatgcaaattcaaattcaacttatacaagtagaaacaaaaaataacaaatttgactatgaagtgaacgcgtaattcacggtcaaatttattatttttgttttgaattgtataactcgaattttgactcacatgtttgcgaaaagatatatcatatattgatctatcttgataaattttaaaaatatttgataattttataaatgacatgcacaaaatgaggggatgtctcctcgaggaaaaaaaatccgcttccactccactcaatcttgtagctaggagttgacgaaaagctcgtaactcgttaactcggctcataacaagctcggttcaactcagctcggcttgtttcattttcctaacgagtcgagctggtattttagctcgttagaaataacgagccaactcgagctggatcgcgagccgtcgagcctaaacgagctaggatgacatcaagtcggatggccaacatggacatcctttcggcccaactaggcccatctcggccatgatacaacggtgttatcatatgatgcgcgtggccagcctaactctcgttatctcatatacataaaccgatagatggataaaacaaaagacaacaacaagaaaaagagaaaaaaatggaaacgtagaggagatcgagacgactccggcgaggagctcgctacagctaatttcgctggcccggaagggtgggggcacctcgaaggggaggaggagcccgccctcacggaggcagaagtcggtagccccgtgccgggtcgtggcggtaggggcggtcaggggcggagctagagcgaaacaacgggtggcactactaggaaaagcattatcgcaagcggccgaaaagggtcttcgcagcggggcgcccgtccgcctgtaagccaacgactgtgaatatcgccgatcttcgcaggcggggcgcccgtccgcctgcgaagataattttcacaggcgtacgttggctagtccggtccgcctgtgaaaataggaatcgtccgcttgcaaaaaaaaaaaaaaaacttccgcctgcaaagataggtagaaaatattgaaatttaattataatttggccgtaaattacttttaaattatttaatagaaattcttgcaggtagatttttatgtacatatattggaagattatcaagcatttggtactgagaaatctacatatattgcataaatcaaaagtgttgccaaaatatatatattacaatatttttttacattgtcacttcaaataacgtcatctagttacattatggcatagcagtgttccactcccgaagatccttgaattcgtcacttgccgctaggacaccctctgggtcgaagaaatctcttttgacatgacaacactcgtggtggatgaagtggcacagatcacgctgcacatttgtgatacctgtatcgtcaaaacttgttcgacattctaatcttggcaactgcatgcattaaaattaatcaatatattagtatcataaatatcaagagctgtctagtacatagcatagagacttacatcctccgcgttagtcctgtatcgtccattaaccctaaggaattagcacgcataatacccgcaaaggaccgttcatcgcggttgcttgtgacacttcaggacatatcatagaaaaaagtagttaaaatttgcaattagtgaaacaattggaatacataaagtgagtggagtattaccagccaataggtacgtactagcagcttctcccgtgtttgggtctgttctccacccttgaacttgtagtattggtatgcactgtatggatgtcgtaccgtttcagagtaaggaggatatttatttgtaatacattcatatacaaatgcaagagtcataataacttactactgtaagattgttagaaattctttgtattgcttgtgattgtaatcgagaggatccaagactaccacgattccgtctttagggtggatgagtaaacagatataatgatcgctacatattaacaacattatagttagttagtaacagctaaaataagacatatgtgtacaagataaatgtaccggacttacttaaaatgataagcggccatgacgactctcttattttgaaagtgcaagaaggctcgtccaatgtactgtgcgacagtaatcaatttctccttgtgcaagcccttcttgtattctgctatctcttttggattcttacccttcagctggtctgaccctggtgctagcgtcacggtatgctgtgtttggcagatccgagttggatccaagaagtcgatgggttcttttttcttcttagcatccatgtattgcatcctatagaagaagtttgttagtaacaatcacatggatttgtattgtacatatttttcatctaattaattaaaactcatactcacatgcaccaaacaccgacgtagttgacatccatcttatcccgacgatatatggcgtagagatatgagaaatctagccatacgtaaccttcttcgccgaaacaatctgccggtgatcgagctgttatattgcccaagcctttcttgctggcctccatgtagaagttatgtaaccttctcatctcccatggtgcttctttcagtgcccattccggcaagagtgctttcccatgttcgtacttttccgggcaatcatcggttgcgaagtatgttggcccggctagttcagaagccttctgggggtcgtcatctctgagcttggcacgttccttaccccctctgaagacggttagcatgaacttctccttgctcgcatctttggacttggagtcgtggctcctaagcactcgtggcacctcggggtctttcgcaggagaagggtcttcaaatatctctggctctgtaccgtcccattccaatcctggtacttcttctttgtctgacccgaccgatgccacaaattccacctctggttctgccactgtaatctccatgggcacatccggcactgaaatctccatggctgtctccggcggtgcaatctccatggctgcctccggcaatgcaatatccggtggcacttccagcactggattttccttttgcatctctagatcatccgccttatcagtcaccttcctcttaggaggcctcggaggttttcccaaccccggtttaggcaacacaggtttttccccagcgtcagtgcccaatccaaaggatatgtcattcttgtgccagagaattacaagatcgaccgcatccccaagtacggatacaccatctgcagtcgggtagtcaatgttgtccacattttaaattactcaaattagtacaaactaattagtacaaaaataaactgtgtattaacaatatatcgtatgaacaaatttaaattctctgagatttccaaatttaactagtacttactattatgctaaattaattagtacaaacaaatttaaatagcgaaactaatgactacttactattatgctaaattaattactaaaaaacaaatttgtacaaaatttgatatgttattatcaagtagtgcactaattgacttacttatttcatcgacatgttgactaaaaaaaatggaaaaggcaaacatatcctctacatttttttaaaaaaaattgttaacataccctccaacatgttatctaaaaaatttgacaaattcacatatcctgcaaaattgaacataccctcccaatttcattcacatatcacccacattcccaaattcacattcacaatcaacatataaccccttattcacatatcacccacccctcatgcccattcacacccacatgcacacacatatataccccctcacacccacatgcacacacatataaaaggaaacacccacatgcacgcacgtccgtgttggacgaacggccggtgacgagcttcggtcgtggacgacgaaggaagggctggcgacgaggttcggccgtggacgacgaccggcgtcggccgtggacgacgaacggccgacgacgaggttcggccgtggacgacgaccggccgaagacgtcgttcggccgaggaagtcttcgctcgtggacgacgatcggccgatgaagccgttcggccgcgagcggaggggtggccgacagcggtggaggggccgacggccggcgccggtggaggggtggccgacggcggtggaggggctggcggcggtggaggggccaccgacggccgcgctcgcggtggaggagccggtggcggtggcagagaccggtggcggtggaggagcctgtggcggtggatgagccggcggcggtggaggagccggcggcggtggagcgggcgcgcggtggaggggtcggcggcggcggtggcagagagctcgacgacggtcggcggcggccgaggacgtcggtctcggtggtggacgacgacggttggcggcggcggaggacgacgatcggagagcgaaggtcacaggcggggcggcggtggaggacggcggaggcgtgcggcggtgaaaaatttcggcagcctgacggcgccaaaatttctagggttcccgcctggacttagaaattttggcgctgcgggcttgcccttatatagggcaaagatcttcgtaggcgggcggtccgcctgcgaagatcatcttcgcacgcgggcggtccgcctgcgaagatcatctttgcaagcaggcgatccgcctgcgaagatctttttttactatcttcgcaagcgggcggtccgcctgcgaagctcttttttactatcttcgcaagcggatcgtccgcctgcgaagatctttttaacaaactggtaattgcacataaaaataattacacttttcaaatattactaattttaaattttttaactaaatttttacacttcaaatggtaattgcacataaaaattagtatgaactaattaatatgcaaaatgttgagtacaattgttcatcaatttgcgatatgatcacacatcaccttacatacgaccattacataactaattacttcttagatgcttacatgccactccacaatcattaccctttaacatttttgcccacactgtccgtgcgcatgtacggcttcacggtcttctgagtagatgtctcgacattcttaatcttctatacaaactgactataaagtggcatactatcgtattggttgtaatcttcgacatcttcaactccatccactcccaatatcttttgtttccctggtagcactatatctttcttcaaatttgaagggtctttcacataaaacacttgtgccacgcgattggcgagtacccaagggtcatccttgtgacccatactcgcaaggtcaacaaaagtaagaccgaacttatcaacattgaccccgttcgggtattttacccactggcacttaaatatggggaattgcattgtgtgcccatagtcgatttcccatatttcttcaataaacccgaagtatgattgtttttccccggcttcatcaattgtctccacacggacactgctgttttgcatacaggtcttattatctcgggctcttgtgctaaacgaatatccattaatgtcatatccctgccaagaatttactgtagttgatggaccacaagccaaccgcttcatagttatttcatcggtagtttctccctcaggtaagtctaggtctcgcaaccaatctatgaagagacgcttgtgttctttcattatccactcggtggagcgacccttattgttagctcgtattagttcgatatgttgatcgatgtacggctcgacgatagcaaactgatgaagcacgctgaagtgagcttcttggaatgatttgtgatcatgggtgacgaatctcttctttcctatcgttcccctgccctcaatctgccctcgtgtcggggcacaggtactccaattgcatatccatctttgaggtaatcgataaaacactcgacaacctcttcagtactataaccctcaaccattgatccctctggatgtgcacgatttcggacgtaacccttcagaaccgccatgtaacgctcgtatgaccacatttgatggaggtacaatgggccaagcgcaaccatctacggcacaatgtgaacaatgaggtgctccatcatatcaaaaaatgacggagggaaacacatctcaagttggcactgggtctcatgtgcgaatgtacggagatttcctaactcttcgagactaatgaccttctatgacactgcgttgaaaaagtagcacaaccttgtgatagcaacctttaaatgctcgcccttcttcatgccagcgcattagttccgcatctcgcgggtttgagtatatttgtttaatgcggtctttgacaggaaggtaccacattacaagctgcgggatttttctctgtcgtccctcaattgcttcagagggttctaggccagtattgctatttgacttgtaccggcttgcaccgcatgttggacattcatccaaagaagcgtactctttcctgtacagtatgcagtgatttacgcacgcatgaatcttttccacaccaagtaaaagggggcatatgagtttctttgcttgatatgtgctggatggtagtgagttaggcctcggtagcattttctgcagaagttctaacagactgtcgaaactggtatcagaccatccatgtctcacctttaacttcataagttcaagaactgaccggagtgttgtgaactcactgtcacagcccttcgactcatcgtacaaaacttcctttgctgccttctgtaaagcttcaaagttatttagccctctagccaaccccatcagcacctcgagttctgcatgacgtaacatttcctctaggtcgattttgtcctcaacagaaccatcgttatgcaccatgtcttcaacttgtgtcggaactacattttcaggcccgtccacttgttcttcgccatgaagtgtccatatttcgtacttgtccataaatccacgagttactaagtgctcattcactttaaaagcatcgtcaaagtcccaggctatttcattcttacagtcagcacatggacaaattatcttcctcatattgttcttctcagcgtgaaccttggcaataccaataaatttagccacttcgtttctatatggagacaaaaacctcggccaatgatacatccattcccgactttccatatctctaaaagttacacgtaaaatatttgcacaattaataccaaatttgtagggttcattgaaaaacttatcgctattcaaaactaattaactaaaggttaagtgtaaagtaataaaaaatcatagtttatttcaattttttttacacagacatgccaaattagtacattaggaaaatctaacaaaatcaaatcatcggcatattacaaaatactataactattttttgattgcaccgaataaatagacatttaaaattttattctctctctatacatgacaagatctagatctagatctagaactaggtggtggatatgatagcaaaaataaaaaaaaaatgagaatttatgttaccatattaaaccactacaacaagaggcatcaagtattacacatacatctaacatcaacatatgaaaagaaataaaattaaaaaacatggagctcttccttcacaattttggatgcatcgagctattttgccgtaggacctcccctacagtatcgtcaccgcagtagagtttaaccaccaaattcgggatggattggtgaatagacaagtaggacagtgctaccagctagttaactcagttcattcttgactttcggcttgtagctttgctacgcaacctcgcattcgaaattagcactatgaccgtcggtgaaaaagaatcaaagagaatggtccatgaattggctgggtttatcaaaagcactgcaatggatggcagagggtccatagtacccgaagcactagagtgatccagtagctgggaagggcgattttctattcactcatgatcggccctgacctagtcgacgtttataaaaagaacatcacctccctttttggttagataccgctccgttaggtactaatgcttctacctatcacccatccatcacaaattaaggtctaaaagcttaaaaaaaatgcatacctagtgtgaaatgagtagatctaagtaccgtagaaaaattccccgaagatttgaagttcaaaacctccccctatatttaagtcactttaggagagagaaacgtcagggagaatgaacagggctcggggaggaagaagactatataggggcatttttgcaggcgggccatataagcgtcgcctgcgaagatctatcttcgcaggcgcacgacgtctgccgcttgcgaagatcaatcttcgcaggcgacgcttatatggaccgcctgcaaagatcaatcttcgcaggcggaccgccccctccaccccgggtactttttttgccggcggggttttggctctgaattacatgcccgcctgcgaaaatcgatcccctacgacgccgaaaatgagttttctagtagtgtggtgtcccttgcttaatttactctattttagatcgagtttaagctaatacgagtgtctaagtttgtattgagggggtgcatacatggtgaaaatagatgaggtatagctaaaaaaatttcttgactgggttcctgggcacccccctaatatatactagctccgcccctagtggcggtggtcaacgtcgggtgctttcaccggcggtgcatgctggcgagtgaaggtgcaactataaggggaatccagcggcaggcgacgatggagataaaggtgcggtgggagacgttcctcgagctttgtccagcctctcttcgctggacgtcgtctctcactctcgtcgccaccatctcccatcggcgccgccgtatggggtcgtgggctcactacgcgccgccactagagctcgccgtcatctagctggcaaccgtagaagcaccagcaccaggtcaaaacaagctcttcttgcccgtctccaagtcgaattgttcccaactccaacgccaagccgctaataccgtcgtgctagccatcttctctccatctactactttgatttgctagctgagccaaacaagttggctcgagctttcaaatgagacgagcctcatcagctcattatcctaacgatttagaccgaactgagccggggtgactcgctatccacccctacttgcagccacacgagaaaatattgttggccaaccggtcagccatgtggagatcaaaaccaagctaattactgctgctgctgcatgctgaatgcagtaagatgtactccgttgtctcctacgtaataatacatctacatactagagtatagtaatacgttgaaaaatataggaacatttatagtactaaactagtcttattaaatttagcattaaaatatattttaatagttgatttgttttatattgaaactatttttatatttttctataaacttaaacgaagccaaaataattaattttaaaataaaactatgaaacggaggtcgtattacacatgcggcacaggacaaattcaacagcgacaagagaacgaagcggacaggagggagctgcaagcctgcgtcgtgcggcaacagtggagaatccgggcgtgtcgtgccaatccggtttggcagcggctgcgctgcagggagatgtgcacactgtagcagcgtcgtgcagcggtggacggcgaaggaatcctgacaggtgccaaaaccctccttagatccgggggacccccacccaccatacacgcatgcgacccactggcacgcggacgggtaggaataggatgtggtagcatccgaggaacaggggcagtttcgtctcgccggcgttgtatttccacatcaacgtgatatgagtaggcttgctgctacggtacgaagcatgggtgatggcctgatggctacacgactgcgtcggtgactcggtgtggctctagatcgagtcggtacggtattggtttgttgactcgtactctcgtactggtcattgggcggtacacgtgtatctttatctgaaccgataatggtgctatccataacgatcaacggtgccttcacaaaatcacaagcgaatgattttactgccttgctagaacttccaaagatacccgcttcagaaaggctttcaccgtctccactccaccaaacagaaacacagaatgcataatgtgtgattacgatcaggcagagtggtacacaggtactgtagtctgtaccctgtacctattaccaccattttaagcgaacaccatcaaactcataaataacctgccactcactcgctgcacactagtccttcagtttcagtcccctcgcatcgccataaccacctcgcccaaatcgaagcacactagagagccacaagacccctcctcccgacacaaacaaccaaccacactacccttcgcgctggtctcgaccaccggagatggccgcctagctagtgtgccggtggcagctggaaggcatgggctgctgcttcagcaagaagcgcaggaagcagctggccagtgcagctgtgttctcccgccgctgcaagccgccggccgaggcccgcgacccgccgcccccgccgccgttgccggaggaggagaaggtcaaggaggtgctctccgagaccccgagcgctaaggtcagggccgaggcgaagcccgtcgccaatgtggctgtcttggaggagccggaggcggagaagcaggcgccgaagcctagcgccgatgcggatgtcacggtgagcgatcttggtagctgcatgtcgctcgccaccgacgataggtccgaggcggcgtccgagtcgtccgtcgcgaccagctcggtgaccgggccagagcggtcgccggggaagccggccaggaggaagcgcccggtgtccgtctccggcgagctggcccatgccatttcccggcgcgaccgcgccgccgccgccgcctacggcgtccgctcccgcagcgcccgggcctcggcgtcccctccgccgcggcgcgagcaacgggaccgctcagtgcggaggtcgccgtcgccggcagcgaagcgtacaccggagcagcgccgcgccgcgagcccagccccgtccctccagcggaagccgcccgtcccggtgaggccgtcgccgcggcgggtgcaggaagcgcctccttctccgctcgagcccccgcctccaccacctccgcagccagaagaggacgccatgaccgccgacggcgagcccagcattgcggacgccgccagcgccggcggcgacggcgaggggaaggagtcgctggacaacccgctggtgtccttggaatgcttcatcttcctctagtggcgctgcactaccgccgtcgtgtcctccttcgtcaggtggcatcgcgctattttcctttgaaaatgttgcgctaatcttgtttagtttagatgttctgtgttaagctggtgtggtaattagtgggtaaactacttgtggtggtgtaatgctactgtcatattccggttattaacctatgtcgggtggaatgacagcagctttgacttttggcgtaggatgggccctccgattggaattggacggcgcttgaacgttggatgtttctttttggcttttggactagccctcgctgtattttgtagagctctttttcactaatcgtcaattcgtcatgtctaacctctgttcccatgtggagtctaccaacaatgtgcacgccatcacatggcgacctcacattttctgacttgttcggtgcgtgagtcatcggatactttcactttcgccccctgcccatgctgcgccatcgaacaatgtttccgtcagggacatccatccatgcatgcagcttttctgatctcatccccagattcagcacaggatcagatctgccaaaggagcccgtcaacctaggcaaacagatctagcgcccgggatgtgtgcgctggtgttaaacaaaccgccaatgctccgcttaaaattctcatcaaggtgacatgcggcgcatcatggcgctgcacgaggccgcgcgggtcgacagttctcgggatcgcgccttggttttggttcgcccgtagcgcgcaccgtcctgtcgactcggagcagagctgcgctgcgggcctgcggctgcacccgcttgctctcgtccccgtcgtcgttatgctgatctgcgttgcgcgcttgtctcccgtgtaaagatttcgcgccgcatgcgagctcacgggagcaacgtctgtgttggactgatggttgttggttccggtatcaacatctgactgctgttcggatgttcggtggtacgagacctgaaggatggcacagcacatggatgcggttggttgaagccaaaccccattcatgctgtctgtaggcccacgggaattcatcgagcaagtcaagattatctgaatttcttcatggcaaacccgtggtttcctgtaggacagttagcagaatttggcactagtatttgctagtactgtcgcatgctggcagcgaccagaatgatgaacagtggtgctaacacagggtggatttctaatcatcggcgaggactgtcccagtgcgtgcgtgattgattggtctctacctagctgtagcccgtaagagccgagcagaaccggttcaatacatactggccatactgctacgtgggtctgtttgtcatgtgggccacactgtcccgtattagtgtctcacgtaatccaagcttacaaatcaggattccttgtattgcggccgggagaatggagatattattatctccatcctgcttggacctgcggattctagatgtagaacctttcgtcctgagttctgactttttcatcgaaaggggcggaacgttgtcctacttcgccgtctggtttgataaaatacggtgaaattcatgctcgcggcggctagtgccttcacttcagccgtttgtccacggcaagcgtccaacctgtagcctcgtacgatagaggccgtgaatccgttatataaagaggacgcttaattttggggcctcccttaaactgccctgggctgtaacgtcttcttaaatgggctgggttattaattcaagaaaaaagtttacttaaggtccctcaagttgtcgttgaattccaaaatgtccctgaatcagaataacagacataacacattcctaatcttgcaaaatcagatcatattgatcctaggatagtattgctcccagttttgactgacgtggcggctgagtcaacgtgggacccacatggcccccgattttccacctttctctcatctccccatctcgatccaggcctccaacctggaagggggggggggggggataatggggagaggtttgacagtgcgacttacgggagaagaggtgtggtcggcctcctggtctagggctacacccgtgctgtgtgtgccgcctcgcgcatcatgctccctgtggtctcagcgtccctactcgtccgcctcgactaccaacacgtctccacctggtgtgtgtgtcctcccagatttccattgctcttcaccaaagcctcgccatcatcctctctcccgcgacggcaaagcactgcatcgtcatcgggcacaactggtttgccttctacgacgacgaggttgcccgcctcgtgaatgccctcaccgtcgaggagattcccttccattcgttcctcggaaagaatgtggtagtgttgaaggtcgtgttcacgccaaacctgatgccgagcggcttcactgtggcggccatcaccaaccacggttgagtcacttacacgactagtgggaacatcggatgaacctatgtcgagtgttcgcatcttggggatctcagctacggacactactaactcatgggaggcggcaaattgcatgtccttcgcctcaccgtcggctatcgttcccagtgaaaactggcatccttcgaccactgtttgacaagcctagcaatgtgttctatccggtggaataagattgggttgctgacacatagggctagcgtgggttccacgctgaatcaacagtcacgtcagttaaaaccagaagcaatattgtcttgggacataatgtggcccggttttgtacgattagaaatgtgctatatttggtattccggttcaaggacgattttgaaactcaacaacgaggagggatgtgaagtaaactttttccttaattcacaaacccaaagagagggttgggctgtaactcataaaactgaagattgggttgggctgtaagcctgaaactcacaaactgaaatggagatgggccatggccatatgactttttttcggttttagattttttaaaaaaatatttacagaaataatctatcggccaaaaaaattataaaaatagaccctgccacccacctctggggcggcaagctgacgtggcaaacgggggaggaacgggcggtgacggagggagggttttttgcaggaaaacccttgccgccctctggtggggcggcaaggggcccgaatgcaaaaaagccagtcggggccggctattttgcaggcggccccttgccgccctctggtcgggcggcaggcctcgctgcctataaaaggcctgctgcctagcccccagccctcattcttctctcctcaattccagtgaaaaaaaaaagaagagaggggaggagaagagaagaaggggcgaagccctgccggattcagacgccgatttcaggtaatattcatagatcctatatgtgactattgagttaaatagtgtgtattctttaaaaatttgtttgaataaatgcattatatttttagggttttagttgtactaatctagaagtgcgtattgtagatatcggtaactacgtagatctgctagtttggaatcaatacattaccgttgcattggcttacacaagaagatattacgttgtagatgtttattgcatgaaagagtaatatgatctagttatttcgttgacagatatgtcgaacaaacaaatattccaagtttaccatggaccaggaaacgtccgttacgggccaactggggtagatctgtcagattttattgtatcagaaaggggaattgatagaccggctgagatgagtgtaccttctataaaatgatggttaatgaggggcttgagagttgatccacagacaagtgacataacaatcaatgttatagtaagtcgggcaactgagggtttttattgggaactaatgccagttcaaaactctcgagtgtggagatggtatttggaaaatgcattgcaatgcgggtggcctctagctttggttccgtttgttcacgcgaaggatccaggtgtgcagatgaacatggatgatggcgagggaccaagtgctgaagtaaacgagacttctgtggaggaggtcaacgcacgagaggacgggggcgtagtagctccagtgggcattcaaccaggtggagtggccgacgagggggagactgtcggtgccattgtagatgaaatggagaaggaggattctgacaacgagcgtgtagaggaaggtgattcgtcagatgatgagacggatattaatccagcagaatgggctagtgaggatttttctgggctgatcgtctctgaagaggatagtgtgagatgggagtacaaagaaaatgaggttattcagggagcgatttatagtagagcagaagatatgaaggaggcggtaaaacattttgcagtgtcacttcatagagagttttgggttgccaagtcgaaccggtcgcaatatgaagttcggtgtgttaaggaaaaagatggttgtccctggagagtgcacgcgtataaggggaaatggaaggattattggacagtgtcagtcgttaccaagcatacatgttttctacctagtgttcagaaataccacaggaatattacttgtgcatttgttgcatctgagatgtatgcgcatgtcatcgataatctcacatatgaaccaaggtcaataatccgacacatcgaagagacatataagtatactattagctatgccaaggcctggagggccaaacaaaaaataatagagatgagatttggaacttacgaagcctcgtatgacaatttgtcacgcctgcttggtgttatcgaggaaagaaaccctgggagctcttacgaagtgaagaaattccccttaattgaacatcctagcaagagtgtgctgtaaagggcgttcttagctctacatgcatgcaagatggcattcgtgaactctcgtcctgttctctgcattgatgggacattcttgacaggaaagtatcggggccagatactaacagcaataggggtagatgggaacaatcaggtattgcccttggcatttgcttttgttgagagtgagaataccgacagctggtactggttcctgaaattggttaaaacaaaagttgttggtatgaggccaaatgtgtgcctgatacatgatagttgttggtatgacttaatcgtcctctcgagctcctcggggaaccgttggagagtcccggctatctccgagaggcgctgggcgaggcccccttggttggcggcgtacttcgcagtccgcccgccccagaggcccacttgccggccggcgcggtctagacgggagacggcgtcccgaagcatgctgggccctacctcgcctgccaagcggagggcctcgacctccccggcggacgagtctagcgcgccctgcagatcggcgatggtgtgttcggcagctgcgaggcgagcggttaagtcgctttcgcccgcggccgccccgccaatctgtgccctcgcgtccagctccttctcccgcgcctcgagcacagcggcccgctggttcagcgcggccctctcggcgcgggcatcttccagattacggcgcgcctgttcctcttgcgaagcctcgcggagggacaggctgtccgccagccgttgcgccgcggcctcggcctcctcgagagctcgctcccgctcggtgagcgcgtcctcgcggaggcggagtgcggactcttcttcggcacaggcggcttcgtgcaccgctagtgtgacctcccgaatagcaacggcggcctcgcgatccgccaggttcccctccacggcgcaggcacgctcttccagcgccatggcacgggcctcaagggcttcgtcgcgtcgccgggatgccacctcggtctccgccgcccgccgttctcgggcagcggcagcgtcaaggaccccctgggcggcatcgagttttttctctagctccgcctcccagctcccgtattgaaggcggagggagtcctgcgcctcgttcatcacagtggtggcgatgagggcagccccccgctcctcctccacctccttggcgatctcctccagcaccttccgacgggcttcgagctctgagacgtgccgacggtgtgccttgcggcccacttccaccatggcctccaccgagcgtcgcccctcttcgacacgcactcatgcggcgtcgagctctgcccgctctgcttgcagggcctccacctgggcacttaacccgtccaacaccgtcgtgtttgcgacggccaaggcctgcagaaggggttctgcgctcagtggagcaacagaaggcgtggggaagagccgtctcggtgaggatgccgcgcggctcggcccgccgatggacgtgccggactctgggatatcccccggacctagcttgtcctgagcgtcgcccgagggattgggcccaagcgatgcgcccgcggcctcgtcgcaagctgcctcagaagttgtcgccgcctcggcctggcgaagtctggcctcttcccgagcggcttcttcagcttggcgagcttggacggccacctgaacagcttcctcggcttctcgaaggcgatccgcggcctcttgccggtcagtttcacgggtcgcctcggaggatgtcgtcgcttcggcctggcggagtccggcctcctcccgaacggcttcctcggtctggcgagccagggcggcctcccgagcggcctcctcggcttcccgaaggcggtctgcggcttctcgccggtcagattcccgccttcgggcctctgtggtcgccgggtcctcggcctcagactggccggacttggaatggcgggagggacgcgacgggatctcgctgaaacagaagaaagaccagaagacaaaacaagatggatgagtgaaaactcgcgttaaaggaatgaatacggccatgatgggcgtgggacgaacctgcgagggggtcggttaaacgaccaccttggaggggaaataaggtttccccgggatggttctgtcccccccatcttgcggggccgtttcttcttccgctctccctcgggctgcgacgtcggcgtggccccctccgggcgcctgctgctggcacgcgccgccccgccccctcggggaggagataggggaggggttccttcctgcttcctcttcccccgggcgtcggcagggtggccgctccccgggcccccgtcgcgaggcccagaagcacgaccccctcccggggtagatcgttcccccctgcggctcccacccgcgccatcgtggcctcgaggagcccgctcctccgacgccccgaccgcctgcatgatggtcaagatggaggcacggtctggatcactgcagagggggaggactccttgaggaatgagggatgcctccacggagctgagattcagcacccgttggaccactatcttgaagtcctcaggagcccagtcccatcggaccccctggtgggtcctcatacagtcctcggacccggtgtactcccaggcgtcccgggcgcgccgctggagtggcgcgatccggcgacgaagatagtcgccgaataccatggcccctgtgagcccctgagatcgcaggcccgccaggcggtcgaggacggcgtcgtagccatctcccagatctaccggcgcccgccagttggaggcctgcgctggaggctggcttgggagtcggaggcgcgattcgtcggcgaggggggtgtagaaccagtcgctcttccagtcatcccacttcttgcggaggacgcagggaatgtagcggttcagcaccggcccccgcggctggaagtagcaaccaccaaccaccgacggcggcgaaaccggctgtacggtgaagaaccaccgaaacagccgaagggatgggcgcaccccgatgaacatctcgcacaagtgcgcgaagatggccaatgtcattaccgcgttgggggtgaggtgcgccatctggagatcgtaaaactccagaacatccatgaagaaagaagaaaatggcggaaccagccctgccatagcaaaagggaggaagaagacggaccgccccgggtagcgtggcgccgggcatccttcgcccagcgagactatctcctggccggtcgcagattccggcatgaagcggcgcagcagcccggcctgtctctcgctcacgatgcgggaaggcggcagcacgctaccgtcaagcggagcggagccccgtgccatgacgccggaagaagagatgtttgagagcgagcgcgtgtggcgaaggtagggcacatgaaacaaggagttagggcgcaagcggcgaagacaaggggaataatggcgagagaaaggaagcaaatctcttcctcggcgactttatacccttgccaacgctgtgcccggctcctcgtttctcgcgcccactatcttgccccctcgattctcgcgcccactcttccacttatcccattcgcccgtttacggtgcatgaggtggatatgcggctgtggcagtcgagatggaacatctcgtgcgcgcgttaattacgctcgccgaccgaagcgccatcaccatatctccaggcaaaacgaaccggcacgtcccgattcgcgcgtaatgtggcagtcttgaagagaccgttcattattgacagccgagtaaccattgccgatgtgcgtgatttgcgactgttgggtttctgcccaactgtggaaaccggtcccacctgtcaccaggccttaggaagtggcgtcacgcccgaccgcttccctcgaggagggtaatcgcctcggcataacgccgggggctactgtcgatgacatgggaccgggagtatcgtgactagaggcttgaggtagacacaatcgcccacgtggcctggcaccctcggggggggggggcgtcgggcccgagggtggtgtgttcgccctcctctttgtctccccgagggggtcggaccgctcccgccttggccccgagggctggggcgccccgaccccttgtggattttgcgccgcgtgtatgggtttggtgagcacagtggcgctcacctaactgcatttattgcggtttggacgaacgcgtcacgccgcgtgtaacgcagtgcagcgcgctcgtttatccggtctgtgaccagtcacagaccggtcagatcgtgggtcaggtggcgacaggcggtctgacgcacgcctcgccccgtccagtcaggacgagagtctccaagcactcgtccctagccggagccggcgtgttagctcctggagatgacacgttggttccggtcagatatataccaggcttcatcctaaccattacaggcaagatgttgtatgaagaagggcgaacatgcagattgttaaactgacacgtgatggacaagaatgaccgattggtgaccggtctgacaatggtcatgtcgtcagcagacagccatctcccacgtcgcgcctgcttccggcggaagtggaggtaggtatgggctgtcccgtcagaaggtgattcggatggcagcgatgcaaatctccgtccattaatgaagagaagtcaagttgaaagaaagggagggagagatggtgcatgtgggatccccttgagatataaaaggaggaccttgcccacttagaaaagaggaggaggaaaaaacgatcccaggagaatcgggggctgacttgcactttgtagcttcttcatacgcgaatccgccaaaacacaggagtagggtattacgcttctcagcggcccgaacctgtatacatcgcccgtgtcttgtgtgtttccagtctggcgaaccttccacagattgggagcttagaacctcacccagggtccccggccgaactggcaaaggggggcctgcgcggtctcctggtgaggagcccctcgctccgtcagcgagcgatagaagagttgcagtttgggagtatgaaacgaggataccccggtgtttgggaagatgtacagagtaggtggtgcatgcgtcatatgggagctaatttcttcaagcaattcaagaacaaggagctcatgaacatgttcaagaggctgtgcaatcagaaccaggagaaaaaattcaatgagctttggaagagattagatgagttgacagccaaatgcagtgatcagcgtgcagcggctccatcgaccgccgttgctgaccctcctcaagctcttcgacctctcccaatggatagtccaacattggttagaagaactggattggagattcggaaattttctcagtggattctgcatgaaccaaaagagaaatgggccaaggcgtatgacacaggtggtgctagatatggaataatgacaacaaatttggcagaaatttacaactgggtgatgcgcggtgtccgtggactgccactagttggcatagtggagttcattttacatgggacatgcaggtattttagggatcggttccaggcagttcttccctctatgccgaacaacagcattttgtttggagctttcatgcagaaaaagctagaggagttgcgtaaaaaggccatgaaacatcgagctctagtgcaaggtacccaacagcacaggtttgagatactatgtcaagataaggcaggcaggggtatctaccgcaagagagtgaagcaggagtgtgttctcaaagccgacgacacatgtcattgctcttgtgcaaagccgaagctgctccacaggccatgcacccatgtcattgctgccgcagcggagtgtggcataccagatgcagtatatgtgtcacagtacttcagtaagcaagcaatatatcatacatggagcggcgagatttatgggttcggcatagctggggagtttacagagactaacgatgaagtactcaatattcctgacccatcgaagctccgaggcaaggctggaaggaggaggactcgtcgcatccgcaacgatatggacgagtcggaggctggcatggtgaagcgttgcagcaaatgcgatgaacatgggcacacctacaagcattgtcctaaagacaaggagaaaccaagtgcggcggaggcaggactatcaggatcagcagcagatggagctcgccctacgggtgaaggcactacctccactcgaccacgtcctaggcgtcgtcgtgccacgtctggctacgtggtgtagttcttatgttctatgtcggcatgtggatttgcttgtaattcgtttcgaacttatcgatgtgtttatgtttcgtcgtgtaatgtcagacttcggcatgtcatgtctttaggtctcgtgatgtaacgtcggactaaggcgcctaacgtctttaggtatgctgatgtatgtcggacttcgacacgtaatgttatgttatattattgaactctacatatatgttaaattgcacgtcatcgttatgtactattagtaacgtttgctatatttaaatagcctgtactcttgttgtacataattaatctcatgattttattactattttataattttgcaagttatcttttgttttacattactattttttgaattgttctaacacgaaacactatatttttcagagatggcacgtcaggatacacctcagttgttggacccggcgatagatcaccgacaccggtctcaccttactgcggtgcagggggctcagcttgggacgttccgagcacgaacgtgcggtgagctactcacggttcacgactcctttgtcgagaggtacgaacagtgttttactataagttagttgcactgtaatattttttataatgacatattaatttgttattgcaggctatgtgaggccggcctcctaccgatgtgtcggctggtggaggctgcggccggcgacgcggacccggccagacgatggactgtggacaggtccctcctagcagctttggtcgatcgatggaggccagagacgcacacttttcacttgccgtgcggtgaggtagcccctaccctacaggacgtatcgtacttgttggggctaccgcttgcaggagacgctgttgggccagtgaccacggctgtggactggcaggacgatctgacggcacgtttcgcactagtacagcgcacaccgcacctcccgctcaagccgttggcacaccaccgcaacaccggacctacgaagaggtggctgcttcagttcaccgtgagtgtttttgtaccgaaatgacaatcgtattacatatttagtccgcagttaaggtgcctaacattttatcgacggcttgcaggttgagcagctacaggcggaggccgacgagtactcctacagccgatgtttggaggcgtacttgctctggctttttggctgggtgatgttctatggcggtcacgggcacgcggtcgacaagggactcgtgcactacgccaggagcatcgccgacgccgcggtaggcgaggtgcctcagtggagctggggttccgcgttgttggcggctctgtaccgtgcactttgtgagtcttgcacgaagacggatcccagcgcgacctttggtgggtgccctctctttctttctatctaggcagctgagaggattgcgatcggccgccctgaggtggaccagcacgcgtacgaggagtcactgtacgaggagcgaccagaggtcgactaccctacgatgggtactctgtggtgccgtcgtcaggtacgttgcatcgatcttatcgtattgttaagttaattgctaagttcaatcaggcgtacctaccataccccaccacgttcacatgtcaggggtatcactcgattttttgcgcctatataagtcgccttaacgagtgagacctcacaatctttcagaactcagtcacattcagtactctcttccccacttgcttcattacaaatccgaccggctttcgtcaatggctagacgccggggtgttgaggatccaaactggcgtagcgatccttgtgtatacctactaccaccttggtgccagcgtcctctctgcctatgcggtgatcgatgccaactaatggcttcgaggaatactgatattcgaggaaggcgcttttttaggtgccctaactatgaccgtgaggtattttattatctgcatatgcttattcatttcgtatgggcaatcgctttattcttcgtaacactactctattcggcagacccgcactacggcttgcgcatacatcgagtgggtcgatacagaaaatcccgttctcgacctaaccacttgtttacaagaaggtcgctggtatttcgcatccgaaagtactgagcaatacttacagagaaaagcggcttatgaacgacaatgtcgtgaacaacagagcgactggcgggtgctaactacggcactccctccatgggaagcccgtccaagatgcaggtgtggtgatcgttgtcaggttcttcgttccataaatcctacaacattgggtcgaaggttctttgtttgtccaaatattcttgacgacgatttcatggtaagaatattttgattacatgaatccttattttctcacaacatttactaactttgcttgctttacatctattctttcctcccaggaaccaccaaggagatgtcaatacagagaatggatagacaccagaagggttctaactccacctagccgtgttgtgcagcttgaactaccagagcaatacagggttactaaagcgcggtttgagagaggagagggatcctcacgtaggggttagctattatcggacaacttggcatattgaaatttttactgtcatgcttccttgtcccattactacatcgtcgttgtgttcaactattgcactacctccctcctagttcgaatctaatatcatctatgtaaccgcaatgcaaatagttatatcatgttcaaattgtactactatttcttcatgttacataattctccttgtttaagtccatataatgtttctacgacccagactgcgataggcctatataaattatccgagtactaatacgtcgaataaggtacaaaataatacctcacttaacatatgaaattgcgcaacaaccaacttcaatacatttttataacaatattaacaagttttaccaataaatacttctttatttattattaacataacatagaaaaatcttttggccgtacttttttcatctgggt

SEQ ID NO: 6589 - DNA, 143135 bp, Oryza sativa
ccgctcaccttaaagaaagacctgctatatagccaagctgctcaacagttcgcagctggttgaaggcaggctggctcgcaattaaagcaaacagttgaagtttgatatttgaaagggcatcgtccagatgaacctgaatataaacatgcttagcatcctcacatgcttctttctacataacatcaacattttttacttttcaaacttcaaattattgagacatcacacgacttgtaaaataatagccctcattagaagttaattttcttcccctcaaagaaaaaactgaaaatggggccccaaaaagctagactttacatcttaaactcatcaaaactcacaaattgcatccttgtgctccttttttttatgtcaaattttgtactcacaacccacaaatcgcatcttcaagcatatgccctagttctccaaaaagtatcaatagaacataatcaaacctgtccttctgattcagtccggcaaagccactgaaggaaacaatgtgtcatgtcccttgtgctggttcagtcacaagcaacctacttcttaacttcaatcagtgctaagcgaccaagagtgaagtgtctatgaattctgttaattctataaatttttaatattcttatttcagatttttattaaatttgacagtctgtaagcaacaagattcctgacaaacaatactagaaaaagagtggcaatgattttgttgcagggtatgtttttcaagaatagttaaagagcaaataggagacgatgattcattgagtagagcgatgattatatccatgagtctgaccctcccatttctttcaggggcatatagtaaaaaggagtagcacaaatgacaggagcaaaaccaagtgtcaccacgcacattccatataaaatcacaaacattagttccagcaaaaggaatttaatttaattgacttggatctgaagtggaataaacaaattatatgactatgggcagtacatctgtgaaacagataccttttgactagacaagagatgcccccattgttgctcgtataagctacagttattgacgaattctttttcattctaggcgaaattgttcaggaatttcacactaacagattgttttgatcaagtaattgtactttgaattagttttatggttgaatttgagtacttcatattactttgcatgcaagtacgacatgtaataatatttttagcaattagaagtaggtaactctcaagtctactgaattttaggaacaagttcaacaatttgtaatcaatttggtcaccattagttctgaagttactgatcatggatcagtagttgctttcgttaatagtagttgcattgcatcccttgcactaaagatcaagccacagggacatttacctgaatatattggaccactgatgaattttcattcttctgatttaagccctcaatttggtggtagcattttaactcattttcaagcatgataacccttttaatcagatattgtgatggagacattgatttgaacacagaattaggggtattgaatatagtatcttcaatctcctggacaatagatgttgcctcatttggttcaatgttccctacaaggagaaaagttaatcaataagtatgactggaaattcatcctgttacagtccattgcaaatatatctacatgatgaatcgactaacaagaacttctgcctaaccatgaatatagcattccaaaaatgtcttcgatagcaaatgtggcatgaactttgcaagagaatctggttcaagcttagaaagagcctcaagtttctcagccaaaggccatttctgatcctccaatatcaacgagagatagtatgaagcttgagagtatggttggctgaacttgaaattttggtagtccttgacagcagtttcctgtggtggtaggatgaaataaatcaatgaaacaaaatgacattgtattcaaaagatcctaattggtccatggcagagcctgttatcctatatttatcaacagaccgagaacagagctcattacaaacaagtacaagttatctgactatcttggataattttctggcaggtacaaaacaatacagcatgcagaactgaaaacattaataagattactaaattaggatatggagtaagaactgttatttgtgatgtttgctttcacccgtttgtctagattgctgcgttttttaagaatagatttgtacccaaatcttctgcacggcaagttatacatgtgatgtaaggctgccttgttttcacatcaaatccgtaacacggtaaacaccaagcaacaaacaagaacaaataaatcttaattatgtactcagagtatcatataatcatcctgtgtgttcttggttcccacaatatcatgtccataagttgaaaagtttgacacaactaagctttgattgtctaacaattacaagttgatagataacagttgcctaatgaaagtaaaatccagtgatcgaaaaaaaaattgatgcacacaaagttaaaacaaagagaacaattaaatattgaaacctaaactccaaaataactaaatctacttaccttcaaggcacaaaacctgttcggtttaacttcaaagttagatatatgcttcataatggcatctagcagaatccgcattttgtcattgtaaccacctactgagaccttacatagaaagtaaaaatgtttttagttctaattcaaactgtcctaataaagcaacctcatgatgcatgacaattctatcagacagcataacaattttacaatgaattttttttttggctggaacactccttggaaactaaatgagaacaataaagtagttcactgactaaacctggaatccagcagaagtgcgatatattgaatagaataaaccagcaatttgagcatcatacgctgcaaaaggcacaaacattttgtaaatttatgtttgaacttacagttggtgggagtagtaatacccaaatgggttattaatgtacggataaatatgctaatatttacactatttgtgaagtggtgcttaccatatgcattcaagtaatcagctaacaaatcaacaaagagactcgtagaaatgactgcctcgggggaatggcttgttaacggacagtggaaatcaattataatgtgaacctttggagtggagaacagcatgtcaggcttataccacaaccgtgaaagtggtgtctttctcaatattgctggatatttaacctgcaaacatttattttgtaagagatatttactatattcaagattcagcaattcatttagaactgtgctaatgtggggaaaaaacacagatgaggtgatctgaatccaaccttttcatgcgcttctttgagcgataaatcttttggaatgaaaatgttaggctttgggatacagagcttctcagtaggagctttttgaatccattgctgccaaagtagaacaatcactgacaatatgttctagcatattatctctatggattataacaagtgtccacattctaacagtatgtaatgtgcaataagataagaggaaaactctagttcaaaaaatcaagattattcaaaaaggacaaacctgtatcatggaaggagtaacattttcaacagaatacgctgtactataccatggctcaacagaatcagtagatcctttgaactttttagattcccacagtatcctggagacggagagagagaaatattacataaaaggaagaggaaagtcacaatatttagcttcatatggtatttttaagtgccaaactggatatctgtcagcttgtcagaaaataagtgggcaagtaaatataatgactaattttgggcataactttctaaggtcgcatatctggtagaagttgaaaccagtagggataactttctaaggtcgcatatctggaagaagttgaaaccagtagggatggcaaataatgatgcataattcttaaacctattaccactttttacttcagaaaagaacgaattcagaaatgtttgtgtgttgagatacctaaatagtagatactgtaaatagataggaggaacaaacaatgctgccatgtgaactgcataaatgtaccttactctttcagctgacaactcatcaagtatcatatttattctatttggagcatacttggacggtagtgatgctccaaccagccattcttctggtgggaataactgcaagcagtccaaaagatctttcatattgaagatagctaatggactacagatgaaaggtgcatttctccaacatatgtcagtccaacagagaaaatttagacgatagaatagttggtaatcggtgttatcacataatgctttgctggaggtgtatcagtaatgaatagaattgatcatatggaatagcaaacgatacattatgtacttaatgaggtattgagaagtatacccgcatggttgagacagtatctgtcacatagctgattggatggactttgtcctgatagtggaattccgtttcatttatcgccacaagctaacacatccaaaaacatgttaccatcacatttagtttatctatttaaatcatcccaatatgcttaaggcatgcagaaaaagattgatactataaataagtgaagttgatgatgagatgataaattgaaacataatgaggtcttgctaaaagaaagtacgactcatgcaaatgtttctttttttttggagcgtgactcgtatacaaatggttgtagtgtatcattaattgatagagtctattgtccagaattagaaggacatctgtcctgaaccctcataagttttcaaaactaacaggtccaattcaaatggaaaatataccatttgttaaccaaaatttatattcgttatagaattcactgaatgattaaaaccagtaaaatattccccaaaaaagtcaactgacgttgctaaagaaaacttttcctatcaaagatatgcaaagataagaaactcaattatgtggaataactcttgtttgggtaattttggatctctcaaggaaaatatcagaatgtcatacaagtatcagaacttctaaccataaaacatggatttacacattgcgtaagtccatgttcttttcaattacctcatcaaagatccactcatggatcccattttcttttagtagaagaatatatttgaaaaccaagccaatgatgtcttccatgtgttctgaaatcattgcatgtgcacgcaagaggcttaaataataacaacatgtgcttaaaacaaaatagccatgttagttctaattaaagatagaagctgaccatgaccagcatcggtgagcctcatgctaattgaaaaaaaggagtattgagcactgtcactgccctccccggccgacaaattcatagcccatcctaaagtagtcaaaattgagcatatgtcacatgtagaaagaataaactagagtgactatgagtagataaggaaggcaaaagtgtggtacagcaatcaactggtgaatgtacttgcctagttcctttataatatggaagatggatccctcgccttcatgcccaattaagtgactcagataacgggaaggaccttctttgtaaaagtggatgttgggtgtaacgggccatgatatttttaggtaatcgccttcagatatcgggattgctttgataacaagctgcacggcaaatttcatgttatttaccatcaattttttttcccgaaccatcgcatatattttatttttagtgattgttgcaagtattccaacttctccatctaccacaattggtgttgcttcaagtttctacctgcatatgctgctctgaaagaggttgacttgggcatttgaagcttctctgatcagtgttttttatgtcactaaacaagcgctcaacaaagctttggatgcaatccaggctctctacccaaaaaaaaaaaaaaacctcagtaacagataagtttgtgtgagaatggactaaccagtaatatttaccctttccataaacaacaaggtgcatcaggtttgctgaataattctcatagaacttcagaagctcctgtctaatgtccaatcccctctcttttggttttgtttctagcgtttcccaactccctgatgaattaaatgacaaattaggaataagaaagcaacaaaacatttaacttgtttcctaaattcaaatagtatttcatgcaaacaagatatgatcaccataagagagtagctaattacgatgcacagcaattgataggacaactgaccattatctgatatgaatttagattttagacttgtcatctctattttcatgaataaatgtatcatatttcaatgtgacctgaagaaaattgggatttgcaaagctaatataatggctagattttagcctgtttgaatcttcactatgtttctcacaagaaatgcaacccattaatcataaaggctgactggtcagaagttcacaatttctgaacacaactgtttgcataccagtactgaatttatgataggggtgatcctttgaagccagatgtttttggagctgcatggggaaaagtggaaaattaggtaatagtgaagcatgtgctatgagattcaaagcaaaggaatggaaagtactgtacatgctattttttactttctttttttattggaggaccattaacgtgtgtatagtctcaccaattgtttatatatatatttatataaggaaacatgccttgtaaataaagaatatatacatattctgtgagtgaaaaggatacataatcctatgctttaatggttgtagcttctgatacagtcatacagatttcacagtgttgcaaggaagaatacatgacacatcaactaccaaatttgaaatgttgcagtacctgatacattctccagccatcagacaacaagtttttcttgtgttctaggacgaaacaaagcaaagttagccaaaatatatgcttattgctactccaaattaaacaactgtgagttttgaagcgatttttatagggttgtagttatgtcatgttaactacccacattataagaagcataatacgatgttagatacaaatagcatcaccaatcaccatgtgcaaagcgaataatcagaacttaccagaatcaacagccttaatctctctaagaacagcatcttgcgacatcaatggcttaataaaaaactgagcaaatctgcacaaccgagccaccaatttgttattttccaataaaaagcatgacaatcttcagaacaaacccccaccatattcaacacagacacacacgcacacacatatacaataaatgaactaaaagcactaccaaaaaaatcttacctgtctaatgcttcttcaaaattggccacattgacatcaaaatagaaatttgttgtctccgaacttgtgtaggcattgcaagagccaccatgctgatatttttcacatcaaacaattgtcaaaaatatagtctaggtatgtgatttccaagcattaaaatattttttgatgttcgagaaattgtgcaaggtgtagctcttaaacaacttgcgacagatgacaagatgaggattaaaatgttattgctaatcaggacactgcccctcctcttaaacgtcaccacgacataatgccacgctggcaagcatgggatttcacttcaacagagcacgatgggatataacctgactttaggggaacaaccaaatattaaatagcagttggtctgcagtttgcacacatacaaaccagtttccctttctcgtcatctcttatattgtctcgttgtttgctacatttctactgatctgacatctaaatatgatgtaggtaaccctgaaactgggctgatctcatacaaatctgatgtggttgtgtcagcatatcatgatattgtgtgaataatactttaccccaaaatacaatgaaatgaaatgaagaccagtgtttctttatatttagagttgattaattgaaagtacctctgtgatatacttcgtgtaatcttgttccccagggtatttctcactggcataaaatagcatatgctctgcaaacaagaccacgacaataaatcaagacaagaaaacagataaaagactttaagtcaatccaggaattttcttaattcctgcaggaactgaactgaattgtgtgagaatactatataattactgtgaaatctatgtgttccaaagaatacttttattccttcttaatacaaagatgtgcccctcgcgtattcccaaaaaaaaaatctatgtgttccaaaggatgcctgaatgattactgaattttaaagtccagggtccgggctaacatttgtcatgctaatcattttctccatagtccattccagtacagtttgctttcatcaaacattttgcctttagatgataaacaaaatatttagaaaactatgcaactctctagggtagaatttcaatttaactttacatggtttcatctgcagtataccttcacataggggtgtaagtgggtcagccgcgaacccacttatagatcaaaataagcgggttcgcgcttattttagcctataagtgggtttcgcgggttagccacttacaccgctaccttcacatacatagggttggtactgtcacgaatgtgcagaaagtacccccccccccaagtacttgcaatgaattggtacagtaccccatgtgtaggtgactaggtgtagcgcaggacttacgataaccagtgagccaatgaattggtgcacccctgcgagtgtagctgactgatcctttatcactaaaaggtggaatttactcaccagtcaaaatcaatgcgttggttctgtacatatatagacaaaggtaaagggacatttttgtgagcaagctgacaaaaatcctactaggcaacaacgtgcaggagcagagcaagataaattatttgaagaatgacccgctctatttcctacagtctggccagctgaccatccgtgaataacattgtgccgactaaacgaaataaaaaggcaatatagaagggcgtctgctcgtacatcctgttaataaaagggcgtctgctcgtacatcagaagccacagcataggccgatcatgtgcgtcccgtacgatcaatcacggatgccctcaatggatcacgctgaagaacagagatgacagttccttcatcagaccatcaatgatctgaaccgtcagctgcatgatccgacggccaaaacaagtctgcatttccttcgcagaaaagaattgtacattcaactttatacctatgaaaacgtcattgacccacaaaagtagcagtggggaaaggtcgccgaggaatgagcatcccgattccatgggagacaattcgagaccccggccggatcccaaaaggggattcatccaccatgcggcgcaagcgaatcgcagagaaagggaagcgccaggtgtcctgtcgaaccgaacacgcaagtacccccccccatactgcctactctgattccccactacacgaatccggtggcggattgcgcacacgaaacgaatcgagaaaatcgaagcgaagtgagcggagacgagggacgagaagggagggagggagcggaagcgaacggtggactgaccgaggaagtgggcgaggccctcgagcccctccgggtcgctgaacgagcccacgccaacctccatacacgccgccgcctgcaacgccgaggaattaggggttagttaaacacacgcacacacgcatacgcaccacaccaccaaatcacgcgagaaatcgccgatgaaccgacgagcattctgcaagcgagagcgatcggggagggagagaccttgtcggtttcggagtcgctgatgaggaggcactcgagcgcgttggggagcaccacccggcggtactcccgcttgtcgctccgcgcgcggatgaactccacattgctctccgccggcgccggtgccgccgccgccgccatgtccgctcgctctccgctctccgcctccacagcctctgctctctcttccgctctccgcgcgatactccagtagttctccggggttagattggaggctaagcaagtggggtcttttgctcctcttatctcatctaatctattaaataaatattgacggagtagtacactagcagtgcagactaggccggggtggattggcttgcgcgggtttggtttggacgacgaattaaaaggacgatgaactcgttcgtgtcaccatcgggcttgtgcttttcgaccgccgaatgacgcgcccgcgcctggacgacggagagggtgacgtgacgtggctttagcggtcttgctcccagtgcggattccacgttagtaatcgcgcaccaggacagtcccaacccatagtgtctataagtaatgcctataattctatgtcagtaagacatcacaatataaactacactctacaatctatggttttttaaagtggaccattaataaatacatcatctctcttctctacctatcatatttattcttcatctattataaagacattattctctcccaatacaaaacttgatagtgtataatgcataggttctcttgttgaagctgtgtcttgcatgagacccagtttcttcctctcttcactctctctcttaattaatataatgccatataagctaaaagttctacgtagcaatgtagttaatgccatagacactatcctaggtggaaggttgggactgcacttagagccttcgtttctcccaaatgcagcacccacaccgtccgttctgtgtagctgcgtgcgttttgacgtggccttcggggaaattcacgcttgacgtgacgcggtcgtctcggctgatcggctctctccgagcgaagagattttctaagcgggcgaacgtgcgaagaagatcgtttattgccagaatgcagatagactttgtgattgggtggagagccgtgtcgagtcgacactcgagtctcgagcgtcatatgcgagtgcttccaagcgagcacgacgtggaggtgaagttttacacgatgaccctgcttcttccgtggttcacaaatcacaaagttcacatcgtaattagcacggtgtgttagctaaatgagaaaatatgtatggcatcgacgttcactccttttcatttttctaaagaaaactgctagcttaccgaatagcgtagacttataggcgaagttttgtcaatgagcaattgctaccgttcgcctttcagcaatttcggatgaagtgcattatgagaaagttgtagacacgtcacagctactactatatccaatgacttgcctcctagcattatatatatatactcttattagtaaacatttttttatgaaagtccacgtagtctagtggttatagtgacttaagtagtacccaaagtcctgagttcaaatctcctatggaacaaatttcagattgggttgtttgtggggctaagttccctatttcaattccctatttcaatggccatatatatccggttggatgtagaggccaggtaaaaaataccctttctttaaaaaaattagtataaacatttatgtttgcaatgcaatacttaggccatgtttagttcacactaaacttcccccaactcccaactttccatcacatcacatccaaaatttttctacacacataaactctcaactttttttcaactttccccaaacatctcccaatttcacaaactaaacacaaccttatgtttaatcccacctccttcgaagaacaatcacacataaactcttaacttttttttcaaactaccaattttccccaaacttctcccaatttcaaaaactaaacataaggtccaatttcagaaactaaacacaaacttatgtttgatcccacctccttcgaagaacaatcggaagtactagtgtgataggcaacacaaaggtcatttctattgttatttttaccttttgacgtcgacaaaggccgtagttgcatacttgcacgcgcctatgttcgcattgctcctctaaaaatatgtccgcattgctgaggtgtaatcgcactgtaactgaaggtgtgtgcttttctcacatatcagaggctgatcataatgtaataaatgaacatatatagctaacgcaaatgttataacgtgaaggattatgttgcaacgcgctaaacacaggtccaacactgtatcaaaactcaaaagtttcattcgcagagtatgcgtagccgaaatagtctactattccattatattctagccggcaccagttgcaaatctgcattttacagtgaattgaacaatgaaagtatagctgtcgaatcctctcaagctttctaaagtatttccaaaacagaaagaaaaaggcaccagtgatacacctcactaatgcaaccgttcttcataaacaattcctaaaaggttcatccgtgttgacgtctaaagaatagcagcctaacttgttctcctcgaggaacagccaatccagggctcaatggcaaaaggttgcagccatcacttgggcaagttaatgaagcccgtatatttgctcactgaacagatgaataactacaaataccaacttagtaccggtacttgatatcatctgcaagggctttggccaggagtataatctcatgaggagaatatttgcaacttgcagctgaataaacaccacaagttgcaatatttagttagttttagactgactctggggcgaggaatcagtaataagctccatctctatatcctgctgttttttgagatattcttgagctgttgatgtgacgatcttaatgaagaagttcacaagcacaagccacaccacagtgttccagaccaatgtaaaagagaaattccactgtgtatcctggatatataacataagtggacaaaaaaatgagccaagaaatgggatacatagagaagaaattaatatttgaaactcaatccacgggaccaatgttttgaactgatgacagtaaaataccaacctccatttttgaggatgatgtggccgatgttggtgttgataaatacttatccttcgcactgtggagctttgcaatcacagatggcaaggaggcagaaaacccaggaatgtgaccaaatatccagattaattccttttccataagatacaagagttgattgttgcacaaggagataataaataatgtctgcaaaagagagaaggcaaaatgcatgtgtcagcagcaacttttgggatcatcgacaagacaattcaagtggaatacagtagtaattaattcagttcaatcaggcttggaagttcaaatactgtagactccctgcaaaagtttactgtggcggcaggaatgaaaagagtgcaacgagaaaaatagcactggcttttaacatactttgtatggcaaaattatatatcctgactagaagcaggaactatttatgcggctaagggagaaaaaggaagttatgaaacagataaacaacagaatttctagaatttgactaatgcatggtctggccttttgtttgagagggcttgcaaaattttggtttattttctgaatgggcaaggttgagatagttttgaaattatgatttcaactgaataggactcaggaaaacatgctgacacataatgcaactaagaacgatttgccctgttaagatcattcacattgatgaaaagcgcacccccccccccaaccccccggcgaaaaaaaaagggccccaaagttacgaaacatataaatataagcattaacagaagattagacagacagcaaacctgaatatgggtcttgatgatggccttcccaatcaaagtagcaaagaagaactcccagaagggaatgccaaattgcccacacattataccagcaaggtcaaacagtgggtttggaacctagtaagcacaaagaaaattcattgtatggtaaattatttatccatcagatgttagtacaaaagaaccaagattctccatatcaccaccatctgttagctatggcattgatacggagaatgtccgcttcaactttttttagcaccattagcatcatgcatgcattgcagcagatcataactaatatactataagtctaaaaatataaaatgcataaaaaataattatcctctctaaaacttgtatacaatatacataattatatgagcaaagatgcaaacacacatgacacacgcctacacatatttgcagttacagaagatccggagttggatgggtgtagaacctaccatcaactccagctccctcttttaaagatgcatgagctatctatgttcagagcagtaggcatgactcgagaaagaggcccaaatgaatagtagcttgcatgtttgctagagaatccttatatgtagtttttgcaagaaaatccttactgctacaaataaattggcatgacaagatgggaaaaggacatagactaaccgaagcaagaatcaagatagtaatgaagttgagatgctgagagtgggaaaggagccagcgttttgttcgattgagagtggatgctattggaccatgttcatccgaagcagcagcatccagctccttcacagcttctggttcacttcctgacaaacgagctgcaacacgacacatcatttacttggtgtggttgaatatgacaaaagagacaggaaccaaattcagaaattaatgcatgggccaacacaatcgatcttctagaatttatcacaacactaaccgaagtttccaccacagccctaatttatggctaaaaaataacaagcaaaatcaagggattcataagatgtcaagatacaaagttaataaaattgtatggttaaattcattattaagcccacaaaaggacaaagtaggcaacctgaactttaaaaatgtggtgacaattgttctcaaacacaaaaggtggtcaaagatgacaaacagaaatggagggagcattattgaagttgaagaactatatacagtaatggtggaccatatattttagttgtgtggtactaaaattgatgagatgcagttatatagtgtgcaaggaaagtcaattcataaaaaaaaataatagaaagcagagtaaatcatgtgtacaattacataggttcaccagtactgagacgtgagaaagtgtaaagcatatagctaagcttctttacttaagaaataagcgttatgccatattaccagctcgtgatataaaataaggagggagctccccaagcgctgtgccaatgccccaaagaacagcttccagctgaacctgagggagtaattcaaagactgggatccggacagaatgagccgatgcttggtacactggtggtccaaaatctgaacacttcttgtccagccatgatggcccttgcttaagctgtatggtatcgtatggagcagttttcaaatcaatccgaccacattgaacagccttaatagtgaagagggcaatatgagggcccagatacagaacaaatgtatgcaaacctgaacctgaatttcaaagatattaatcttagttagtaaaaaaaaggatgagctcattttcatccgaagttcaaaatttccaaatttgaaagtcattaaaccagaagagcatccattgcaacaagcctcaagccaataaaaactaaaaaagcatcacttaatatttgctggtggtatatgcttttacacctctaagcccctaaaagttaaccaaagaaatttccagtagctggtcaaaatgatactacagaattatctggaattctgaatatccacaaattctgctcaaaagaacgctgagatacctttctctagattggaaagtaaaaggctaattgcagcagtagccctgtaattgcgaaactttatcccaatgcattaaatctcaaagtaactttagtgtgtaatttggcgatggtgtgccttttgctcttctagcccaatacgagtttttagaagattttttaaaggttcaatgaagtcatagtacataaatttaatgtgattttgttgttaaaattttcctgatatgatagagtttctaggtaagtaataactaataaaatgaaaacaatcattgttttttttcttatgttcatctcttcctaactaaatcatggttagcatgtgctttagtcactttcaacagtgtataagaaacatcagctaaaaatattatagaactagaaaggatataaaataaagtacagtggcacattatttacttccatatatataatggtatgtcataaatttgacagatgctagtaacacttgcctagtccaattgacgaagccacgcctagtgaaacccaccacaacacaaatctagcataattcaggaactcctgcacatgctgcatcagaaaacaaaatcagtattcaagcacaccacaagaagctaacataataaatcagtgcccttattgtcatgtctactcttatcagcacaagcactgcgatcgtaatcaaattacagtgaagtaacacacctttttatgcagaccatctgtaaccgcaagtaaaattccaggagctagcaccaacacaatgaggacaacaaacaaagcacccttactcaggatatatgttgctaatcttttcaagtattgcaacatagctaacatgaaaaaacgtaatgtcctgaatggatgctttgttagtgtcaaattctccagttccaatttgtgtttctcacggatttctgcaaaacgaaaaaaaaaaggtaaggattgaaaatggaacgccaaacatcgactggtccaatatagcaccttagtctacagctctgataataggcaaacctaactacatcaacatgtataatgtagataatattcaaatgactaagtcctgaaccaaagagatcatacaaagcacagatgttggggtccttaactagagaggatttttactgtcttgccagccattgctcatcagctaaataaaaatcaaagtagtaacacaagaaccctactaggatccctagttatcaagggagattggaactgccatcagcaagtgaaccagtccaatgttaaactgccaagttcattgctccaggatgggagaagattcaggaactggcgcacgcagtgcggcaattttacaagactctaaatggtaaaagtatatacatgcaaccaaacaaaattggagatttgattagctttcctctgatttgagttgtaacatatatactttgcagttcaaccagtagattaatgaatagctattcatcgattcgctgtatcagtaagcaccattacattgaagaatgaacagttgtcaatacattggccacaacaatgacctcaagtattctcttatatatatcctaatttaatgtattgcctcaaatacagacttggtgtagcacattccaaaggaaaccaatatcagttcagaatatactaactttccatagacagcatgcatttcttggtgatgtgcatgcaacatgatatagcatataaaacacagaaataacacctctcaattacatagtacacgtgcacaaccagctaggcgtatagcttaaagctgagacggtataggtccccatcgtttggcttatttcctaataagccaaaacggcttattagaaaataaaaatgaatttataggtaaaacttttataaatgtgttattcgtgacttaaagccaatgttgtaaaagaaactacgttgaaaatatctcaaaatcaatctcaaaattaagcttgaaaatttaaattttggctttttctttggctgattaggccatccgatgggagccatatttttgcggggaaagctgagactttgcacgcattaaacactgagagaacaaaaccatgacgcaacatatacacgctacgtcacagtcagctagctgatccaccactgaatccgatcaaatacactgcgtctcatgcttcggatttataggtattccaaatcccacaaaactaaagcgccattcgaaatcgcactcccatcgtatagttccgatcccaacctcacagagcatcccagtagcagcaagctccgatctaaaaaagcccgcaatgccttgacactaccgccaccgcacgcatcgaaaccgaaggcgaaggcgaggatctcaccggatatgacgccgcccccggccttcgacgagccacgcggcggcgtcgcagccgccgccgcggcgaccttccgacgccccatcgctccctccccacccccgaggcgccgaaaaccctagatctcgctgccgcggctgccgccctgcggtaccgaccccaccatgggccgcccagatcgcggggggggggggggggtcgaagctcctaggtctccggccagtcagccggatcgcacgccggaccgggatgagccgccgtccgcgacgccggcggcgagcttgtggtgggtggtggacgcggcgcggcggttccccgtcgagcggctcgtatttatgtccgccccggccgagacgggaggaggaggcgatgggggagggtggggtgttggaaattttctcttcgattttggaggagcaaagcgaggccgttgttttccgttgtggcagaggttgtgggggaatattactcggactcgcgcgctgaccctgcttgcgggacccacgcctcgcctgtcatggtgggccccaccccaccagtgacacgagctcgggataagagccgtgcgcgtggcggagtactggagcgtgtgtgcgcagcgcaggtgaagtgcgcgcgaggtggaagaagcgatccggagaactaactgcaggtgggcccgctgtgtcagtgtgtgcggcgagtggagtacagtacagttgagtgggaagttgggtcttgggtgtaggagtagtcgtttggcgttgcttgcaaggcgctccaatagatactctacactcctcatcgctacacgagtagagaaaaaatactccaatttgataccctgcggaatataaaaggaaggaagatgctgtaccgatctcgatctcccatggaagattagggtgcttcaccatttttgtaagggctcaccagcctctcaggtcactccaatccatgtccacaagaacatgcgtacgtagtggtagttaatactaccagggccatggctagcgacagtactagtgtgtggccctgcagagatctggagattttatattccaatgtcatgtaatgtgacaagaggggacaaaaaggcagttagcaaatgtccaacgtagctgagaatatcgagcgttttggcggttgttttcagctcttgatgcaaagctggagtatatgtctatcatgaaggaaaggatcgattgtatgctatgctttgtacgaatttattttgtcttggaatttttcacttcgcaccattctgtgcttttctgtgtgcacttgctatagttgagtaagggattgggtttgattataaattcgtcattttgagaacgggacgatggatttaaaagagcaataaaggatcagttggagtgccgaactattgatgactggagaagaaattaagaaaagaagctgtagctcatcgatctagtattgatgagcacatgtgctggagtttgttggcctgttgcttgtgttttttccaagtatgcaatgaatgggaactgtctcttccagtattaacatgtgggggccttttagatggacatgcgggggccctggtacgacgatgatttttgatcttctaatcaggagataaatgatttcttaattattatgcttccagaaaataattgtcaattcatgatatacatatggagaaaagggaaaaaggcacaacgcgatgagtttggaacattagcttgtggaagatgttaatagatgtggagaaactcccggaaatcatatatgtgaaatcatatacttgtacaattaaagaaacaacttctatgtgcgaatatgaacaattgtctagattcgcccttataagttattcttttccttagagatagagtacagcaaaatttggtaagtaatattgttggaatttgctagcgatctagtagtaacttttttcatcaaaaacaatattttcatcttattaaatttgaattcgagccaaatattgtaccaattataattgttattgaattagacctagggttcatctttttaatgagtgccggaacccaacctaagctgtgtttagtttccttcaaacttccaatttttccatcacattaaatatttggacacatgcatggagcattaaatgtggacgaaaaaaaccaattgcacggtttgcattgaaattgcgagacgaatcttttgagcctaattatgctatgatttgacaatgtggtgctacagtaaacatttgctaatgatgtattaattaggcttaatagattcgtctcgcagtttacaggcggaatctacaattcgttttgttattagtctatgtttaatacttcaaatgtgtgtccgtatacgtcatttttttttgccaaaacaactaaacacggcactagtggtatgacatttttttaacaaactttcattaaattttagtcaaaacttttactgtttcaatttaaattctcaaaaactatttaaaatttcactcaaaatctacttccgttccacatcgaaacctcaaaatttcgtggttttccacaaccctgattggacctccatgtccacaccaacccaattcaactctgacatccaagcgtaacctaataaaagcccatgctagaatctctgaacggacattgatagcttagctactggttatactaataaaatcacattttgcatatcgtgatgggccttgagttgacactacaccacctgatcgcatcgcatcgcttcaaagaatcccaaaatacaggtccaccctaatcacgcttagttgataaacaaagcgccctgacataagcaaagccccacagtttgatcacgctcgttttttggcgattgcaaactgcggtgctacattcatcctaaattttttactacctccgtcataataaacggttattatcttttaaaaagttatcataataaagtagtaattgttccatcaatcatttcttatttatttttttttcaattttatcctcaaccaccctctcatttttggctatacatcatttttttcccatagcatttctccacagctatgtttgagaaatgaggaataaagaagattaagaagatatgcaaaactagataagctattagtacatagtacctccgttttaggttacaagactttctagcattgcccacattcatatatatgttaatgattctagacatatatgtgtgtctagattcattaatatctatatgaatatggacaatgctagaaagtcttataacctgaaacgaacgaagtaataaattaagtattgattattttttaacttgaaaaggataaatatgatttttaaagcaaattttccatagaatttttttttcaaaaaatacaccatttaataatttgtgaagcgtgaacacaaaaagcaatgatcttttcttctctttgttcaagtctcaaacacaatctaaacatagaaatataattataattattttgaaatagaggtagtatatagctatttttttatcggtgtcttgtcctaaaatagaactatttctctacttaccacatcctctcaaacaatcacaaattatttaagttattatcttcagccactttctcttattaactaatcgtaattttcttcccatcatttaaactagctgggtggcccgcgcaattgcgcggctagcacccaaataaaatcatatatttttttagtatgattttacttaaaatttattaaatagctatctcatgtcttaagagtttgaaagattaaaccttatcatccccgtgtttctaattatatatattttaaaagtcacaccagttgctaccccttatgacatctccttctttatttgcttgctcgatctaccactatttctattcattctccttgaaacctttaaaaattggatcttatagtttttagagtttattgtcacgttgggtttcgtttttataatttctagacgtcccgtcaaacgttgccattatattcctctatggcccgtccactgtctcttttctttattgtcattgagattttaaaaatcgaacataattatcgttttggttcatttttactttctagaaatcccgccaaaccgtcaacggctttgccattgtacttctctacggctcgctcgctgcgtcccttctttattttcattgagattttaaaatcgaacatgattatcattgtttttttttactttttcgaagttcggaacctttaaaaattgaaccttatagtttttagagtttattgtcttgttgggtttcattttttatatttttttagaagtctcgtcaaacgatgccactatgctcctttatggcccgtccgccgcctactctttctttattatcattgtgattctaaaaattgagcataactatcgttggaattcattttttattttctagaagtcacgtcaaacatcagcggctctgaaactatactactatacaccccgcccactgcttctcctttttattgtcattgagattttaaaaattgaatatgattatcaatggggtttttttttactttctagtagtcccggcaatcgcattgctcatttgcttcatggcctgcctatcgtccctccttttaatcgtcattaggattctatttggtgttttattaatagtttttatatgtcgtatcaaccgccaccactctactcctttataggcctgttacttaatttatctcgtcatgtgttttagatggtctttctttcaatagtctttatttttatcacaaattttagttatttataaattgtattcaattaaaatcttatttttctttttctaatttcagaatttatttttttcaaattttaattattatcgtattgtgttcttttagtatttttattttaattttttattttcaatttcagttgtttcaaaattgtattcctacttgaactctcttttaatttttctaaatttgaatattattttattttttattctgaattttaattaatctcgtattgggttattatatggatttttattttaatattgtttatttttaattccaaatttcagctaattttaaattgtattcctacttgaactcttcttttttttgctaatttcggattttatttttttattcccaaatttaattaatctcgtaattgggttcttatatggactctttttttaatattccttattttaattccgattttcagctattttaaaattgtattcctacttggactatccttttattttctaatttttattttattttagttttattttgaattttgattaatcttgtattgggttcttatatggaaacttctttcaatattacttatttttaatttcgaatttcagctattttaaaaaaaatttctacttgggtctctttttttctttctaattttggattttattttatttttattttgaattttgattaattttgtattgggttcttatatagaaacttctttcagtattgcttatttttaattctgaatttcagctatttttagattgtatttctacttggactctccttttcgtttttttctttttctccgattaatgtgggaatttctagcctccacagcgaacgtggtgccttctttcaaagctgtattttattataaattaaattttagttgttaaaaataatatcattggatattcatttaaatttaattttatatgattatgattttttttgctacaatgaaaattttaaagttaaagtttagtttttaagaccgtactaaatttgaacactccttagcgagttggacggagtgatgtatctctaccaatgcataagttttctggtctatttactctttttttcatccataggtaaaaaaatcacattttaattctaattataccggctctaaaatatatatgcacgcattgtgtttgaatcctaatcacctgatctgttgattgatccttagtatccatctaggataaggaaagaatcaaagcaggagtacgtccacctatttggacttgtattctaatacttgatcagtgttgtccgtttgatctagcagttgttttctattcagacttctattatcaaagttaatctacaccatcaaagtctagtcccagtataatctaacggtctagatttttcttttttctccgattaacgtgggaatttctagcccccacagcgaacgtggtgcctcctttcaaagctgttttaataatataatagatagatagatagatggatagatttattttcttaattcctctatcttaactaattaaaaaattcgtaattttccgatcatcacatctttttgtccgcgttttcgtccgtcatcactctatttaccaatcgtgtacgatggaaaaggcataaaatcaaatcaaagatcggtatgaaattcaattgggcagctccataaaaatttaatcgggtaaatctacatgaaaaaaaaatcaatcaatcggagatatacacatcgagaaccctagaaaaaagaaaaaaaggagaggaaaaaatcgcataaatgggcgagcttaatgtcaccgaatccgattgatccgagctcgttgccatagccgtccatcgcactcatgtcgtggctgcgcccgccgggcacggtcacactcgccgccttcccaaccacactggcaccccctccctctaaccccccatcctcaggtgctctcctcctgctcggaggcagaggagagaaagagagaaggatggcccgcaccgtagccccaccatcgaggccgacggggagaggggaagagaggacggtcgtcgtcgccgctgtacccccgtcgagcactcgccgacgcggtgccatgccggcgatacgggagggagagggggagatggagcggcgccgccggtaggggagggagaaggggagtggcgccatcacagcggagggggagaggcgccacctacgctgtcgttttgagagagaggggaggggaaatgatttaaggctagggtttaggttgcagaacttttatataagtacagatcaatcgggattgtcgatcagatcggacggctccaacttcttccgtgtcgagccaccattcccaggccaccacacaattgggccgcttcataggccacgtgtaagcgcacggaatatgttcagtttaggtcccttaaggctgagttattttcttttcacctctctcattttttacgtgcacgcctttcaaactattaaacggtacattttttgcaaaaaatatatagtatatactaaagttgctttaaaaaaaatcatattaatatatttttcaaattatttttagctaatacttaattaattatatattaataaactaccacctcccgaacacattgtccccaaatctgaaattcgtccctaaaccacaacaccatatatgacatgtctatcaactcctaaaaccagtgcaaataagatcctaagacggtttggatggtgatttgagctaatgtggcgttgacatgacatgaaaagtaagaaaaaaaagagtatctaattaaaaataaaaaatatatataatgggatcacgtcaacactcatcgcccctctcttttccctcttctctcccttcctcctctatctcccaaggtagtcgcataacaaactgaaaaaacatagtggctccaggtggaccatacaacaggtgtacggccgcaaacccacacgaagaactcctttctcacgtggctcatgcgtcgcgcgagacctcctttttcacggggccggggacggtgagaagcgtcggcggctcatcatcggctttcatcgcctcgcctcttcgttttcggttgcacgctcgcttgtctggttgttgatcgatcgatgccgtgcgaattaccctgcgtttgcgttcgttcatctgcctgcgttttccacgcctctctctgcaactggtctacacaggcatcatttccacgcttgactaaagaggccggagctagcggcttgtgagacaagtgttcactgcgattctgcgagggcctgtccaggactccaggtgtcctttactcccggtttcttaattgtttcttaaccgcaggaaccggagctttaatccacagctgaacggcacatatagcagaaaccatgcctagtagtaactgtcgattataccaatttaccatgacttgttactaccagtagtattttaactgcagttgatcgagggcataatttacacctgcttctgcgatcgagcaacggcgcgagaggggggtcgccgtacgcgagagatttgctacaacgacttaccaccagaaagagatcggccgcagcgcgcgctgccgcggtcgctcgaggctcatgcgtcgcgtaacgcgtatgattgagcccgccgcaagggagtctggcgtgtcagcgagagagatggagaggagatgcgtcgcccgcggcggccaagagagaaactatcgatcgaagagcagagcagtgtgcgagactttacccaagtgtaaagcaaagccaaaaaggctactagacctttttatctgattcacacatacgcagtttacgacgacgcaccatacattccaccaccaacctgcctctctctcgtcttctcgatgtgcagcagcagcggcagtagcagcggttgttcacatggtcgtcgtcggggctcgtcacggctcctccgctcctgcttcggtataaatgtgaggtgcagacgacgggcgaggaggttcgtcaggaggatggggtggctccggtcgctcctgtccccgctgaggaggctctggtgccacatgaacgccgtgcagcgaaagagtacgtcccaaaatcatccactcctcgatctcgctctgttgtttcctctgattctgcttctgcctgcacttatctgacggtatgtatcaatggctgtttggctgcagagagagggatctacatcctgtacgacgatgtcaagtcgtgcccgtgcgaggacgtgcacgtgctgtggtcgatcctcgtggagtcccacggcctgccgccgccaaccccgatgacgacgccggcgccggcgccggcgctgaggccgacgcggtgagtgaggacaaccgggcagaaacaagcagcgcccgcattaatggcacccgcggctaataaggagatcgaggtcgtcgtggcccatcggagatgaagtggtagaatcattgtgggtgtaccgtgtagataggatttaggacagtgtttggtgctgtcatttgatttggcggccttccgtttcatcggcatctctcttggagcatgttgatcggatgggttggccggcggcagaatgcagctgccgcagtggggggctccggcctgatgagtgtggtgatgggcttcttcctccctggagcgcacccctcttccgccgtgtcgtctctgttgatttggatgcgattgtttcgtccctctttggatgagtggcgaagaagaagatgaacaggagttgaatctcgcgagatttatgcgaaattgacgtcgcaaccaactgtcagcgttctccccattgccgctttctttgcgcgcgcgcacgcaacagagaattgatcgtgttcgtaccgaacgctcgagcaggaaaacgctccattggctttcccctttatttggggagtggattctaatccctcgagggacatcccctcgtatacctttttcttttaaatttaatataaatagttgtgaaaaattttaaaaaaaattaacaatgtagagtataatgatacctactagtccaccaaaattcatgttcaaattcgatctacacatcgagaaaaaaaagacaaatttagatataaacagtacgctactattcatacgctaaatttgtcttttttatatctcgatgtgtgagttgagtttggacttaagattttgtgaagttgtatatatgtgttgtatgaatgttgtcaaattttttcagaatttttcataaccatttaaatgatttttgagcaaacgagggaacatcccctcgagggattagaatagtttccctgtacttgtttctctctgtttcagtacggttctgggccgaacgctctgagcctctgattaggaggatctggcctacccaaccctgcggaaaatgggcctggatcatcggattgggctgcatcagaattcgcttgtagaccatggacgcaagcccccgtaaccagtagacagcgcggcacggcagaggagttgtcatctcaacgccaattcaccatgtgccttgccgcgccgcgccgcgagcgcaatcaattattccgccgctctccagcgacgcaattgcgggccccgggccggcgccaacgaccccatcccgcgccgggcggactccctcccaccacgatgaactgaaccagctggtggcgccgagccgccaagccaaccaatcgattccaggcgcgcgacagcccgcccggccgctcgatcgtcagcttatattaagctagctagccaggccgcctgaaagctgtaacacaacgcaccgcgcgtagctcagcttgtatataagcagcgcaccatctccaatctctcgcacacacacccaccgaaaccagcagaactcgtgtcttgttgcagtctcccccagccctcccttctccaacccagctcgtacgagatccgatggcggggcagctgaagtccaagatcgtcgccgtggcggtggccgccgtggtcgtcgtcgcctcgtcgctggtcggcacggcctccgcggccgatgcgcccgccccggcgcccacgtcgggcgccaccgccaccgccgccgcagcgccagccttcgccgccgtgtcggtcgccgccgcggctttgggaggttacctattctgttaggctggttgtgatgcagagagagcatatgcgtcgacacatatcacgtatgctttgagatttgttgttgagatgcgtgggtgcaatttgtttcttgatcctggggttgtaattgctcatgtactctcatgtgtataccgaaacgtgattgattaattacatatgcattgattatttttgggtcgcaatttggaagtgcaaatcttcgtcgtgcattcttttacgatcgcaatttggaggaataacgtggacacgtctaaggaggtggttggcagtagttctgctaaactagaaactgccagccagaaaaacaactccagaaccaaattggaggctgatttggatgcgatgagttagttgaaattttttgatagaatgaacgctccgggtagcagacgagcaattcgaaaaattgatggtgaaatgaagcgaaaaccgctcctttcgaaaattaaagcagagaccgagaacaaggattttaattcaattcacgaaagctctgaatatgaacgacgcttttgtacgccagccaagaggatttggcgatcatcatagccatgtgcatgtgacaagagtcactgttggatcttcgaacatctatttaggaaaaaaatcctcctttgttcctgtaaataattaactatgcaagaagacgcaaaaagagtataactagagttagtttacttctaagctaattcattctgacaatcgagctgctactgtaaccagaaggccattgatcatgcatccatacaccatactgataaaaaaaatgatacagactgtttttatctgtcggtaggcacgattgggtgcaccgtgtacagattgtttttcccccatactataataagggttttttattttttttaaaaaaaactagcggaccaggcgggtgcaatggtgcatgggcagaagtcagagcaccattcaggcatccactaatcagaattgaacggtcaattgtgtttgaggtgatcgattcattcccgtaataatttattcagatttgcaacgtggaatgtgtctcaggtgatcaaattatttccccattaaaatttacatgaatcagaaattgacagtggagaaggtgatgatcgatcaacaatgaacaaaattatatatattacttcatgaaatactgtgtacacgagctgaacgaatacatcaatctatcagcttacattatatatatccaacaacaacagacacaattgcaaaagaaaaaaaaaagagaaaaagaaaaacatttatcaattaatgcatataacctccgcggcgagagcgcaaccggtccagaccgaactgacgcgctcgcgagctcagcagaagaggtacccaacggcggcggcggcgagcgtgccgagggcgacggccggggcggcgttcgtcgcggcggcgccggcggaagctccggacgggccaggagccggggcctcggtcgcggtggccacgccgaccaaggacgacgccacgacggcggcggtggcagccgcggcgaggatcctgagcttgagggtggccgccatttcgatcgctagctatgaatcgactggagatgctggcaacggagaattaacgagaaagctagcgagggcttgggggggggggggggtgcttaatttgggatgaaaagaagagcgagaggtgtcgtgtttatatagctgcgatcggggaggcttttaggctgtttttgcgttgcatgtgtgctttgtttaggcagggcagggtcgccttggaataaggaatggattgcttggctgggagttcctttcacaggctggggcattgttaggtttgctatgattagcagcagctggtatagctggggtgattggccggctctgaacgatcagcagttgttgtttctggtttgttaagggaaaactaacatgcgcaggttcaagtgccaactggatgatggccccgcgaaattcgcagatcaacttatttgctattgttaaacaatgaatgaaatgaaatcgcagaaataatatatctaacggccggccggttataatggttgttcgtttcgcagaaaatttgatttgttcgccgaacacgttccgtcttggcacgtggatgatccgcgtgcatgtttgatgtggtccaattctaccatgcatccgtgccggtcgatgcaaattggtgtgttccgaatagcatgttccgatctattagcgcgtgattaattaagtattagctaattttttaaaaaaatagatcaatatgattttttaagcaactttcgtatagaattttttttttgcaaaaaacatatcgtttaacagtttaaaaagtgtgcgcgcggaatacgatagagaggggttgagaacccaaggttccaaacacaaatcaagtttcgtttcagatttcagctcatggttggtcacgcgcgcggtcgaaaacgcctttcgattgtttccctgttatttctatcgtgaacgtgagcagtaatcgagatcgagtcagccaactcgcacgcacagagttgtcctccgagtataataggtaggggtgggcaaaataagaccgaaccgaagaaccgaaccgaaaagatcgagaccaagaaattcggttagtagttcggtcttagccatcaaaagaccgaatttattttgggtatttcggtcattgggctcggttaaccgaattttaaccgagaaaaccaaattgtggcccaataggactagaaggcccaataaacccaataaattgcaaaaccctagaagtccccactacctcagtccctcacctaccagcgctgcctccatccatccccaccccatccatcacgccgccttccgcctcggcgccgcctcccgcctccgccgaccgccatggtcccgagtcccgacgagcgtcgccgtctgcctcggcgctgcctcccgcctctgccgcgtccccgacgagcatcgccgtccgcctccaacctccgccgcggccacaaggactgccgcctccagcctctgccgtgaccacaaggagcgccgccgtccacgtcggcgctgcctctagcctccgccgcggccacgacgagcgctgccatccgtggtgctcctggctagcagtggcgtggcgccgttgcgacagccatagccatggcctcgccaccagctcttgctgcccacctgcgctgtccaagaattcggttagactgagactgaaaccgaaaaaaccgagatcgaatttgccggtcctgagtttatttggatgaaattcgatcctgagttttcaaagaccgaaatgacagaaagatcgaagaccgagaccgaatttttcggtcagaccgaacgcccaccctagtaatagggatcctgactctatttggagaggcctctaaccttcgtaccaactatgtcaagtgttccgcaattccgatcaactgctcggagaaagaggtcgcagtcctcggtgactctctcctctgcccggttgaggcgttatcgtgcaagtatttagttgaggagttatcgtgcaagtatttgggtttgtctctctccatcagaaaaccgcaccacgaggaccttcagcctttggccgacaagattgcacaacgatagccgctgtggagatctgattggatccatccagccgggcgcctagcgcttgtcaaagttatgctgagcgcgatcctggttttatctgctcattgtaatccccccaccccttgaaatgggtgctgaaagccatcaacgagatccggcacggcttcctttggtgtggttgtgcaagcgcacaaggtggccattgccggctaacttggtcctatatctgcgcgcgcactggaatatgaggggttgggcatccacaacctagagctcatggggatagcgctccatactaggtggttcaaagttctgagggagcgtcgtcgtgggttcgacatgattgtgacccttggcgcttggtccatttggaaagaaaggaacaactgtgtgtttaacaactatttccgatcctagcctgaggttgtcgcaggcatggcacaagaggccgccctttggcggcttgcccatccctcaccaccaaagcttcttggttagcgtgcttggtcgtttggttgtcacactgtaaacgcgagaataggcttaagtacttgttttcatttttttcttcctttttctcctcgaccccccttacttctttgtttgccgtctatgtaaattttattccttttaatataataaaggtgcacaattcttttcttttgcgtattcctgaaaaaaaaccatttggcgtagctaggattcaattaggagcagtatcatggcatgatctataagttttgacccaaaggagatcaatgtacagtatcctagataagctgttaaatattatgcacgccatataagcgtgtgctgcaaaattcacaaacgaactccaaggtcgatcgaaatgatcatcagatcatgagtccctgaggaggagcacggcggacggtcggtccgaggtgtcgccgggggcggcggcggcggcggcggcgcccttgcttctcgtcctccggtgttcgggcctcgcggcggcggaggtccggcccctgtcgacgctgacccgggagctggtgctgctcctcatcttctccctgaagaccctgcacgactgcatgtgcgagtgcagctcctgcggcttgaactccttcccgcactgcctgcagaagtgtgttacaacatttcacaagtcagttcttaaacaggttataaacgatcaatggaaaagaaagtgattgttcagaaaaaaaaaaaagcagagtcgtgtggatgctgatagcttgtttggggtttcaaagtagacgtaaatctgcacttgatgggccggcccatgaaatttctattcagactgctcgataacgagagcctttgttatcttgatgggccggcccatgaggtttatagccgtactggtctagcacattgcgcacagcgagcctgaataggtggcaactgcaacaacccaaccgaaaagctgccacgcaaggttcttggacgagcagaagaaatggtcaagaacgagaaacagatggacagcgtacgtgcaggcggtagcaaaatcagttgagaggaaacggggctggctagtcaagagtactcacgagcaacgcggcaaactcgccggcttgtgcgaatcgccgccgtctcgcttcggcttcgccttgtctttcctgcctcttcgcaccttcaccttcttgcccaccctgtcacgccagataatcctatttgagcactgtgtaatcggatgatcgaattgtgtggggtttccgtactcaccggaggccgcagccgtcgatgccggggcacaccggcgtaggaggccagtcgccgccgtcgtcgtcggcgccgtgccgcaggacggggcggagcgcggtgtcgtcggcgtcggccgcgccgcacgtcaggaggttgtggagcagctgcgccaggtgcatcctccgcgcgctgcccaccgccggcggcgtgtggctgctgatcctgccgctcgccgctcctttcaccttctgctccggcgccggcgccggcaccaccaccgccttggagaccactttcaccacctctcgctgctgcttcttccgctcctcgcgaaggcctcgtggcaggtctttcttcaacggcgccgtactacggctcgccggctcgccgggcgagtcctcgtcgaccggcggcagcgtcttcggcgatctctcgtcggaatctggcgccgtcgtcgtcgtcacctcctcgacttgcttctgatcgcacgcgaccttcacttcctgactgtccagtttctttggctcttcagctatcacaaacaaattttgtgaatttgttaatcacgagccatcgtcatcgtcgaacgagaaaaagaagaccagaaaaaaatatcaccgcacctaaagaagacgacttctcctttggcgattcggtggctcgccggacgtcgcagcccttgagcacgtactcgttgtcggagatgggggtgatgaggtcgtcgtccatcatcaggtcctgccatatatacccagccttgtacttcctaatcaagaatcaattataaacattcctaaattgctaaatctatcgggtaagcaagaacatgctaaaaatgatttaggaattaacgcaaaaagaaacaccgaacaatataaccacgcgtgatcatcatcatggacgatgacgataaggcgggcaagattgatgaatcgccttcctgttatgaaattatcggtaccttttgtaggaccaggagaaattgtccgccatgtcctggccgcgcagctccgacagccacctcttaacatctgaaaccaatgacaacacgataaacaccatgaagaagaagaagacgaagaagaagagccgcgtgaatgcgagagatcgatcgaacgaaagggcgaaacgggacgaacttaccgcggaggcgcacgccggcgcggtggtggttgacgcggaagaggtgcgggtggtccgtcctgccgccgcggctcaagaaatacaccacgttgatcctcctcgcctcgccgccgccgccgccaccacccttctgcgatcccccgcctttctccatggagaaagtatgcacgtcctcgtcgacggcgacaaaaggacaagggccaaggaaggcgatgatatcgacaccaccaaagctatcgaaaaccgcgagaaatcaaaacacgcatgcacacgaggttaacctgcagaaattgttatgtgcaagaaaagagagagatgatgtgcgaggccggcaaagacgcacgcgacgattaattcggtgcaaggaccagccaggcacaggccgagctcgcgtggctcaaggtgttagcctgggattggatgctgttagaataaggttgaggttgcctagcttcctcacttctcagccctattgcatttgcaggcctgatagatagttttagcctgtgtgggaatctctcggcgacgggaaggattacaatatgatcattgctcggtgtgttcggatgggggaaaccagtatttatattggtggaggttttttgggtgatcgatgtgatggcccacctcgtagaaaagggaggaataatcgccgatcgagatcgaaagttccttgttttgctccgtttattttaccctcttccatttatgtgatgatgtaaatccttcctgtaatatatgttctttgatccaccgtttcggttttattacctgttaatactataaagcaagctgtttctcctactccattcaatgaaaaggtactatctcgtgccgttttccgttcaaaaaagaaaagaaaacgagctgtttattttccttcttataaaaaaagagggggaataacttatctgtatgtgtggccgcggtcaataataaatagaaaaagatgaaatggagtgagttcgttgtttgcagctggtccttaggggccggccgttatgtacactcgctgttccttgactgagaactcaaaagtatgccaaacctcgtaggttccatcaagaacactgaccctgttgtttcttattactagcagagtccataaagaacaatggcattagcattctgcatttggcagcattattaacactttttcgtgtacttcaatataacttgatcacgaatgattaattgattattcgttatcattaagtaactttttttgcggggatcattaagtaactttacaggtcatgtatgctaaaagggttgtagtgatctgagtagtaccccaaggttctgagttcaaatttcctatggagcgaatttcagattggattgtttgcggggctaagttccctatttcaatggccgtatatatccggttaaatgtagaggccggttaaaaaatatccttctctaaaaaaaaatgctaaaagggttgtatagagcccaaattacaagagcagtattgaactgagaaaggaagacatgactctgctacggattgctgctgtgtcacagtttgagaagaaagactgtaacctggacgtaagcctgccatttgagtgtactacttcaccagcagggaactcgggatggggtccaaccgtccagggatgcttttcggagaaaaaagaaaactgctttggtcccttctcgccggacagtctcctttcttaatccatcgcaagctttggtacggtacgcattcccagcacataagaaatttattggttttttttttactttggatgttttatttttctgaattaatgttcgcctgacgtaccgtgttggttcgtgaatgttgatgccggaagttaattagcatcgctttcaagttcttctcattcttttctttctctctctctctctcttttgagctggaggtcttctcaatttgactgcaaagaaaatatctgctatagcatgaacacgatgaaatgctgccacggtgttcactgcattgactgcctttcagtttctgctcttcttcataaaccgccccaagtcaaccgagactacgcgtcgagagaccaagagagtacgtttatcgggctggcgtgaagcggcagtgtgcacggggtcggagtttaaatctccgacccactctaggatctcagctcgctgttaacgtgatgcattgcggtgattaggccattagatctcatcgctctgatgcactctgcgcggctgcgcgcgcctgtgttgcggtttaatttgcatctatatccaatttgtttagtgcaatatattggaaccttcaatgctgcatctttgcaataatgagaccataaaattctgctccaacaagatcatcgatgcggagtatggtttggagtagtttgttcctgtctctgacatcacatttctattatctccaacaactcttctgtgaattagagagttaaaatctgcatgtcattcagcttatcatatactccaatcctgggtttaaatctgaagacagtgtatgtccagatttaaatctaggattgggttttttttctgaacggagggagtactccattccagagttcgaggcccatgaaaggtgcgtgcatgcgcgggcgacggcgagagcacctcgacgaccagatcgtccacaacattggaatatctgacaggctagctagctgcataccgtcagggatgaatggagccaacagccaaggttgacaaaaccgacagtaaccgtcaaattgctgtacttacttaccgttagggtaccataaaaataaaaccacggtaatctcattaaatttaaacaaattttaaaaataatttaattttttaataaattttatacagtttactgcagttaccacgcggtaatcgtgtttatcgctaaggtgcgataaactcgacaccgacggtaagggaaacctgcttagagcttgggtgcatcctcttctcatgtggatctggctagcgaagggtggacaggacgcggcggcggtccggcgaggcttggcacgagggccaaggtggtgttctttgctgagtaggagtacaaaatagtgggagtgggagtcatcgttttgaactccgaaccccgtggaatatcttatgactattcgatcaagcttgcacgactaagatgagtggaataatttgtggctgcgtagtctttcgacttgacgagaggcctctctgtgtcagcctattgcgctgaattggcccacagaggcccattggaagggtccagagtttaaaactccaagccccattggaatctctgttgtccgttcgattatgcatatgcggtctagatgagcagctgctcgcaacgatggatggagactccctcccagtcgcttcggcgtcgacgacgggcgcttgcccctgtccgaccccttcttcaatcctctgccctgcttgccgccatgctgccggaactctagctaggctaaccggtgccaccgaggcacgagactacctacctctccatggtactttgattgcttcgcaatacaaattactactaccatatttgattgttgtatacaatgctatggtttttaggctgcattcttcagttaagcttccaacctcactctcttatttaccgcacgtacgcttcccaaactactaaatggtgcgtggtttgaaaaaattctatagataagttatattaatctatttttgaagttttttaagctaataattaattaatcacgtactaattcattgctctgtttttcatgtcggaggtgaatggggtcacattcgtagttctttcctgtctctctgacatcacgtcacatggcattgattgaactcttctttgaattggactttagaatcggagtgtttgctattcagcttattggtatattctctataggcatgtttagattccaacttttttctttaaacttttaactttttcgtcacatcaaacttttctacacacataaacttccaactttttcatcatatcgttccaatttcttcaaacttctatatttggcgtggaactaaacacaacctataccgtctctaccttcttcttgattccaaggatcgaagatgcgtgcgtgtgcatccgtgcgctggcgccggtgagatcgtccacagcaatgggaatatgggatatctgacagactagctgctagctgccgccgggggacgaacggcacatcgacctagagtcccagacaccattggcacgtactgcgaactcgggtgcgtcgtcttttgcatctgcatccgccattccgcctagcggggcacgggcaggatgcgccattgccgtgcgtcgtcgtttcaaaccccgacgtcctattgggcctattcgccgcgtgaaccttagtccttgggcctgttgggaggctccatctcggcctatcgcgctgaagcgcccccccccccccccccccaggcccgttggtggggttggagttcaaaactccaaacccctttggaatcttttcccgccgtctgattagatatgtgcggctcagatgagcagcaggtgccgcacagccgcagtgagcccaggaggaggatgcactggtgcatggggtcggagtactccgaccccctctgggatttcagctagcggttaacgtgtcgtgttgcggtgattaggactatgtactctgcgcggcagtgttgcaacaacaacagctggaaccttttatgctgcatcgaacttgccctttgcaacattatggccatgcatgaaattctgctccagtaagttcatcaatgcagatgaagaagagtgagaccttctatggttttagctcgttcttttctctgaggctagctgccacggggacaaatggcacattgacccagacgccatcggcgtactggaagtctggaacttgggcactcgggtgcgtcctctttgcctctggggacgggtattacgcggcggcgctccggcgaggcctggcgcctcattcttgccacccgaatacagggccacgggggttcgttgtttccaactccgagctccctggaatacccgacgaccgttcgatcaagcccgtgcggcctagatgagtggaattattcgcgacgctccgtgatccttgggcctgatgggaggctccgcctcgggctctcggcctatggcgctgaacgggctcgtgaaggcccattgatgggattcggagttgaaaactccgaaccccatcggaatctctgccaaccgttcgattaggaatgtgcaatgccattgcagaagaaattcaggggggcgcaaaatatatattgcagatttgaggaccatgcacagtataacttcactttaccttcgtttattctttatagtcgatcatgcagacatacacatagaaacgtatacgtcctttggttaatcgagcaaccagtgcatgcaatataaatatttccactgcaggtggatcacgcatgcatctgatacttgaagaacctgaacttaacggaggacttgtactgtaatctagctatagaccgatacaattatcaacatttaacaaaaggcaagcacgtgtacagtgtatatctcaactcagactgttcgtcctcgtcaaccagtcgagacgccactgtgaccgtaattaggtcacaaatatgaccgatgggtcgcagcagcactcgtcgatgaggcagcagcagcagagagcagcaaggctgtattattcagacaaattagcaccatgattagcagagagaatgcaaaggacagagacagtattctgacgatcgtatgctcgcatatggctttgtcgttcttaccatccttcgaggaagctcggctccggccgcctcggcggcggagccgcgtactgcggcggcgccatcaccggcggcccattgtagtaccctgcacgcacgcattgcaagcccaaattaatcaagcaagtaaaatcaacgaggagatagatcatgaatgtaactctgcaagtgatcataatgcttattaccttggggtggtggatacgagtagccgtacctacgatcatctggggtggtcgatcactggattctgtttcagatgagtaccctttggtagtttgctcaatggagaactatactgggtgagagtaagaagagagcctgtcctggagctatatttatagaccacggtgcttcaggttgcagctgagtgatgatgcttctcgcggtgtttggagcttccaagttccaacccggccaccatcctgcgtgcgccgctgtcagcagctgatccatcggcgagtgcgtgtgatggatcggagggaaacgaataaagctcgatatatattcgtcacctttttaccttttcggattgttcctgcccttaacttcaaggcacgcaatgcctaatacaaccgtaacaaaagttcaatagtagaagtgttcagaattcagaaaaaaaaaaggccgtaaaagagagaacaatgttgatgccaacgttgaagctggtgaaagtcagaaaccgatggtcgtagggagtggattctaaattctcgagggatcacccctcgttgtttgcatgtcattcattgggagtatgacttacgtatattcatcttacatgtttgtagagtgacttatcacatattaatatatcttgtaaaaaaataaccatttaaataatatgtataaaaggaaaggatgtcctctcgagttaaatattttcccacctctaaatgcaatgtgaacggcgatcctagttaagcacttttatcttgaattcttcatcaaagatgaggcgatgagagattcgaccgcgacgtgacgccgagaatcgtccggcaggccggcgaaggaagctgattgcgagctcgttccaagatctcgaatcgaagcactacaaaccaaggtagctcgctggttctcgcggacactaagcatcgatcggagatcagcagatgctggtcgggttcttgtttctttcacaccgtcgaaaaaagtacagaccagattgatcgaccgccattgtcgtgagctttcggtggccttgctagctaggccaatttgccctccttttgggcaaatggaaatgatccggaggtgcagattgcagaaggcgatgtgctgctttaatttggcgatccggttaaggagagaacgtaaagaactcgctcgagctcaagcgtctgactttccgtctactaacccggttaattagcagaatttttgagagagagaacgaagatcaaacacgttttaaaagggaatcaaattcgagaatcagtactacttgctagaactagaagaccacacgctgtctcacttgttgcaaaatccagaaggattcttgtcttgaggaaaagtcacagtattgcacacataagttgaacggattcccctgcaagaaaaattccaaatacggtcttgtgggcaaaggccatcctggtcggagaaagagaggaatagtgctctgagattcgtgccgggacacgtgtcacgcagggaagtgaagtccttcggataaccgaaggaccggagtcccgtggaactttcttcgcaccggttcgggggcatggaggcggcggcggcggcggaggaggaggaggaggaggcggtgtgggcgtggagttggggcgcgggaacggacgggcagctcgggaacggcggcttccaggaccaccatctcccgcagccgctcctcctgccacctcgctgccgcggtctggtttccttcgtcgccggcggtggcgcccacgctatcgccctcacaagtaagccccggtcccgttcaaagccgccacatttttttttctagtaaacgatcgttgtagtaatgattggttctcgcatttgccggaacttgaactcagttagatacctagattgacaatggatttgtgcacggcgatgtagttttgctcaccatagcaacagatgttcagagacttcagtttgcaccagttctagtgtctagaataatcacttccatccaaacaccactgaagtgttgctgtgttgggcttgatgattaatcagaacagttttctatttcacaaatttaaaacttttcggttttcgctagttcctttgttctgaatatttgaacttagtgccattaagtggagagacatctctctgttgtatacttgtattctaacaaggggctgagtgttttccttttcagttcaaattccgctttccagtaattagtgattggatatgtttcacagatttgttctatccttggccattttttcaaagcattcttgttccattatcaagatatattgctcgctgaagcttgatcatttaccaggaagaaaattctctcattggcaacctaagcatttttgccttctttcctcttgggtgttttgagatgggcttgtaaatctgaatctttttgtgcctatattagtgcaatggcacgcagaaattttgtatgtgccctaaattggcaaccttgtcccatttccgtcagtcctcaagaatttagtctctgcatcagatgccttcacgtgagcaatatgcatcagttctttgaacagctactcaacatttcaggtgatggtgaagtatttacttggggaagaggtacacatggtcagcttggtcatggggacgtggagaacatccctcatccaaagcttgtaaagttctttgagaactacatgataacctgtgtgtctgctggatggaaccattctggatttgctacaggtgtccaattctgaaaccaccttatttccttgtactttcttttgatcctttatgctttatgttcaaaaaatctactttatactctatatcacatatagtctgtgcatttcaggtgtttattttgtttcaaaaataaaaccattactgatgagcttagctgtgatgtttctagttcttattttcagattctggacagcttttcatgtgtggagatggttcatttggacagctcggtgctggtgataaccacccaagaaacttaccttttgaagtggcatactttaccacaaagcatgttgtgaggcttgcacttgggatgcgtcattctcttgtccttttgaaaggtatgcaacatcatgtgttgcgatgttagcttaatttttaagaaattgcatagtacatgaacctacccagatttactctgttacctcttctgaaaccacttgctcagaaatcttccattgtctgggcaatacccaacttttaaatgacccaatcatattccgtaatgcattttctaaagttaaacagcctttgaaagaaacaattaatcaatattttttcttttcaattgaggataggcatcgctatagcagggcaagaccatactgataatttttattgaaagcgaaaatcaagaacaagatgacctatacacagttatacacttctttgaagccaaacataccggcaacttagggttgttgattccttgaagaagggctgagtgagcattctttgatttttttccaactatggcaatatggcatacaaagcattcatgtggatgcagaaccatcccttctgcactagtgattcgggagacgtgggagggtcatcaatccacaaccatataatatttcctatcagtcatctgagaattttaaggccactgctttctctgatgatgtggaatctatgaaggtgtacctttgagccatcctttagcattcttttcagagggatgctgcaccatcattgtgttctaatgatgaatatgcatgagatgttgcaggttttagctcatcagtcatatatctttcctattggacgtcctgagaattatatggacacctcttctacttgatgtattgacaaactaattgttatatatgttacaaacggatgacactgctagtccttgttcttgcagataattctgtctatggatttggctcaacaagacggggacaaattggtagatgcactaggaaccaaaagttctatgatgttccaagaataattgatggttttccagactgtaagatagggaatatatatgccaatggagatcacagtgctgcattggatggtaagccttgtaaatttgttgtgcaaacactcttcttctctttggtacttggacatgattgtactttcattgcatggaacagaatctggtcagttgtacatctggggaagagcattaattggtgaacatgatgatgatcaacctcggccagtctttccttctttgggtatttctcaagtggcattaggatggcatcatgcattagttttatctggtatgtggtgcgttgttccttttcaattgaaatatgttttctggaactgctgtcaaatgagtaagcattccgcagttacagcaggtgaattgtacacaattggcgcttaccgtcatcgtaagcttgatccccatgtgttgccaagtgcagagccagtgcagagactaaatcccgccacaacaagccatagtcatgatggtagccccttttcaattttggttatattatgtcacgtagttgtattaagtttttattaggaaccagtagctggactggaaaatatctttacatatagatgaatactcattctatgtgttagcctagtaattattgcccaaccgttgtgctttctgttaatttcttttgtaataacaatctgcttagttcatacaagattagttgaaataaactcatagcatagggtaaatcggacgtcgaacaatttttttcttcaataagaggttggcattcttttctttgccatttgatctgcatgctgcattttttttccctatcaccatataaaatttgtctttgtgatttgcagaatcatcctcatcatcaacactggtgaaggttccctgtgttgatggagaacaggtggtgcacatagctgctggcactgaacattctgcttcggtaacaggtaagttactcaaaggctgaaaatgagcacataatccctgggtggtacaaactaattgctcttgcatctttttgtcagataaaggaacagtcttcacctggggttggggagagcatggacagcttggtttgggagatacttgtgatcaagtgactccacagagagttaatataggtgataagaggccatgttcttctgcttcagttaacgtctattgtgggagtggatttaccattgcggtgaattctggcttagagtctgattagttagtatcatgctggattcccctttatggctagtacagaagcaaaacatcagatccattcttgtgttgtcattggagtaaaaattaagtgtgcaacatgatttggtcaatttcttttgtgataactttaccaatcccgggctatatttaccttatttggactccacattcgacctctccattatagatgaatttaaaataaattcagtaatcagtatgccataccaatataccatcggaggctattcgtcgtagcgtagaaccatattctggattgaatatatataatactgtagtgacgcatctggttcttcaaagaacaatattctcagatgctgtcttcctaaagatcaaactgctgaccttttgaaagcagactctagagagtagagacacacaaagcagacactactataataagtgtcggctagttacacgcagtagatgactctccagtaaatcaaatggtcttcagtgctccagttcgatcaaaacttacacaatcaaatattctatcagttgtgttaaatacaaaaattctatccttgccttatatatatatatatatatatatatatatatatatatatatatatatatatatatatatatatatataaaggatcagacgtaattgtatttgtccatagccgaaaacaatcatttctggagtttgaacgtggaagcaaaggttcccataattcttggattatgtggcgcgtagcacaaagatttggtcagataatctcgcatgagcctccaaaatcattttttgggatattccagttggatgttcctgctacgtgctacgatctcgacgtcgacgccgacgggaacaccaattggattagatcacgggtcaatttcgcctaatctcagggtgctcttctgatgggagcatttgcctggatattccatggtatgactgaatgttcttcaaaatattcctgcttgggtcttccatttttggttttttttttatttctgaatcatctgaaagggaggatttggagatgtaatactgatttttggggcaaatatttgacagctgaaaatttggtgattgattccctaaacatttctgattagcactttcagacccaaaggacatctgataggtgtacctcaccttttgtgggatgtgatctcgcgcgcgcgcgcgtcactgacaggaattcgtccaagatctggttctgtaaaatgtatttcctccgtttcatattataaaactttctaccattgctcatattcatatatatatatatatatatgttaatgaatttaaatacacatgtatgtctagattcattaacatctatataaatatgggtaatgctagaaaatcttgtaacctgaaacggaggtagtacaacattttgtcacctacttctattattttctattttgcgattaagtgcctgtggttagagaacatcaattataaaagtacacaaatttggacaatttgacccttttcgaaaactaattttacaaatgaaccgcggccaaaacttatttaaaaaatgatccttttgttcagcgccaaatcgtatggcgctgaatttagacacctcagtatcaaatagcacggtgttgaatgcatgttggcacgccgactcagcctctcatccgcggtggcacgacattcagcgccagctgacatgacgctgaggtgtctaagtttagcgccatacgatttgcgctgaacaaaagagtcatttctgaaataagttttggccgcagtttatttgtaaaattaattttcggaaaaggtcaaattatcaaaatttgtgataaaaatacatgtgtttatttgtcaaggcccactgtagaagaaggccagcatgagtggatgcctagaagatttttttttctttttcctttttgcatgacatggctgactaacgtcaagtgcctccataagctgatggaacattttgctgggtcttgcaagaaacatttgcttgctcatataaaaatttgcctatacatttcttggtcagtctcctaaataaatctagcctttctttttaaagtagcaataatattttataagactatatatataaaatgagatacagtatgcatctttcgaaagaccattcaatcttaaatttccttcctgagcgacgtaatccatgggcgccttcaccacactccagtgtgacgaagtatgaagtattttttattactattgtaattgaaaagaaaatatgcaaatatagtgacatataagtacaccgtaagtcatacatatttaatatctactatctctgtcccaaaatatatctatttgtagcatagtaacttgtccaaaataaagtaatttcttcacctactttctgtttaccaatcacaatcctcttttaatcatctctacttagtttcttaatatccgtgtctacttaaaaaatatttaaattctaggatggaggaagtagataaaattcaattaaagttttaaaactttgacattcaattaaagttttaaaactttgactatcacaactggtcataagaagaaaaaaaaacataggaggaaccaattgctaccttacaaagtgttgggagtatctgactgagaaaatgaaaccgaacaaactaatgaaatactaggtgcacccattcccatgcacatgtagttgtattttattttctaaacgtactacggctaatatacacatgcatattcacgtacattatatctctatatcttataagcacattaaaaaaaactggaccgacatattttaattaattatgaaatcactctagacattccgttgtggattgactacaactaaagcaaacatgagttcataccatgcgttgctcaaaagcagtatcgattttgtttttctatttattttcttccatatgacaaaaagaaaagaaaaaacacctaatccaaaagcattcgccaagttgcagtactatcgatgctctaagaaactttgacagccaaaaaacgtagtcctttggggcccgtttagttccccaaaattttttctcaaaaacatcacatcgaatctttggacacatacataaagcattaaatatagataaaaaactaattacgcagttatgggggaaatcgcgagacgaatcttttaagcctaattagtccgtgattagctataagtgctacagtaacccacatgtgctaatgacggcttaattagtctcaaaagattcgtctcgcggtttccaggcgagttctgaaattagtttttttattcgtgtccgaaaaccccttccgacatccggtcaaatattcaatgtgacacttaaaaatttccttttccccaactaaacacaccctaaattgtcctaaattgtgcttgtgttgctactagactcatcatgtattgtcagaaacctcgaatgtgtggtcgtgcttgcaagtaaaccaaaacttgccgtgtgcccgtagcaataagccaactaactaccgtatctcctaatttcttgctgaacagaagtggagaaactgaaaaagagaagagtcatgttgactgctgagcacataaacaaaagtaaaagcaatgaaaaggaggttctttccgagcaaatccgagataaactagcatgggaagagattcagaataactagcatggggagagacgcagagagctgctcattgtagacttgtagtccttgaaaaataaagggggaaaaaggaagaaaagtttatccttgcacagtgcactctcctcacataccctcttcgtccctccctgccctcctccataaaaagcttcaatcttggaatccttgtggggggtgcgaaatgtcctaagaaacagaccctccctttcccgttgtaatctcttctttcccggagaacagaaaggggtagcgaggggatggagcggcggaatgatggctgtgacggtggaggcaagatcaagattggtgtctgcgtcatggagaagaaggtgtgattttttatccatttttttcagttgtgttcttgggttggctccaatgcggaggtggccatgttgattactttttgttattctttttctcccatgttggttgcaggtgtggtgttcccccatggagcagattcttgagaggctgcgggcgttcggggagttcgaggtatggttcggaaaaggtcattctggtcttcaggcagattccagcccgtgtttcttttgttaattagtttgacgtttctccttaagagcaaattttgatatcaaatggagaggaaaaatggagtctttttgtaggatgagaagcattcagagattcaattaggattattgatgcccgcgaactgtctgaagaaacatgctagaggtctatgacaacatcaactgaaaaaagcatatgatccttgtgtctctgtttccatatgcaggagtaaactgtgtaactgaacccattagcaccctattttctgactgctgtacaagttaaggcgtggcgattacatattgcccgggttccacggctcaatcaatccttcattatttggccgggtacccggaaaacaagaatatgtaggaggaacaaacaacaaccatgcaaaacgccattcttgtattatttcctacaaaagtctatgtgtggcctgcacaacttcaagtttggtagtcataaaaactagataaatatctataaaatgttatggaagaagaaccttgtaattatactctctcttctgttatcagttgccaaatacagtcagttgtagctatgaatcctgcagaagatacgtatatgccaccatggtgtattggcatagtaaagtgttttgcttctgatcaatacaacatatgagcatctctggctctttagtaaagcaactacattgtgctgaatgttaataactacatgcatgctttatggatgcagattataatttttggtgacaaaatcattcttgaagatcctattgaaaggtatgcctgatagctgtgaagggagagccttctatgagcttgaattctttagttctcaatttgttgttattggcaaaatagaaaagcaaattatgcaggtcaaaatatctgtacagatgtacagacatgaatgatggatcatgctgtcttacttgaaggataagacctaggataaatatagtcagttcacaaatgattgctgtagcataaccatatttaatccttgatagagtgattatgaatatctgtctaggaaatataactgatatgttttaaaattttgtgctgctaaataaatccattgtccatatgtgatgatgcacctcttagcagatgtcaacttaatattcctagaatactaaagatttccttctatctgatgatatcagactttacatgatattacctctggtcacaaaaaaatgcctttttggacagttacacggtcttcaaaatgcagtattgaccactaatttctattgtaaaatctttgaatacctgatgtattacaacaatactttttgaggcaaatctacgcatatgattttcatacattcaatctagtaatacattgatgttcaactttttaaagtttgacttgaaacatgtccaaaacatctaattatctgcacatatgttttcgtgattggatggagtataatgaggttaattcagtgatttatttttcttcatatattgtgtttactatgaaatcatctttgttctgtttttttgttgacagctggcctctatgtgactgtctgattgccttttactcggctgggtatccactagaaaaggcagagaaatatgctgctttacgcaggttaaatgcttttcctgacacatgaaattttcagagcacatctttgtgctggatctgcaagtatctttagtttcacaacaggcttccctgacatatagaacatttctagtactactagcagctggactaagataattatcaacaataaaattgtggacattgatgacccatgtgttgtttctgtatagttgccctttttggcttcaacatttgcaccacttttaaagttactttgatatagttgctactgaatgtgcccatggctaattaatgtatctaaagcaactctattcataatagcatcacctaagctcttattgatatcactgtttcattcatgtatgtatatatgagtttgcctatgccttttttctgtagctgaagaaaatgaagagaactttagaaatcataagtataggttatcatttgagctagcctttttttaacactggtcagctgcaatttgaacatattattaatgtgtatattatttttcttgggaaatacacaggcagtgttgattatgggcctaagaaattcacatgtttattattagctagatacctatataagttcatcaacttgatgcaataacattatgtaaatatctttatgcaggccatttttggtcaatgagttggatccccaatacctcctccatgatcgcagcaaagtatatgaggtattaatatcggtataataaaaaatgatgcttcgtacatttgagatatccttttttcatgttttgactgagttgcttgttctgtaatagattctttaaagatgtgttatttcttgctagttatcatgggatgcaaattaacctcctttaaactagaagaaataacttctcttgaagaaggtagtagtactcaacagtatataaaccaaaagatggcagcaagatcatctatgaatatctggtaatgaacctttgtttagttcgtttgaaatatctagtttttgcttctgcagtctattgttgaccatgttaatctcaagactctactgtaatatctgttacattctcttttgaaactgccaatacaaacaggcctttttatcctaataaatgcagaagttggtactgatctctctctctctctctctctctctggaaactgataccaatgagataatctcctgtgagcaaatgttcttcttagatatagcatttccagtttgaaaagaaatttcttttaagttcatatgcctacaatatgttcctctgtgtaaatgtgtcctatggaacctgcaaaaggatatgcataattttggatggaaagataagtactgtaaaaaaaactagatgttatgtctgttccttatattatgtgactgatgtggtcctagtctgcaagaacagtatagtttgttttatttgttatatcattatgtatatccaacaaaatgcttggcctataagtattcttgttttgttttcctgacacagcaactattaccgtcaacaaaatttataggatggataagatagtcaacagatggttttatccaactatacttatagagaaacacaaccctccactccagtttgcaaccttttacataatagcttattctcttttcgcaaatgttgatacttcccttttgcctgtttagcaccttaaattgttcggagttcctgttccaacttatgctgttgtcagaagagaataccctaaccaagagttaaagtactttgttgagcaagatgattttattgagatccatggaaagcgattttacaagccttttgtggagaaaccaatcgatggtatgttagtatcagctcttgatagaaaaaatattttcttaatggtttttccttctactagttcatgcctgttcttctgtctcccactagaataccaactatcattttatatctgcggaatacatgtacgccaaaacaaaaaaaaagaaagaaaaagaaaacctgcactaggtctgattgattaagcttctcatggaaggctgcttcctagtatcaactatgagaagtggcaggttacaaaagaaaattgcgagccttccaaaaactggcaaaatccattccgtattgtagggtacaactcaaaacacaaattaatggtacgattgggtggtgataatacatctttaatggacataattaaaacaaaccatgcaaagctaactcattagagcccaccttgcatccactctctaggattaggaaaaactatgtatttggcaaaatatcatgagtcaattgatatttgggcctgaccttgctgtgatatggatctaatttcaatagaatgcatgagtgctttggaaacatatgttgactgtcgaagcatcaacaagccgaagccttggcagtctaaataatgtcaaacactaaacattgcttatcttgctcctaaaatacataaatgagatattcttcatggcatggtatgaaacaaatttacatattagtactgatgggtaagaaacttaaaattgttcattcattcttattattggtttagtagtagacaatttattttagctaaagtatgcattttgttcccctgtggtctgtgccttgtactttcatttattgtggaaaacctatccttaataactgccaattgttctgcaataagttctacatttttttatatgcaaatcatgaatcagtcttatcaatgcatccatgcatattccaatttgtgcggtactgcaaatttaatttgtcagattgtctattttaaacattaactttgccgcattgtaaagaagtgttagaacaaatctttgctgctgctgactaattctgttgtacataggagatgaccataacataatgatatattatcctagctccgctggtggaggaatgaaagaactgttccgcaaggtgggcacttgttaccttcaattcacacacatttcttggtagaaaaattgtaattagtctctttcttgttaagaaaatactaatcatttcttaactgaggaagtacttagcatctagagtagatggtgttagcgctgtcgatagggagctgcttcagttctaatctgctttccttttcattttcttcttccaagcttgttccttgtttagcacagagtgtctataatcctatctatttttcttttacacacacaattatgtgtgatgtctttcttgttgctaagaaaaattacttgataataaacactgtcacagtataactcagtaacctagcagatgatcatctgctttatgttctaacatgctgttttatctattttgtgtcctctctgacgtgcttgcgctgtgtccgcctttgtattactttttttttttacctttgaaggttaatatattcaggccggcctccttaaaaaataactggctatctttgctctagttggtattttcttgctgaggttaaacttctttgatataaatgaatgagttaatgtgcattctgatttctgaatctgcttgtcatatcatgttcttccagtcgactttcatctgttcaaaactccccaaattcactcaccagatgtattcttcaaaatatttatgcataggttggcaatcgatctagtgaattttatccagacattaggaaggtgaggcgagatggatcttacatttatgaagaattcatgccaacaggaggaacagatgtcaaggtgacagaacttgcgcctagtgctatttttttttcctcccaacttatactctccagatatgttaaaaaggaactttttacagctttcttcttggtaatgagtaaacataaaataattatattttatacagttgatgcctacatgcattgttgccataacatgcaacatatgccacaagcttcccttttttttatttgggcattaagaaatgcaccatggtaaggacttgaatctctagggataccaaaagggaatcacattctcttggaaatctgggtttgagggaaaattatcttcatcaggacagtttcccaattggtccagggttgctttgtcctataaaagactaaccatcatgttgtaggtttatacagttgggccaggatatgcacatgctgaagcccgcaaatctccagttgtagatggggttgttatgaggaattctgatggaaaagaggtaacctttgttgcctatttgccataggattcaccagtgctatcaatatgcctcagtatttgacactttgatggatatttaacccgtttatgttctttagttaccattctgtgtagatatatagtaacacttgttgtataatttgtatctaacacttgttgtataatttgtatctttcttgaaggtgcgctatcctgttttactaacccctactgagaaacaaattgcaaggaatatttgccaagccttcggacaagcggtacagaattcttttagttattatttaattcctactatgtcggaagcttacactatttcagaacttaggatgtatcttatattgtgtatttatgggctgtcacctgtcaataccactagacataatggatacagttagtgaaaccatcatcgtgttaagtcatctacagcatataagtagaatttgtttccttcaagattaattagcacaaggtcaagtagtgtggaagatcaagaaggtattgagcatccaactccatagtgatctctgttgcttggattctgtggaacgagaattttcaataggatcaatgctgcagtggttcaagtttggttgatcaaggagtgcatgaaatggcaccttgctggagcaaaatgcttttaagagcttatatatgtagcttaaattttcctttgttggtcattcttgaccttattctgctggcgcatctgtactaaatgagttccttgattttctttttttgttttgttttttcctttagggacctgatctctggctgaatatcttgtgattactgagtttgactttttttaactaaaatactttcgatcctctagcttaatgaaatggcatgcaatgctctttcctgccattgagcaaaatggatcaattagatagattggagatgaattggacacacctctattccatgaccagaagccatacatgcagaaaacaaatatacagagagctaatttatatgtgcttagttatatttttattatataatggaattagattaattccggcatttgcttcaacagaatctacagccaattattacaaagaacgaagcacataagactgcggataacaatttgatatatgtcaggattccaaaaccaaaagaccatacaggtagttgtattagctcagtagttgttccttctttgtgtaggtgtgtggttttgatcttctaaggtgtgatttgggggaggcaaggtcttatgtatgtgatgtcaatggctggagttttgtgaaaagctcacacaagtaaatctttctcactctgttggaacaattactgtaacagtttaatgcatttgtagttttctatggtcaaattcctcgttatatcttgtttatttggtgaatgccttcataactccaggtactacgatgatgctgcatgcattctgaggaaaatgtttctcgatgataaagctccacatatttcatccaccattcctgctaatcttccatggaaagtcagtgagccagtccaaccatttgatgctgtaagagatcgagaaaggggaactgttggcatatctaggcaatcagaagagctgcgctgtgtcatagctgttatacgccagtaaggataatcttatgatctctaaattgtatcatcatcaaacttgtttttgacactacaaaaaatgatatgcaagtggggatcgcacgccaaagcaaaaggtgaagctgaaggtaactgaagaaaagcttttaaaattaatgttgaaatacaatggaggaaaggcccatgcagaggtacgaaaactaactcaatttcgatttagatttattcatgagctttatatttttgcttcctgaaaactgatcatgttgtcaaattgtgcaggcaaaacttaaaagtgccttgcagctgcaagatctattagatgcaacaagaatccttgttccacgtgctaggtaatttctggagcctcaaattttctatggttttatggtttatggtttgtgtatgtgcagctggatgtcactagtaacatacaacaaaacaaaatattaatccgtatcaaatatgtcttccaatttattgtttgttctcaagggtttcaaaatatgtgcatttttgctagtttacaaaatgctaaaaatctatgagatcatgtttaatatccccatataatattttaccttttgatgtcagaaattatgtttttatgtaatatgtgtatcttggttagagttctgacttctaacaatacatagtagacatccacacggatcttaattgtgagcatgttctctcccttgtatgttgcattgttgatttgttgctaacaaagaggaaaaaaatttctaacttcaggtctggccgtgaaagtgatagtgatgctgaaattgagcatgcagagaagctacgccaagttagagcagttctagaagaggtaaaatagtgttcaagtattaatagggctatatgtttggcatggcacctaggatgaatatacaagcataagaatggtagttgtacataaaccttgaagagccatgcacaccaactgggttaaccctgtaaaatgaagtgaggattaaagcctaaagtgttggttttggttggacgtactttggagtggcacgaaaaggtgttcactggtgcctggtatttaggtcagctaatttctactacaacgatagcagcatgcttcttgtgatcttgtcagtgcataatgaaagcattcccttcatgttgataactgtatatttcccgtggatctccatcatgcttattgttgttctacctgttcttcaaaaatcatttttccatctataaatgttaaaaaaaacataaaattgttaacagtttgtatatacataaatagcttatgtggttcagcagttactgtttacatatctatggagctccatgcctccattgcagagttcttgtagattttcgtgaagtataatcaaataccacatcactatttacaaaatgttttctgtttaattaaatactacatataagattgtttatttatgtacttgttcttgctgagacaattgtgttgcatgaatagaaatgcgatacaaaggcgctgtctagacatttccttttgtttactgccatatataatctgcatttgtcctcattgtcaattttagttgcaaatacaatagattcttaggcattaagtattagtttccctatggcctgtagggtggacatttttcaggtatttataggaaagtgcagttaaagccatccaattgggtccatattcctaaaagtaacggcaacgggaaggaggagtatccaattgaagcactgatggttctcaagtacggtggagttctaactcatgctgggagaaagcaggttgctttcatttcacctattgaagattttattatctgtcattattataatgagcactgcgttgccaatgaagctcatttagtttgatgtcggtatgattttttggggtttatggatattttatgttaattcaacaatctccaatttcaatgtccaaatattcaacttattagtactatggacataatctaagtaaacatgattaatgatcagtctgttcatttcatttaagttcttatcgtgtcccccctttgtgtctctcagatgcttttgtttgatcatgcaggcagaagagttgggaagatacttcagaaataatatgtatccaagtatgccttatcctaaacttttccgcttcccgtttagaactttctatgtgtggcatcaagctgtgggtctccaacgtgatattttgctgaaactctggttttaactaaattattgtatgaactgcatcactaaacaccacaatagtctaatccatttcagaccttcggtgaagtcttcactaaatgtttatattcagtttcactgtgccactttgggtaccaatttgaaataaaaaacttaactaaacaaaataatcgtagtgaatttttcaataaaatgtaacttggtcaggttcagctatttcagttcagttggtttactgaaatggtatctcaatctttacttttagtgaaattactccagcaatcatttcacaaaatggtttattatccttcacgttgatattttgtgccctacttatgtcctttctttcctttccctttgttaatttggctgccatttctgtctagatgtcagttagatagcctcccattctttagatagcctcccattcttttctctaactgtctgaaaacagcaccatttatttggcttttgtgtctcatgtactattttggtgtgacttcggtttatttaggtgaaggaccaggattgcttcgtctgcacagtacatataggcatgatctgaaaatatacagttcagatgaaggtcgtgtccaggtaaatggcagtatttcttcttacaggcttgggttattgaatgtaaaagaaaatgaaaaccagccattttttgggtacatcatgtccatatcagggttaggattttagagtcgggactcaggattgaaccgcctgctctgttcctctgaaaaccagccattttttggcagctatctgaaaaactggtcttttcacatgattacacatgatttgatgcatcacaccttcaagtgggcaaaaacccagtattaagcagaactggtagcagatttctggaccctggtccatataatcaatagtaacgtaatgtaataacttattcttcttcgtagtaattctctaactaccagaaactatttagttccattctggattcactgaaatgtttatgttttttgtacatttatgccttctgtgacatgccattaaattttttaggcaagggatatttcattaagtaatggaattacatcaggcagggatgcacacagacaacagagaaaataaaggagaaaatccaaagacaacatgaacataatgacatgccatcaaataattttgcatttaatatgtaaaaaaagtaatgattgctggggtttcctgaccttactatcctatgtcatttttcttgtactgggtaacggtcctaacggatggttgcttacattttttttcttgttgttacctaatagatgtctgcagcagcttttgcgaaaggtcttcttgatttggagggggagttaactccaattctggtttgttcctattacggaaatatatccagttgaagacttgacagagctgcaattcattggatttactgtctccaggtttcacttgtcagtaaggactcttctatgcttgatggacttcaggatggctctattgagatagatgaagcgaaggtcgccttcagataccaatgccataactcatacttatgaaaaaaaatatttgtttgaaacttcaaaagtttctgtcataaaatgtcagatctctgcaggctcgtttgcacaatattatcctttcttcaaaaattgcaaatggtgagactatggagttcccatggatggttgatggagctggagtgcctccaaatgctgctaaccttctcacaaatttggtatatgcattagatgtatttatttcctttcccctttgctttctataccgtatacttgtgagttgtttctgcagaaacttgcacatctaaaacaaccaaacgttaagataattacatctataatggtgacaaataagttgcccttatctcaactgtccaatcaggctcaattgaccaaggaaataactgcacaagtgaagctgctttctgacaatgaagatgaagaggctgtgacagatagtgactcaccaagtcatccttatgatcaagcaaaggcactagggaaaacagcaattgatatggaccgcattgcttctggattgccttgtggcagcgagagcttccttttgatgtttgcccgttggaagaaactagagagggatctctacaacgaaagaaaaaagtatgtttccaagcttttaatattcttgttgattaaattctcagaaggagttgcagcttgtgtaaccattgctaaaactctcattatgatgcagacgttttgacactacgcaaatacctgatatatatgactcttgcaagtgggtaaccatgttaccatctccagatgcttctatttctcttcacaaaatagctgggccctggatgcctattatatgattgtatcatgctcttccataagatctttgtcaattgtcaacttcattcgaatttgcttttctgaatgaacatgcaaattagcataccaaattgtgcctcgaaacttggccatgagagggcctgaccttgatttgcccagctgctttccatgctgtttaggccttaggggctgtgacctagggaatcaacaagaatgttcagcgaaacagcccagccgtaggaaaataaatttcttattttcataagaaaaccatgactattggtttcaaaaaaaaaaaaacatgactatcaaagtctcaaatatttcctaaagcttacctgaaagtttgctagtggatcactggaaagttcacaatgttgacgatctcaaagacagataaaatttgcccaaaataacttcattttgctttttttgcaagtgttcatctgctctctcttttttgcaattcaaggcttcttgcaattattttaaaaatcacgtgatgcttttgttcgaaacaaaagcattttctcaagtttcaaaaacatttctttgttccagcatatctcttcacctcatctatttctaacagtatacttgacaggtatgacctccttcataactcacatctcaaacttaatggtttgagtgatctcttcagagtttctcaggtaaattaaatatgtatcgcactcttaaaatgtaccttgcacttaaatgtgtgtagaaccacggatatacagctgctcctgtgtatttgtgaaatatttgcacatgaagacatcatttcatagcactcaggtcctaaatgaaatcctttgatccctgttttacattatgaatacaactagtagagtggtgaatgattattgctttactgttactaaattaacactgagagaactcaatatgctatgcactattagaaacatgtactgctatactacctattactccctccatcccataatataagggattattcccttttgggaaaggttaaggatgaaaagaaaagactacaatacccctattaaatgtgattttggttgtggtgagtgggtagttggaggctaaaataggtagaaatttgaattagagatgatggatgtgacaagtagtatagcaaaatctcttatattgtgggtctagtgagagggataaaatcccttatattatgggatggagggagtacgttactagtaagagtggcgtgcttatgttgaattctgaattttatgattggtcattctaatgctctttttctatccattttctgcctgctatctaactatttataatgtttctttttcattcagtcactagctgatggtgtaattccaaatgagtatggaataaatgcgaagcagaaactcaaaattggttcaaaggtactggtgtgtaaatatatttgaaaactggaaaagaaactgttatgagttgcgtcctgtatattcattgttttcattatgtagtgtttatccgaaaaactaacataaatgagattttgtttctagaaatgaaggatgctaaaggaatttgttgcagaaaatatgtagtacccaattttctcctagaggctagcccttttatttggcactgttttgttttttagtcacaagcaacttatgatgtttctcatgtccttttcttcagattgcacgccgtttgttgggcaagattctgattgacctgcataacaccagacgagaggttgctgctgctggtggtgaatctaatgcatgccatgatccaacaatagtgccttcttcaaaacggaaggataggggttactatggggatgttaagaatgagggttttgatagacctaactcaaacaagaagtcaattgatcttgatgattcgcacaaagaaaccaaatactgcttggatccaaagtaagtacgaaattccagttaggaatcttgactatgaagaatacaattgatattcaaataattttgttgtagatatgccaatgtgatggaacctgaacgacgtgttcgaacaaggctctattttacatcagtaagacaaattacattgagttttcatattccccttgcaaattgttaagtttatgctttcttgatttatggtaatatatcaatataactatagaagtatacagaaatttcaaaaaaaaaaaaccctaaaaactaaggctctaaaaagcatacatcatcatggaaacgacaatttcctatatgacatttctttggagtttttttttaactgaaattctttgtttttgttttcttctccctgataagaatgactaaggattattttgttgtcaggaatcacatatacattctctaatgaatgtacttcgatactgcaattttgatgaatctatggatggagaagaaagtcttgtttgcaaaaatgctctagataatctgtttaaaacaagggaacttgactacatgagttacattgtattgcgtatgttcgagaatacagaggtattaaaaaattatagtgtaatcataagcttttactttactaatactaccggtgagaagtgatattgatcttgtcattggacaactattgcaggtttctttggaagacccaaaaaggtttcgcatagaaatgacatatagtcgtggtgcagatataagttccttacaggtgagtttggtccccttcaaatgaaatgtaagatgtttgttttcaacatttctggttattaactcaacagttcttgaaaaatgtatccatacagagcgaacatggaaaagattcattgctacctgatgatcacactatgaaaattatggagccagaaagattgcaggaagttggatcatatctcaccttggacaaatttgataaaatggttcgtccatttgcaatgccagctgaagatttccccccagctgccccttctcaatctttggcagtccgtttctgcaaggataatggattgcaaggcgcaagattggtaccctatcctgttctttatcatagaatgattctgcccttctattttagagaaaatagcatctaatacttccaatgttttgtcagtgccaaaaaataccaccaaaacattcttctccaatcttataccacagagtgagcctgaaggtttaagaaatgtcacaacattgtatgaaccagctaagagaggggatcaatgctggaactatcgtcactgcacgagtatataacgctaatgaattaaaaattgactagtgccaatggatactccattaatcagatagcgttatgaggctgtctgcttctgcaatcaatcagaaatcattagaagactgcttacgtctgggaacaatcagcttaactagtcatattgacacaatgctatgaataatcatcaacaaaccagtcagatgtcactgtacagccttttcctctttgtatacatgattgatttggctatatctttttaacctttggcgataatgacctaaaatttcttattttattacctcctcctgttatattaactacatattttcctttttgaaatttgacagcaagataagtcagacatggtgagtggtatgccaaaaaggaagacaaaaaagcttcaagaatagcatgttcaacacgcaggccagcaagataagtcagacatggtttgatatttctgttaacaaaagtctcaggtaaatggtttaccaatagaatgttgataaagcacttgccttgaagagaggttaatagtgagtctgcaaaatgctgcatgagtgccaagcactgaagatcatgcagctggaacaattttgtcagttctgagaatgtaacctgatagagctgttttgcagacagtgtaattgcgtaaataataggttacacgtgtatctggataaaattttccgtatatatacaaggtggtcatattatgtgcctttaaaattatagtgtttccgtcttcagaataatttcactagaaaattctgctactttaggcgtttgctaagagcgttatttttagagctttacaggttggagcgttttaatcgaacatgtttaacaaaaagtactcgctgaacattcccggaataataccttgtatatttgtgacatgccagtgtgatatattcgatttacttttgctctatttttactggtatagactgatgtgatacgaagcacaactcccagattccttttttttcacctctttgatcagacggttcttctgccttttatgaaacggtgtcaaatattgaatcgatcaaaacacttttgatctttttttttttgctaaatctttttcaaatgttttcaaagtagccacgaataatagtcgaatgcacttgaatagaaattttgagaagatggtaaggcactgtcaatattaacaatctaacatacataaattctcatgttttgatgataacttccacaatacatgctgaatacaagaaacacctacccatctgaaggtaccttcacacactaaaaaatacccatagcttactcacctaaagaccctagcagtgtacaagaacaaacctgaatggttgtctcacctcctccctaaagaaggctggttattagaagttcagaacagatcatcgtaggcgactatttctctagctttgtaggttccttctggagccgctttcgtgctcgagaacgctgaagattcgcttgcattcctcttcgtcgcatcatgcgtattctcccccactgggttggcttgagctgtacttctcaagtcattcggcgcctcgcttgcctgtacaactaaaacctgcaacccatgaaagaaccagcaatctgagtatcgaagagcaagagtaccaaatggctcaaaacatgtgtagcatgctatagcttcccctgaatctgttagaaattttgttctgtttattttgtgcctgctgcacaaccaaagtgcagatgcatttcgactaaaataaagtgcaaaataagtttattgtttattttttctaaactaaatctgtattctacttggttttaaacgaccgttaacatgaacaaattgtgacagcgaagataccagcacagtctggatgtaaacaagatcaatattgaatataatttactatcttatagacttgtaccagataaaatggttgactgtaaccttggactgaatttaaggtagccagttcatcacggaattgagtaggttttgtagagcccagcaaatgtgtaagttaattgaataactagcacattaattaaatccaaaatgctagaatgaaacagcaaatgcagagtataaaatgagatgaaaaataattaaaaaaagcattcttttcctctcacggatttttgattattgcgggcgcacttcccaaactcccaaacggtatgatttttgcataaactttcttcatcggcatttcttagagaactttttaaagtcaacctttcaactttctaatactaaattctctcgtctgtgccctcaaataattttcataaactctgtttgatccataatccatcatccatcagaactttaaagtcgagataaaaggccggatgtgatgccaatctataaaattctcaaatctagcagcgccttcaaacaattctcagcaaagcttgaccctgtacaggctgtactgcattcctctacacgcacagcaagttgaaatcgagctcatccaactgcagcacgcagatctccttaccttcttggatccgacggtgacgccaccgtcggggtcgagggaggcagcaatggcggccatggcggccgcggcggagcggaaggtgacgtacccggtggccgaggcggcgtctatgcgggtgcgcgcgatggggccgtacgccccgagccgcgacttgagctccatcacgccgcacccgggcggcagccccgcgaccatcactagcaacggctccgaagccgccgccgccgccgccgatggagcctgtaccggcgccggaggagcctccagctcgtcggcctctaactccggcgggccagggccgtggccgtggccgcggccgcggcggcggcgcttcgccggagggtcggggctcgcgcgcccgcgcttgcctctgcggtgacgggtcatgatgatgtccaccgaagtgtactccctggccgggatagtaggggaatctgcacggctgattgcgcggagattcgtgcagtatcttcaattgttatatggagtatatttcaatggataagtaagaaattgaatattaattactccctccgtcccataatataagggattttgagcttttgcttacgaccacctgtcttattaaaaaaatttatgcaaatataaaaaacgaaaagttgtgcttaaaggaaattttttttgaaaataatacgattttaatgaaaaatcgcaaaaatatagatcggttaggcgaaatcgcatgtttagcaccctgtcgaacaaccgtggttcgacagaggtatctgtcgaacaaccgtagttcgacagccacctgtagccgcaacctgtcgaactttgaaagttcgatatgtcctgtagcggcactgttcacgtgaccctatctaactttgtcagttcgacatgttcctgctgatttctgactgttcacgtgaccctatctaactttgtcagttcgacatgttcctgctgattcctgtagccgtacttttttatatttttttagaccaactacccagttcgacagatggctgtcgaaccacggttgttcgacagggtgctaaacatgcgatttcgcctaatcgacctatatttttacaatttttcattaaaatcgtattatttccaaaaaaattcgtgtttaaaatactttgaataataaagtaagtcaaaaaaaataaataataattccaaacatttttaaataagacgagtcatcaaagcaaacaaaaactcaaaatcccttatattatgggacggagggaatactttgaaaactatatagtatcgttttttttttcattccatgtttgcattagcttcatttcggttgtaatcccagagtttggccaccgttattttaagactagccactggaattttagattggaaaagaacaccggtccattttgcaactattgtgaagtttgccggtttaaagtgaaaatctgcaaactagataaaaatttgttcccaatatgcaatttactcttattataatctttcagaaagactggtagaatgctggcaagtgcttaaacagccggtttcaaagtctttccaacatcttgatcaatagttgacaagagtaatgctatctgaattctgaaggaatgctcacacttgtataagaatgaacatacagcagtatcttctcaaaaaggaacaatacaacagtatcctcatttgcggcttaaatagcatcgcaaattcgactgctgttcatacaagaacctcattggacaaggcaaaaacgagcacatacatttggctcgcaaaatgccacataattggctctggaaaccgagaagataaagcacttcccttcagaacatgtgtgcttctgattgcgcagatacggatgagctctgaagtctgaactgataagccctgcagctagtagtagtgaatggcagctacctcagccgtgcttgcactttgggcaaaatggaatgcacttttattgagagcatttgttgctggatgattctgttgaactcagatcatgaacgcagacagaaggcatacgcaaatccaaacatgctcagataaggaagctggcaggtgcatccacaattttgtgagaatcagctccgagaggttcgtctagctgcttttagtgctgcacctgaaaacttgctcccatctgaacgtctgacggcgcttttcatgggtttatattcgaatgtgctaatatcaggagggctgtccgcagtgcacatagctttgcgcgtgttttcactctgatcaaaacggctggtggtagatcttgttggtgcataagcaaatgttctcaggtcaggaggtccagcagcagcatctgtagctttgcttgtgatcttcccctgatcagaatgagcagaagcagttgtaggcctgtatgcaaatgtgctcagatcaggaacgtcagtgctgtttgtagcatcacttgagaatctgctttgtagaggcactctagtagtcttcttagccgtacaaccgaatctctgttctggaggtctgagaacagatctgcaattaatgttataaaatatatcaactcattgggacaactgtgtccccctcttaagttctgataagtaaattgtgtgaacttggtgcaattgaaattttctgaagctgcagacctgacaggaagagtgttcttcacatcctttaaaggagcgcgaagaccactggcacgagagcctgcgtatctgaaagatgatatcagcgcagcaaacttatccattgatttctctgcaatgccactgtatttatttacatgggcgacattgcatccaaattttccttcagaatttgtgttgataccgtcgtgggaatcagagtcacagcctgcattagtatcagacattcagaagatttccctcagcaacaaaaaaaaagggaactacgcacactcaaacattggcagaaccttctgttgtttttggaaaaactgaatttcttgtaatcgtcacaagtttatctatagagaaatggaacaaggaaaggtgcacattctcacagagaataagaacagacaactaggtggaactattacctttatcagcaaccggtggactttcatgaggactagtgggttgaaacattccctgcacaaatagtacattcaagaccagatagtagaatgatacagacagttcactgcgatatgatgatagaataacaactcaaaaaaaaattgcttacatcttcaaaattttggggatcactaaattttcttctcttcaatatacctccagagcttctttgttgatctccaggaagagtgtaattaccagtctcgcagttatcttcatcatggcactcatcttctccttgatttgtgcaaactcttttatttactgttttgaaatatgaactcctcacagtaatatttctattggcagagaccacattgcttttttcagcataacgtggtgcagctctggatggctctgtgttgtgtgaatctaaaaatggatctgatatcccaggcaaagtccctagaaaacgaaaataaatgcatacaaaacagaaaccaagattattttcattttaattagatataccagtacatgatttgcagatcaagtcatgcatcaactacaaaaaggtagagctcttaccctctaagaaagagcctgtcggtattgtacttctgttgcagaagttgactttcacctgtatagcagaagtaaaactataagaatgacggaaatacgatattgttgtagaaaggtaggactacgagaacactgaaaataaggcaataaagaaacgtgaaataccttgttgccttcaatgtctgggtcctcagcaggatcactaccaatatcatgagaacactggggtgaaacactggctgaatcatcccgagggatgtcacagcggacacgctcagaactacattgagaggcggtattgattgaatcatctagaggggttcctgagctaaaatgctcagaactacactgataaacttgaatgttatttgatggcaagctagtatcttcaattaaatcaggggtaccagagtcttcaattctgggactgggcaaagacccattaagtacttgttgcttaggtgtaaccttaggtgctctgaacttccgttttgcctcaagcgatgctaagccttctaaaagtcaaggattcatccaatggacagttgaagtattgtttacaaaacaagcaaaataccatgctaagaatcgcacatcaccttagacttcgtaaataagtttatggggaaattattagttcttcatttgatcctaaacatgtttgggaacgagaaagcacaataactgaactatcttatccaaggcattcccataatataagctgcaacaagtagttcatataataaagttgattggtatatatattgttctctcaattaaattaaaatgtgttgagaggatacagaagtaatttgtcaatacgtttctttggacaggtagatcaagctttttctttccatttgaaggagcactggactctctgttcagatgcactttatcaaaagcgagtgcgctactctctgttttgccctgcaagtcacatatacaaataaaacatatataacttcttagtaagacaatccacaaaagataaaattgaatgttggtattcgcatgtcagcaaagcaaatgcttgcatactggtgatctttaataaaacagagtacatcagtaaaaccatgatcacttacaatgtactttcttatttcagtgaggaccctacatttttttcttacaaaatattttatggatttttatctgtttttctctaatgagcttctgtaatgctctgtagcctctgattggatatttcagtgagcttacaaccattttcaagagcccctcgtttgtatttgcatattgatgcttgggtatgtttatacatatgcagtgcacagaatcagagtaggatgaaattacattcaaggaaacaaagcaccaagaaaccaaaacaaccgagggaagatcggtagtacctcaaatggttccttggtaatcggatcgatattcccttgggcaatgcctttagcaacagtctgtggtagccatgtataaaccaattaaggaaaagatccaatgcatgcaagttgagattttcttcaagtaacacaattcggtattactgagaaatggtggcattgaaaggccgttagcttactttctaacgcaacttgtataatggccattagacatgaccaaacaaaagtggaaattcatccttatggacttatggtggataaaacaacaggttatcatatgaatgagctttagcatctattgtacaaatataagtttggcaaggatatgggcccaaaaagtccaagtcttcactactgccatggggaatgcctgacaaatgaacaatatcttccgtcacagggtcataaactctttggaactgaaatgcccagatcgcctttctgaagttttcttcatattgaggtggaacagaaacagcactgtacctcaggtgcttgattacctgaaattatacgcatcatttgctcattatttttttttctaatttgctaagcaagaaagtgattgcacatcgttgccctacaagctcagtagtaactcaaatcatgtcctgcatgtatgacaggctatggattggctaatgacctaagtacaagacggtggcctcataaaagttgaagcaatcaattttgtgttgaggccttgccttctgtagttatgtctaagtagaactgcattctggttctactatccagccttttcttaccatgctttgtaggtcttgaacactatctcaggcatcgttcatgttagttcatgaatcagttctttccaattccaactaggcctaaagttagtatttgatacaacagatacagggtttaccttttcatgacccttgagcttttggataagtgcatgagctcgtttcacacccattccaggcaatgatggaagataatcacagccacttaaaatacacatctctagtagcatttgcatagtgaatccattaagatcaagctccctgcatcgctgcaatcgtgtaatatgaaattcaacaccttgtccaaacttgtccatcttgaaaataatctgcacaatggaataagatgcattttaattagagaagttacaacaaactatgaacactaatctagctgagcagcaaaatactatggggtacgtggaggacaaagataaagcgttttaacactgtgcttactctagaacagccaaatggtatcagatcagaatcctctgtgataacggcatcaacaagtttgttcacagacaagaatgtcatttgtgcatctgcttcataaggcgcaacaatataatcaaccttttcttgcttcaatacctgcattgcaagttttggaacaataatcagttaagacaagccaaatgttcctactcctgactagaactgcttcaaataggtggtaaatatttggtaaaaatacatggaatttgctcctttacctggatcagttcaaaagcaatcctaggtgtaatgtcaacagctttctgataacactcaaaagcagcacgtgaattcccagcagattcatgctccttggcacgctcaagattttcctttcgtgacctacaggatgtcatgcttacttgcttagcatccaatgactcaagaaacatcacatagcaaagaatggctggaggcctttagcttatccactagtctgtactaataatgcgactgctctatatcagcctaaagccacagttgtccataactatagccgtatgtaaaatgtcaaatcacaattttttttaatgttctgtaagggtaatgtagatgttccttggcaactgaaacatgttaggctctttctggagccctaagaaagaacatacctttcacgtttagtctcttgatcacccttcatcggcagatgacctccgtcaaatacaaggattggtttcacgccatggtgccgcaacatgttaaccctatgcatgcaatactcaatatgcctggttcagattcaggaggggaaacacaaggtgtaagttatggtgctcaactacaacggtgataaatgatgataaaaactggagttgcaaatctatggccctccgcattatgagttcacgacatcaaaaatgcagcaatgttagaagatatcccatacagtaaaaagatactactaacaatgctaagctattgttaacgtttattgaactattcatgtctaagctatttccaataaaaattccacaaactaaaatggtgaattctctgaactaaagcggcaccagatgccaagcagcggatctctcccaagtgtgtattttattcaatgcaacctagacatacaagaatctgggcactgaggcggataacaaatttcagtaaatgtactgcccctggaagggggcgaaaacaaatgccgcacatttattaccttaatcctgagagagactgaacaaacaagaaatccccccccccttcctacacccacctaaaaaatgcggaaatctctcatccgaagcaagacgtgccttttacccctcctccgaaatggatttcaccagtcgggaccaagaaaacaaaatcggaagaaacccctggtaggaccagcagctgtcaatacgctcgtggggaagaagtagatttcccggatccgtcgatttaggtctcaccaatcggcgaaatggattaagaaaccctgggttccaagaaaaggggggaggtcaccggagccgaacctggtggtgggtaggcccttgcagaggcggtcgccgcaggagagggcgcccttgtggagccaggagtaggtgtcgacggccaccgtctggcccttgagcgcctccaccccgatgggcgccatgatcgacttcagctgcggcagcaatccctggatccccattgccgcctctctctctctctctctctctctctctctctctcctctctctctcgctctctctctctacttgtaggttttttcttggaaggggagaagtgaagggcgggaagcgaggggttggagggagggagccgagtgaaattggcggacggcctctcgttttttctcttccggcggtccccaccataaatctatccgaaccgtcggtctcgccatccaacggctgtgctacagtgttttgctccgtgcgagtaggccacagcctgagtgggttccagatccgcgattgtgagtgtccaacattagttgggccctaacggggttccttacagctacgtgcggcctgtccgtgttaggccggaacggaattcccatgggcttgcagcccatttaagttgggccgtaacaggatttccgccaacgtgcgggccgttggttttgggccgtaacgggatttccgccaacgtgtgggggaggggggtgggggcggactaattcgagaaaattaatttttcatttgaattttaatacctttaactcaaatttcaaacttttcatctaaaaattgaatactttcatatcaaatttcaaattttcaaatcaaatttcaaaaacttcccgacataaattttagcgataatttataattttcagacccacctataagtgataaaggtggggtgcagtcgactgcaaagatcctgacagccgcctgccccgccactctgaccgccagagacggcgcccaccaaaaccagacagttacatcgtcatcccaatacggaaaaatataccgtgaaaattccacgtgtggtgtaaatccagaaactaccggtagtacaaaagaatggacatataagatttataactttttactaatgctaacgtgaacaaatctcaaaaatcaatttgtatatgctacgatatatggagattgcacgacatttttcccttccaacgtgtaggtgtgagacagtgagagcgacaaaaaagaggctgctccatgagcaatgaactcttgacatttcatttttttttctccttttccctatctgtatgtacagtaagaatgggtcatgctcattcgctcgtgggggggaaccggacgcctgaatgcaccaacaaagaatggaatcacaatgtcacatgtcgggagatcgatatcggttagcccgtctgctatctacgtgagaagccgccaaaaatgagcgcgacggcgaccgctacggcaggtaccaggccgctgtacggcggccgcggcgacgctccgttcacgtcgaactggcccgtgttcacgtactggttcttccccgacgacgtcgtcacgttcaccgacgtcgaacctaccaaaagaaagaaaaacaggcattcgttagttgttcacttgtttgtcacaacgacgacgaagaagaagaatcggaaaacgtgatgaatccatggacaaaatctgaaaattcgggtgagcttacagtcgtagtcagtccagcccatgcgcatgttcgccaagtcatacacaaaaatcttgtccttcaaaactagatctgcgtcaaagtgggaccaaatagttagcaacaaagcatcaacatggagaaatgtgtgcttcaatcatcagcataggactaatagatcgactgttttttttttatggaaattgaagtgttcagggtcaaggaaaaacatatggggtcaaaacgtaggattaatctgtcaaggcctcaatacccttgaaagaacttgcagattaatgtgcatcgatgtgattattgagaatgttgttaatcattgaaatttttcagacatcagtggtgtgatgtgatggttgtctcaagtcttaatagtagttgcgggttagacttagacgtgcaaccataattagctaattcaatcagagctagttaactaacctccgagtatggttatttgttgaccctggttcctttgccaaccaatacaccacaatacattgttgtcctgaaaagcatgatatggtattaatatgggcaggaacaagtcttttcagaaacggttaggcagatatacaactgttaccaaggccagaaaccaaatatattaaaaaaaatgcaggcttacaatagaagcctgctgcaaaagatagttctctggcttcaccgtcattgcaacaccacccataaaatatagtgacacggtaggaaacgacgagtcaacgctggttgaaaagcgaaaatatctgtaagtaatttgacatactgaagaacatgagctgctaatttccttcactgaaacaagaagctaacctgctggaagttacaaagcattggttccccttgctgacaagagagcgcacagatggagagactgcagcagttatctgcaaaaacaaaatatgaggactaacaatcatgtaacaagattaattactatcgtaggcttatcatatatggggaattccagaaaatagaactataagtgggccctatgaagctcaccgcattaacaaatggatcatatgccccatctgcaagatatgctaaagttgttcctgagtccacaattgttccttgtgtatttgatgtcgtaaacaaggaggaatcaattggcagcttctgtccattgacaacgatactttccagattcaaattgtaatgaggcctatatttcattgaaaaataaatcataaactgacgtccatagaaagaaattaggaggaagaatatcaagttactcatgcagcaatattgttagcctctcacgcaaggttaatgaatgtgcatacacttattggttgaaaacttttctacaaacaaaaaatcagcagaattctgaagttatacaataagtaattctagtaagagactcactgtgatgggacgagtggagtatagactaatcctggctcgacaatttcaccaagaacgagaataccaccaccattatctgaacctttcaggcaatgagagaacacctttggggataccccaagagaattcagttgtgagacaacagacagctgatgctgtccaaacccaaaaatcccatcaactgccctgtctgtctttgtcaagtctcctgactgtgagttgctacatctgtttcaaaagaattaacatattcatcagacaatgaataatactgatcatgcgaagcaacaaagttcactgttagggtaatgaaaataaaaaaatgcacagttaaactttacagcaaagtgtcaccaggcttctactgctaaaagatccacataaggctaagcttttgttaacataacaacaaggccattaacaggatgaagcatgcatgccagaggatagtagtctagaagcatgctgaatttcttttgctccagaatggcatggaaagcaaaatataaatataattttattcaggttgaccattaaggatattgacaactttttctggtggcaactgttttcagggatgacaagaactttattcagattgactattaaggatattgaaaggaagtttgcttgcaaaagtaacaagaagactgttggtttaaggacattgggagtttgttgccattaggtccatcatttgtaccaactcaatcagcaaaaagagccaactttgtcacacatgtgcaacaaactgtcaacatgtaaatggaccacatcactaacaaggtttctaatggtatcttactatccttaaagcacagtttagttgtcgattgcagtttaaaattaactaatgtaaaatttagaaagatacagggcttcaagggaactgtacccaaaaacaatagaggctgaagaattggcagtttgctcatttcccatgacagtgtcaaaatacattgtgtcagacacgtaataacctgatgtgccacttccatcaccatacgtgaaagtgtaaccacatgggctgttgtctgaagtctggcagactgcttcgcttgtttgaagggcagctgtacacctatcatctgagcatggtattttggatgatgttgatgaagtgtcaggattgaagaactccaactggatctgaaaaacatataaagtaataatccaatcagaatgaatctcaactgataggtaagtccatctcaagggataacaatgctgttgtatgcatgtcatagagataaggataagagcgcaaagaatgagatgtctcacattgagcccacttgaagatgggcaaccggtgcaagggctgcacgctacccataagatgtcactgccagtgtcaatctggacaaaatattcttttggtgggcttcccaatttcacacgcgtaaaatagagcctgcaaattcaaacactaggaattaggataaagtagttgcaaaaaggtctcctaatttcaaataacaagccaaattgcaaaatgaaaaatggcatcagtcctacaattcttctgattggaacccactaactgcaattgataactctatgtattatccaaggttgagtcacgtcatcttcaaaattatatccatcagctgacaatcccccaacccaacaaaaggacatgtatcctttcagtccttccatccctgctgaacgtcccctttttgctatctgcattggcgagcatgcttccctaatcatgatatgatatcatctttacattagcatgacactaatccaccctgcccatcagtagtaactagttatagtcatgtttgtcatttttaacaaaaccattgttaatacatgtatagatgttatattatatccataattatggaaaaattgcatccctcaaattccctctacaaagtagtatccactactagttgaaggatagttccaaaacggaggttgggcaatcacataacatttctaaatttggaaacaaactgaaacgttcatcctaacaaattcaaggattcacttaaagatgagcatgtttacaaattgccgcccatcagtaaaggtttaaacacatgatactccaatacctcaagggagttcatcaacaccacagattgcagatggtaactaactaactatagcctatggcacaaaaccatgaagtggaattcagcatgatggaaggtgtgatagcatataaagcctacaggtattggtgaaacataattgctccccttttaaggctcgcaaggggcaattaaaaagttccgtctagcagtccataatatatcgctccctattgctaagatatctctaaataaccctgtcactaagcttacaactggtgttgcacaaatttgaattgattacacaaacaaaagttaaatcatagctgagggtgacaaattcctaaccgcagctaagacaaataaatatcttttttttcctaagaggaattgaccttaagtaaaagcaatcgaggaaaatgaaagaaagcaggtattgcggccaagtgaaactgtgacgggcaaccaaatctctgtaaacactcgatccagtagaagcaaggtacgggctaataaatgaattctttcttctttcagaaaggaaaaatgaactctttctttacatatgaatgcatttattttattttaattggagcaagcaaacgcatcactgcatcagaattgggctcccgaatgaacaagcaattgagcatcgacattgaaacaagagaagcaattgaatgcatataaagaaagagcgaagtcagaatcgtcgcatcgaaaaagggacaaaaacgaatctaagaatccgaaagaaaacaagccgccgccatctacgacgaacaattcggccaaaaaaaaaaaaaagaaagccaaaacttcgaacaaaacagaacgagaagatacttttcagaatgcacacaaaaaaacatcagcaagaaaccgtcgagtaagggcataaacacttcatcagggttgaaccttcatccgagaaacagaaagaactgaagcaacaaaagcccacgaacaacccagccatccaccaccctgaaaacgaactaccattgtcgatacgtgagaccaatctaccttagcagaagcaacaacctcagatcaacgccgagacgaacaaacccagaagaagaaaagaactcccaaatttctcgatcacacacaaccacacccatacaaaacacagggaaaagaaagcgagaggcagctcacccacccgaccatgaacgggttggcggagccctccacggggaagtccaccacgccggcgacccctcctcctcctcccccgagcagccccctcctcccgtgccgcgccctgtcccgctccctcaggtgctccaccgccacccccttgtgcggcagcgcgcgctccagcctcagcgccgccggcaacggcgccgcgcccgccccagccgccagcaccagcgcggcgacgaccgccaccgccgccaccgccgcgaactccggcggcctcctcatccggcacgccgccttgcagtcgccgacgcggcgaggcggaggggtggcgcggaggctgcgccgctgcgcgtgtgcgcgtagcagcaactttttttttgcgtttagggactcgaaataaccaggatttagcttgccagcatatatacccccctccaacttgtcctggattgtaaataaagaaagtttcaggggtgagaggtgaaaacgcggggggacgggcaaaggattacgtgtgggctctgcggttgccactcttctgctccgccgctttatagcgtgtccagcattttttcctccttttctctcctcctcttggggttttcctttcttggttttcctttgcttctttgctgcctttgacccaaagtgatgggtttggtttggcttagtttattcaaacagaggctgccatgccaaattccacatgaattttggggaaataagttcaactcctgcataaaccatggcaaaagaaaaatagaattccaattgtcccctaatttgatgatgatgtcagtagtgagagctcttttgttcttccttgtgtgttccattttcttgattggatatgatggatgatgatatattgagatatctaagaaaattcttgttgcacatactatgggtcccactgctagtctaatgatgcttttcattagtacaattgtgcaaaaattgcatttggggaaagagccaaagaggggaataagattactagatactccacctagtttataaaagtattctcttgcatctttgcctttagcatttctcctgcgtccaatagtagcagctaaattggcgttcaaaaaaaaatactagcagccaaatctgccattcaatttgtcaagtttcaacaacgatctacaaagaaagaaacaaatcaacaatggacttctataaatacaatattttgataataatttcttttttcttagaaaatggagtaaaacccattctatgcatccaaagcggatttacgcagccaaatttgatgtaatttaatgggtgtatttagttcacgctaaaattagaaatttggttaaattggaacgatgtcacggaaaagtttaaagtttatgtgtgtaagaaagttttgatgtgatggaaaagttggaagtttgaaaaaaaaaagtttagaactaaggccctgtttagttcacaccaaacttcccccaaactttcaacttttcatcacatcacatcacatccaaaactttcctacacacataaactcctaactttttttccaaactaccaactttccccaaacttcccaccaatttcaggaactaaacacaacctaaggccttgtttagttccaaactttttcttcaaacttccagcttttctatcacataaaaatttttctacacacataaacttccaacttttccatcacattgttccaatttcaaccaaactttcaattttagtgtgaaataaacacaccctaaactcggcctctatcgtggacaatcacagtaagaagaacatcagaaaacagtagagcactgccacctgacatgggacattcattttgtgaattctgaacatgctaatctatctatactgtacctaacaactacagtaagcttcatggatacagtatatgccctgcatctcgctaaattatactccagttgcaagtatgcaacctctaatgtaatgtagagtactcctacctaacaatctggatgggaccaatcattttctctagaccgtttgacaagccatatcttgaaaacaatttctgaatctttcaacgtgtgctcatcagcaggaactatacagcagcaataatagaaaaacgtgcatgagtgagtgggagagaaacttctcccctgagctacgaatgttcctacccaatgatcataacatatcagaaagaaaaccttcatgtctgaacaatgactcgatcaagggcatcttttccttctccattgatggggcaggtagaaatcttcatccagttaggtggcatgcctttgttgggaagctactcccccttgctggatgatcaagtggttcaggctgaataaatttgggaaaatgcttttcccatgctactgatgtaattggtgctttgcaaagggagtgtcagtgtcatccttgatattgcacgcgcattggtatgatcttgtccaaaaatatttcctgcaccaaatgtgtaggtacgccattgattttgatatgaataaagggaaattaattatgtggcccagtcctggctcaggtacatagatttggcgtttcatatatcactggtttctctatagttgtaaacttttttttttgcttaagttcagttttgcgtgaggtatttggcgtcactgtccttggtagcacaaatgcaatgattttcatagtgtatttatgaaattcaacaggaattttcttgggagcataattcaatgcatccaaaatacgagtactacttttggagaagcctgtctgtctgctttctggcacggccacatgtgattagcaaaaaacaagcagataatggtggtatcaatgtcaagaattcccttatcaaaagatgccaaatgactccccccaaggttcacatttcttgtgtcatgtgccttactaatcggagcaaagaacaacaacctcatcagaagattggccagataagtaggtcaagcaatcagctaatccagctttgctgcctacacggcacctagctagtgcctgttgccttgcgtcgtcgccaacacagatctctcctgcaattgcctaatgccaatgcgacatcctattaaaatctttaatattgtgatagcacaaagcctctggttcattggggtagttgattagattggttaggataaagagttgacaaaaagatccaatcttttgatctctctctgcctttagcacagatgttgtttattgtgtgtggtacagcatgacaaattcccttcagagattccctttaggcctttactagtattgtactgtttgttttataatgatataatgattatgatgatcaagtaaagtactggttcaatgtcattactgttcggttgaactgtatactgtactatttatattgcttggtctaccaattggttttgagttttgacgcattcagataccgtgcttgaacaagctaaggtgtctagcaacaacgagcttgactagttaatcaacatgaatgtctgttcagttcagctgtttactaggaccatcttgtcgcgaggaatctaactggtaataatgaaatgaatcttaagccattcaactcaaaacttggaacagacaacagagtatcactgtccagcagcccctagaatagttgtgcccactaatgttgcttgttgaactttttatgtaaacaaaaaagtgtgttgcttgctcaatctgtcgttctccacttaatttttttccatgaacatattttcaaggcaggtttaaaatactattatctccctcaaatgtaaggcaacttgttctggtccaatatgctgtaaatttgttttgtttttttcttgatgcctctcattttatctacttgttgtcctatcacccacagtcaaaaaagttcgaattttaatatttagttttggagttagtttagaggatttcgttcatcaaaatttactttccagcattagtttttaaacatgaaataaattatatctacgaatatatttttggttgcttaatttattttaacgagctatagatcaaacaatcaatctttatctgaagggaatgtatcatgttgtaccacgcacaataaacaacatttttagtacacaaacacacacacacacactcttaaagagtgattttactgccttgatccttaaggaggtatgggtgttatataagtactgcattcgtcccaaagaaaacttaacctagttcctagtacaatgaatcttgtctgtgatatgggcccggggtatgtgaagcgtgggggagttaccttcccatttagccacgtggccctacagcctggtcctcctcccacacctcggaagttgcggaagcagctaggaggcctcggggtgccaagtcacacccctcgggccctcgcgctgcctcgccccgaggccctcgggcagccgccatgtggcgaggggagcgagcggggaggaggcccaggctgagccgccatcaatgcgcaacaccctaaccgtctaaatgcggtaggggcggacgtgtggtgcggtccgattgacccacgtcaatcgggcgtaaccagactgtgaccggcctgttgccggtcacgtctgatcggacgggcgaccgtgcccccacgttcgcccctgtacccagcggagtggaggcaggtatgccccgtcccatcaaaccatcatctgcagctccctccatgcgagatgaaccgccgaaagcctctactcatttaagagggaatgacagggctgtcccccatgttgagtggggggcggcgttgggtcccactcaaggacggactgctgcttgacttccgggcgaaggcaaggatcgtggtccggtcaaggtaaagtgggtccccctcccgtgaaagagtaggtagaagcggtgcatgtggtatccccttgaactataaaaggaggaccttgcccaccgagaaaagggacgactctcagttagcctaagccccaggggaagaagagggaattcctcctagagcttaggaacctttgtaaccctcaatcttaaatcccacacacaggagtatggtattacgctcgatagtggcccgaacctgtataatcccagcttccacgtgcgatctagaagcactcagggcggatacacgatctcgacacgcgagccttttcccccggccgaactcacaaaagggggatctcacgatctcccgctagagagggtcattcctcgacaaatctggactatcctttgtccagattcattgtatgagtttttttgacagaggaagtattgtataatttggtacctagaatagatagctgctctttcttttacaactattttgtctgcgctgcttttcctcaaaccatatcgtcatctaatataaagcgtattataaggaaaaaaaacacacacactataagactatactccctcaattccaaaatataaggcataaccacctttaacccaaagatcaagaaacaattattatcatctctttgtttgaatcaatccaattaatacaatacatgcacccaatagaattaaacatctagtgagtgtatgatttaaaaaataataatttaggagagaagagatgctaattaattgccatgcatgcatgcatgccttatattatgaaacacctttaaaaagtagttgtgctatatatttttagaatggatggagtatttcagtagataagactaacctcaagttaaacaattagctttgcccttaagtaacctgaggggggacaatggtttggaaaaaggaaagatcccagaaagggagcacccacaagagaaaaaaaaaactaaaacctggccagagatgtagacctatcactaccgccttttaacacaaacaagaacccatcagagcgcctgcagccaatcacccaacaaaaggtgtcccctcacactctcacgctgcataccccacagggagaggggaagaaaaaaaaagaggtaaaaatcaaaaggtacggagaggtatagcagcggtactttggtacggctgtgtgttgcaaagatgtgttacgaattcggagaccggcaaggatcggcagcacatgttcaatgctagatcttgtggtgtagaaggaggagagatgtgtgtatcgtgtactataaaatgcatcacgtgtggtggcatgaatatgtatcatgatgtatacttggagagagattctatgtccttgtgagaagatgctgggatatgatagctttaggggatattaattaacattagagaggtgttagttctcaaattcacacttaaaaatagagtatcattggtaaggtgtcataatttgatatatcgtaattttagatcttaaccctatagaggtattaggagataccaaatttatatttaaaaatagtttaaccgtggtatctcctcgatggcatagatatagtatattaagactcatgctaaatatgatggattatcgtggcttgctcaagctcctaaacaatgagtgtgttcggaaagacgagtttgtggctgcggcggcaataaccatagttcctctactacttgtggcactattgatgttggttgcgccgcaaccgcaaccacgattgctgaacaaacccaatgttttttctaaaaaaaaaataatcaacatttttttagatttttttcatcatttttttggctttctaatatctaacttatttgtttgtgccctcagaaaattattataccctcaatttcatccatcatcagtgagcactttagaactggaccagtgatgtttcaaatgtaggaaagttcaattctcatgataattagaataacttcgatgattatccacgacactgttatggtgcataaaacgatagcaacaggagataaacaaaggtacatgccatacgcgagtggcataacactcacccaatagcccataggttaagatccccagcctagtagcagctctcctaggtcctagctactccacactctacttgcaccctcttcaccctcttttggctcttcaaaaagagttcattcgtgcgcttccctttttgaagttttgtttggacagcaacttgcactccctccctccactagctctcaaaccgaatagccaggaggcccgaactcactgcatccactcgtgaggcaggcaaccgaccaccgacccaacccaaagatttattttaccagaacaagaggttgccactctccgacaataagcacattcatctcagtaaatagtaaaaaaaaaacaaacaaaatttattttggaaatattcttttgaattttgttgggaatgctacgaatcgggatgccgacgtttcagacgaaccctctccgaaaatattgtttcttctccttaaatattttttctactaaactacttatctgaccaaaccattatatccgttgtaattaaatctttatgacaagatatcatatgattatattatgtcaagagaaaaacatgtgtttcaagttgttaaaactcaatgttttatatgtgatagtaatatgtttcaatgcatgtcttgagtgtatttcataaaatttcaaactacctgccaccactctctctccacctttattcatgcatgcatgcatacatttaatgaccttcaaaacgttttttcgctaaaactatttatctaatacgtgatccgatcacaccattatattcgttgcaattaaatttttacaataagataacatatgattatattctgataaaagaaaaacataagtttcagtccgttaacacgcaatgttttatacgtgataatgacatgtttcaatgtatgtctttaccgtatttcacaaaaatgttactaaatgtttcaacgattgatttttttatcatatataactcaatgttttattggtggtcaattataatatttgaccgaccgaatttttttaaaaaaaagatcgggcgcccgattcaaatattcttccgaattttgtcggtcatcaagttcttaccattaccgtatcctatcactatcggtaccgcccggtaatcgtgatagttccaacttcatatatgacagggtcatcgcgtagtcaagtcaattaaataacactcctaccgaacatttttttctgtttccaccagtggagaaacagaagagccctccgagtctgcggaaacggcgcccgcgctttccccgctttccccctcctttcaacggccgtcgcacatggtgaacgcagcagccgggtcggggtcgcgtacgcagccgcattcgcatccgcatcggcagccgcagccgcagccgcagcccggtaaacgcacgggtgggtcgtgggtggaacgccgcggacgtccgcgattcttccgtccacgcggttgcagtacacacactctctctctctctctctccccccggctcccgcggaatgccgcgatacgagtttgggagcgtgcgtggcgtgggcgcggttgcgttcgcgtgcgtgcgtcctggcgggggagatggcggcggggcgatgtagtcgaggcgaggcacggcacgtaaaaggttcgtctagaagcagaagcagctgaaagtcatggtagcccacgcaagagaatcaacaacgtgaggacgagacccgggggctccgttcgctggatgggaatatatcatttcgggtttggtacgacgtgatgcttgatgaggtgatcagggagtaaaataatggatcttcttgaatcttgattgaaaatggttaaaaaaaacaatcgactgagctcctgtctagactctagaggcatcttggtggtgtaaattttggggagaattctaacaggagattaatcgatatacattcgactaaccggtagtgactcaaacgtgggtattcgctcgttttcgaaacagttggggcgagtggttcgcggttcgctatcattgtgtgccatggtccatggatcaccgcacacaccaggtaaagggcaaactctttccgatccaaagacttcgccgtccttgacaacggcccatgtcaggcgagaccatcgcgcacttattattacgagtaacatctcatcctcctcaaaaaaggttttgtaacatgaacatctcagccaccatatcaacgcaatgatgctgagcacacttcatttctgacgctggctgcactgcatttttcttcatggtcctacgtaccgtattagcatgatccttctgccttttagttcaattaggtacagtacacagaatcagtaaccgtgtgatgtacagaaagaagtttggggttaccatgtagacaggcacagaaaatggaacgctaaacatctgtggtttaagggaaaagatacacgctttattgatattttcaagtgtacagatgtgtgaatttaccctcaagctttgaaagccatgatcgctgcggttcaggactgttcaaatctaaaacatcttccaaacctccgagccaaaaaaaaaaaagagaaattaagaaaaagaatgaatggactccaaaattcttttgcacgaatacatgtggcctatccacaacttgatcgagcccccacaaagagcgtactaacatcagtagtaagttgcacttgcttcccctatataccctgtaaaactgcaatcatgaagcacaccaaaactgcaccttaatctccaaatcgcgacaacttccatatctgtagtgtacataggcagaactagcgagtcgccaattgagcttcaccattgaagatcaatcacgtaaaatgttaaggggcgctgtaggtcgagccaagttatgcagtcccaggttcccagctgtggcatacttctgtaagcaacagatatccaatggcgcagatcatgttgtccctcgacagtttagccattcacgcatgtcaatttgtattaacatataggatggggtgaagatcaaggattaaacagtgactatggatcatatcgagccccagatgtgaaagatgagaagaacccagctgctggtccaggaagaatgtcgctgagtttgccaacctgcccatcagagattatggacccccatcttgaagtgttctccccaaatttgctcccaacctgataaatgatgcaacatggagctgagcattgctactgaattagggaaaaaaacgcatcacaaagctgctcaatgaaggactataaagaaacaaatagagtatatatgttttcagtgccacctgctcaatgaaagactataacaaaaatcaaacttctagataaccgataaggatttggttgacttgaaacaaatgttatgcagtagtgataagtgatactaatcaagacatggaaccacctatattcagtccatagttattttttctgtgttaaaatgaagtaaagtcttattttttctgtgttaaattgaagtaaacttttgagtacttcctaccaataccatgcttatgccaaaaaaaaaaagatgttcagccaatcaagaattaatatatagaatccatatttagaaatatccacatgaaaggtctatattttgtttcagtaatctaaaaaaagtaaatgtgaatttctgatttaatgtgatactgcaatccaccatttgattttggtactaggcatgctaaaaacctgccataattgacagtacattgcctatacaagcttatgcagatatgctggagatggaatgaatatattggaagagaaataggcaagggccttatcagatggcttttggctttaagattctctatgaggagggtcaaggagattttgttcttttatttaacattgatcgacctttggttgatatatatcctaatttcatgtactccataggcacaacaaaaaaggacatccatatatgcgggattatttctttacttttagtttttactattttttactatgattactggtcactggtcaaacaagggtaaaggcatatatttgcatagtataaacctattagatatactcaacttagtgtatgcaagggtaaaggaatggaacagatctgattatgaataggatatccatttttcttgtctaggaatttgagtgtttaccttttaattaccaagggttaaatgctcccagctggtagctgcagagccactggtgaattgatagtattttggtgattttctcctcacttgcctcacagtgtaactgtctaaattaaaatcttcgaattttggtatgggttgatccaaggacaaatatattctccaaagagatgaactttttttagatacagaaggtattttattctgaagcacaagatgtgctagatccccaacctctgcccaggggcacacgaccaaaatgcattccatgatgttctagaatttcagcacatgttttttttatgttggaattgatctgggattatcctagccattcttacaagctgctaataggcgttccttttccttctttgcaccgaccacaggtttggaggatggaattaggcaatgtgacacacatgactacagtggaacaagttaatcgtgattgcaggtttggatatggcattggtaaggtgatgcacatgacgtaagtggagcaagttaatcacaattgcaggtttggaggacgccattacttaagcatatttttctgtcataataatatttggcatccatatgtttgtacacctataacatcccaaaattatctacctgaatgttctggtttgccacatgcacaccacagtactattgactatttatgaattatctgaaattcacattttacttgtgtatgctgatggttccctctgcccaatctcaattcaaagggttataagtcattttccttataatctactgctaagttcctacagaatatttgcctttatatgtataaaaaaagtctaaattgttgctgtacagatttcacacacatgatttattcaatagtttgaacatggataatgtgctttgttcaatttcctttttaaaaatctaagatttgcccattggattgtatctcagatttttgcatggtcttagagacttcaactacagtctggaaataatgtaatggtaaattggtaatgtctacatatttacagattgcgtgaactctctgttctatttttccactgacaagtacataaccatatttagatttgcaatatatgctacatgtaataaaaagtgacaatgaccatatctgaaccatatgaactttgcattctaaataagtacattgatcgttccctctgctagatcatacttatcagaaatacatgtcttttttaaaaaaataattattgttataatttactactgtcatacccaactatgctgttgctccaacaaaagaccatgtctgccactgaaccaattactgtatcaagttcatcttgcctgctatctgaagatctacctagccatgtttgctgttgctctaaccaaaatgaggctctacggttgttgtgtggcatacaacttttgtatttgatttgaatttagttttacatggcttgaacttgggctcgcattgcgtaagaacttggttgacaacttactgaaaatagaatttggtcttgcattatgtgcaaacctgtgtaatgtaatgtactgtttctattcagaacataaacatgcatattttccttgtgagttattggtaaggtaccgagttaataattcctgacagcctttagaattgtaatttttttattttggttttgttgctggttgactgccaaatgtttataatttctgtacaaatttcctgggagcaaaaaatagccaaacatatctcatgttgtgtggtccaaaaatcaaaagaaattatgttatgcttttctgccgtgctgatgacaagtactattttttttatacaaaggagatctcaaacctggtatacatgttatgtatggtgtcttaacttgtccttgcaatatgtgtgaaccatagatgtctgaacatttgccagattagtgtttgaacatttcctatattattgtctgagcatttggcacattagtttctggcttgcccttgtggtgtaggagtatctgaattcagaatctgaacttggacaagcatctaaatgatgttcaatgttttaataatgctgtgagctgattaatgttatggattcttgtagctcaagtattataacttcacaaattcaccaaaggatgcagaggttttcctgagtttagtgtctgaccatggtcattgcaatttgtgtaaacaatatactcctattaccattcatggttaggattggatatctgcaagttcatactgaattcatattatataagttcatacttaaccggcttggattgccaggtaagatccatattattgtctgaacgtggatatggaatgcatctgaatttagtgttggacatacccttgccatgtttctgaactcagtgtatgtatgaacatgcccttgcaagaatgtgccttgcacgtgcactattactagtaaactaaaaatatgcagtaggttactcacctgggtaacaaatgacttgagcaatggagcagcacctccaaggctaacattatcatcaaattctgatgccgtagatctttctccatttgaatatgatttccaagggcttctagatgtggaatcatcggatgttgactgtaatgatgatttgtgtgctcttgatgatagagctggggcactacaagtgaaacatatgaacatgagacctattagatctacaaactagtgtaatttttcatcagaaccagccaacgctacttacaaaggtttctttgaaaatcaactttcacaccaggctaaaaaacatcacatatggctgtccaataatatcatctcatcaagtattttaagcatgaatttaaacactatagctgtctaaaactaatgaccttaatggattaattacagaaatatgcattatacgacgataaaatgtatgtgtactcagtctgaagaattatttacctgatcggtaggtatttgaatcttgggacttgggagcacctcataatgtttgaatctgtatttgatttagtcggtaacttttgcacagttccagtatacatgtgattcagttgaaccaagaagccgaaaagaacaacatagcgcttgtaagattgcttctcattctcccacagataaggttcgtacctgtttcaaaataagcaaatgcttcatcatggacaaatatggagcatgggtttttgtctataaagactattgatcatgcattcagctattgaattatgtggtgatatgtataacaaagtaaaacagaggatagtgcttacgtagcccagtctatcggatccaatctctgtgagaacttattgatcagcttgtttataggctctatggtagctgaatctgcctgcaattgtgactgttttctcctgaaggaagtcttagcaatggcgcttggcgaagagtcatgtgttctctgtgtttcagtagttttggtggaagaacttttgcctcctgacagaacatcgccaatgaagcgcaaatcgagcagtatttgcagaacccccttttctgaaaccagagatttaccagactcgattgataccaaaaagctttcatagatatcaataacctgcacgaatttaagtagctgttaggttcagtgattatattggcttttaaatcatacactgaacattttctcctaatcttcatcaatgcaggtagacaaaacagataattgttaataaagcaacacatacaacagctagttcctcggaggttctcaaaattgaaatattgatgacagttggaagggcgaggcattcaggttaataaggtccatgacattatattattagggcacggtattaatttttgtaggcgtgtgcaggtaaactgaagactatagtgcccagcttaatcaatgcttgattataagaaaaacaacaaaagctgaaaagcttgattaacttataactctataattactatcaatcatagtagtaatgaattgtagaacagtcattacattttgccaatagcaactattgcacatataacataaacaaatggttccctcgtagtatctattgttgatcatcattacggtatggtcaaatttatacaaaggcaaaaacacatgaaagtgaactatagctagttgtgtttcatgcagatagcatgataaaacattctttggttcttccattctttgctagaagttccaggccaatgttttagcctataacatgcaccacaattacttctcgtcaccccctcaaagaagaaaaggttgtcatgaaagaacattaccttctgtaacaagtcccatgcaaagttttgcaatatagatttgtccaggatgtgccctccaattttatgaatctccaaacatgcttgataaagaaaggatataatgtacagtgaaggcattgatggaagtgctatttgcatctccaaggggccctcagtggattcctcttgtttgatgactgtgacttcccatccctgacaaggcacatatatcatgtctatgacaatcagcatgccatgtttattttggcattaaaatagcatgataggactagaaatcaacgttgaaacacatagtcagaatttaatatttgaatatagacaaaaatcgaagcacaaaaactagaatcaaaacttggggttagctgcttggtcaaccctagaaaaggtgagccagtaagtatagctctatcgaatatcctataatagataacttcaaaattggcattccaataggcaaaaacaaactctacaggcccacgattttattcaacaagttctttgtaaatcataagggcacttaataaaagagaaatgtcttctagctgctcagtcatgtccaacatgatccaaaattattacagatttcatcattatgttactaatattgctgtatatagcagatgtctttgttacctagcaaacaaaagcatccccgattgatagtatgaataacatggacagaatcagaaacagcagtaagaaatatacttagaatgccttttacccgtaaaggggttggaaagataacaattggaaagataagagggacatggagcgtacccgtaaaggggttgataaggacaatgaatcatctttgttgaggtcatatgagagaagctgtgataattcagtggacaaccatgctatccacaatccatgggctgcaatgcagagtgcctgtaaggtcttgtttagttcatcaagtctgggattggagctatcatcagcaccaaatagggaagcagcagcagcaatagtttgtcttctggggttgtcagaaaattgccttccaggactccttgggcttgactgtgtgtgcctcctgggggtaaaaggcatcgctgtatcaaacgatgctcttgaatgtcttggtgagggcgacgataatctcataaatgctgcaccaccagcctcctttacccactgccttggggatcctaggatcaagggtacatgactcgagtggtatctcaatgcaaacatgaggcggccaatgaagagagatctctccacgataacagatgctgcaagcatattgctctccccttttttggttctcaaggaagcagacaattttccaagctcagcttccaatccattcagtatcccagagatggtcttatagcatttctcttggaggtatggcaccagctccttcaatctgggagcagaattgtgcgagtccacaaaacttaacagatcctcaaggatagtcttgcatttgctgtcaattgcattcctgatgcgactaacttctggcccaaaatatgaggtaaggcagctgtggaaatcattttcatcagcaatcggtttcaaatgtgccaaaattccacctttcttgatcttagactcagagaaccagacaccacctccagttgaaactttccgcaaatacaccatgaaatcaccggcatcctttggatcagcattggcaccaataccatcaattgatttcttaatatttacactatcatccaagctgccgaattccaagtgcacaatgtctttcatccgttgcacaaaggcttcttccatccaatcctcaaaaatgtccttcccttccttcaagatgaggccacggatctgatcccatggtgattcaatctctgatccaaacacactcttcagccattgctccagagtcccttccagtccttccctcccatctaatgcctcccgcacaagtctttgcactgatccaagcccttccccactctcaatggcatcaactagtctttgccctccagcaatcacaccaaaaatctcatcacagcatcccttcagccaatctgtacaagtccttgcaacagcatctggctcaagtagcaccatggtggcctcaagttgatcccagtgttctttccacaaccgtgtctcttccacagggtctggaatgccaccgaacagctgtgaagggggcggcaaatcgagcaccgtcttgaaaaacagtggcaaatcattgagcgcaagcacaaacaactgcccgacatggcccagcgtgacacgcacgatcttggcgacatcgcacagcacggaggagtaggaggtcagatcggaggcaagggtggttagggcttgggagatccaggcgcggcgggaggagaggaagagttggagtgcctgggtcggggtgagcgacggtgcgtcgattgaggcagcggccgcgagcgcgtcggcgtgggcggcgacggagaggcggcggtcggcgaggcgctcgcgagcgcgctgcgcgatctggggccggaacgcctccaccagctgcgcctggtgcgcgagcagcgggaaccgcgcggccgccgcggcgtcgcgggagagcacgccgtgcaccacctgcgcccgcacgtaccgccccgcggcctccaggagcaggccctcgtcgagccgcccccagatgtgctcgggggtgtcgacgaggtacttggcgcgcgccgccgacgcgtagagccggacccgcccgccggacggggagggcgatgcggcggggggagcctcggggggcggcgcgagcgacgcgagggagtcggagatgcgggagaggttgccggagacggcgtcggaggactgcttgatgaggagtatcgagtccgcggagtcgaggaggtcgcggtagctgcggccgacgagctggcggagctcctcctccttggcggagatctcgcggcgcgtggcgccctccgccgcgcggatctccgggatgcgtctcgtgcggaacagctcctcggcgtcggccgcgccgccgccggagactgccgcggcaggcatcgccgcctagaccttggagctcgcggcgagatccaggaaggaagcgatcgggattgaggaggaggtagggaggagactgtgtgtactaggagatgcacgttcgtttgagttgggtagaggaggtgactgagagcggtgggtgcaggtggaccgaggggtcgtcagagggtgggcccagtaagtcagagacccgacaaacagtacaccgggttctgggagtgatcttgtgagataattgttgcgagttgtggcccgtgggtttaggttgtatttaggggttgtttggttgatgcgtaagcttatcataactaagcttaggtaagttgtggcatgtggcaaaagtatggccaagaaatagttaatcacaagtgtggcaatgttagctctagttatctgaatatgacatgtgggacctaagggtaggaaagtgtggcatgacacaattgtggcattaaaacaaacacacgcctagaaactgtggcatgactgaagtgtggcatggcaaagtgaagcaatcaaccaaacacccccttaacgttaaaattggaagtttgattgaaattagaacgatgtaacggaaaagttaaaagtttatgtatgtatgaaagtttttatgtgatgaagaagtttgaagtttgaagaaatattttggaactaaacacggcgttagcaaagttgctaaatgtccatattttcttggcttaaattaaacaaatctagaacaagatgtatcacgtcccatattatatttgtttattttttaggatggaggtacatagttagactgttgtgaatgcttgatgcatagtagtccataggtctatttgaaatattcttgtaatgttgatagtttaagtcactttggttgacaacttaagacttaagcaccttcattgttaagtgatacctctgcatgatcattatctacatactcagtggtagaagaagtagtagtacatggtatccatgcaatacttgcattaggcagttgtgcttgacagccttgactcatgcatggggggtgacaaatagacaaagcatgtcctaaccagaaaaaagcctgattcacttctgactaagcccaggtcaaaactcttattgggcccagtctgaggtctaatcaaccaaacgatgccggccttgtcaagtggggataaaatatgaaatggccatgtgtcttatttacttttttttattatcacaggttatttgctttatacttctaataaaaatatgctttattaaaaatattttatatagtgtatttgtttagaccacttattctaatctatttgtgagtttcatttctaaataaaatataaatgtttcgtgttaatgaagtggacaatccatctgaataatctgcgcaaaaaattgtttcaaacatggcccaccaaacaactaaacaagacccgtatatggcaatgttaactaaacaagtccaatagtttgcatggcaatgtttgccgcatagtatgattgcaagtctgtaaccttgcattgaacgaatattactcctggtcagacaaaataaagatcaattgccgttatatcgtctattgtctatacagtagttctttttttttttagaaaagtttatatgctgtgtttgatacaggagttcccaactcctccctttcgttttccgcacgcacgcttttcaaattagtaaacggtgtgttttttttcaaaaatattatatacgaaagttgcttaaaaaaatcatatatatacaattttttttaaaaaagctaatatttaaataattaggcactaatagatcgctccgttttccgtgtgtgtgatgggttcccaacacccaccaccgaacacacccatatagcagttggtatgcataggataggaaatgcttggtaggtcaaatatcattggtcctttaggctgagttctttccttgaggttcctaactcacctcattctttttcacgcatacatatcccaaagcagtatagaatctgtctactcccttcgtctcgaaaaaaacgaatctagtactggatatgacatattctagtacaacgaatctggacagaggtatgtctagattcattgtattaggatatgtcacatccagtattaggttggtttttcatggacaaagggagtacatgatttttaattaaataagacaatagtacgatgaatcatgaaatcaagcaaatcaaatcatagtataataaaatgctaaaaagggaatgtctgagcttgtaaaatagagataaacaagtgactatggggtaggcatgaaaacggatcggaaacggacggaaactagctttatcatattcgttttcatattttttttcggaatcagaatcggaatcgaaaactcggatacggaaatgaaatcgaatattatcgaatatagatacggagcgaatatgagacggaacgaatacggtaacgaatatttaccggtatataaaaaacccctcaaattgagtttcttgatcaaggaagagatatctcttattattttagttcaacatctccaacatttatatcgtcaattttgtagacggtctcacacccgtatgtgaaaatcgattttcatggctattcctctaagagatccatatgcaaatatgattatcattttctattccccaagaccttttactagatatataacttatttaccctttataaattggagatgttatttattttacttcacatcttcgaaacttgtaatatttgttttatactttaaatgctttcaaatacaaatgttataaactacaaagtagtagatcccgttgagctctataactttgatatggaacacatctccatcagatgtcgtttgaattgtagatctgagattttgtaaaaattaatatggtatattataatgaatatttagacccttaaatgacctcaaataataaaatagtcaataagaaagttgtagatctcatcgagctctacaatgttgatataaagtttgtcttcatctgatttcgtatgaaaaagttatttatatatatatatatacacttattttttctaaaatttgctcaatgtgtgcggatatccgaaaaaaaatacggatagtttccgaccgttttccgattccgacggatagtacccttaccgtattcgttttcgtttccgagaaaaaaaatccgaattcgtttccgaatccgagaatttccggatagttccgaccgaaactgtccgaatccgaaaaaaggtccgggcggacggaaactatccgaaccagtttcaaccctactatggggtgcttagatccagggtataaagttttggcatgtcacattagatatacggatacacatttgaagtatcaaacgttgtctaataacaaaacaaattatagaatccgcatgtaaactatgagacgaatttattaagcctaattaatccgtcattagcgaatgtttgctgtagcaccatatttgtcaaatcatggagcaattaagcttagaagatttgtctcgcaaattagtcgtaatatgtgcaattagttattttttagcctatatttaatacttcatgcaggtgttcaaacgttccatatgacagggtgaaaaaatttggggtgggatttaaaccagtgttgtggaagacggtatacggatatcggacggagagggtaccgccaaacgattaatcggaatttggcggaaatataacgttttgaaaatatatgtacatagttgataatagttttccctttttgataaacaaatgcatataactaaatatattccttctatatatccttaaatagaataaccatgtatgacatttaaataagttcataatggatagctgttactgtatatctcaattctcacgtagtaatgggttttgttcataatgcttgaaatgataatcaagagaatgttacatagcatagatgaccgtaatcaaggtcccaaataacatatgtatcggttacctcgaagagcttcatcaaatacaaactccaataacgtgattatcatcaaaatcaaggaacccatgttcaaactttagaggaagtcagttccttgtcattttacatcttgttgccttgtgaaaatttcggaagagcttgtagtcagtagtagtaaagggcacagctaacaaccatcatcacgccgacgattatacggttgattagacggagatggacgatttaatcggtaatgatcggatttatgcgttcgttaccgactaattatgaccgcatcgacgtgatgtgacggtctgatctccgtattcgtattatcggacgtattaacggccattaacaccgttttccacaacactgatttaaacaaggcctatgggggtgtttagatcccatcctaaaattttacacctcatcacattgaacgtttgaacacctgtatgaagtattaaatataggataaaaaataactaattgcacggtttgtgactaatttgcgagacaaattttttaagcctaattgtttcatgatttgacaatgtggtgctacaataaacatttgctaatgacggattaattaggcttaataaattcgtcttctggtttactgatggattatgtaattagtttttttattagactacgtttaatatttcaaatgtgtgtccatatatctgatgtgacacggcaaaaaattttaccctagatctaaacacaccctatcttaacttttctgcgggaattgacaactagtactagtaaaacccatatttcccctttcagatcaaatacaagcagcctcaacactttgaccactcaacagctctactagctgagatataggcacacaagttcaatcataaataaagtacgtatgtccgcatgttgcaagctacaccctccagataattgttttacacaatggccgtgtttagttagggtgtgtttggtttgggaccaagtgggatgggctagacccatcccagttttttgggatgggatggttccaattgtgtgtttggtttgtggtatgggatggttatagttttttgtttggtagaagggattgaggtgggatgggatggacaatttttcacggacgttagggccgtctgctcccagcggctagcttccaggctgctggtgagattggggacgaaggagctcgtcggcgcaagttgaggagctcgttggcgcgagcggaggagaggcggaggcgggtcgcggacgagcggcgacggtcgcgaaggtggcggcgggcgtggacgagcggcggcggtcgcggagacgaggcgaacgcggacgagcggcggcggttggttgcggaggcggaggtcggacacggacgaggcggcgaggcgaggcgtgggcgagcggaggccggtctcggaggcgaggcgaggcgcggacgagcggcggccggtcccggaggcgaggcgaggtgcaaaggagcggcggcggccggtcgcggaggcggaggtcggacacgaacgaggcggcggcggtcgcggatgagcggcggcagtcgcgcggaggaggacggagcggcgctgggggagggagcaggcggatgagggacgagcggccgtggcggcgccgcggcagagccgagcgggaggctgcgggagttgacgccgttctgtccgtcgaagtgggatggattggtccggccgatttcggcggaccatctcgtcacggatctaagaggaatattcctctccagggaccatcccatcccactcacctctcaacaaaacacctctaaaagtgggttcatcccatcccatcccatccttgcaaccaaacacttacttacttttaaactttcaaaaattccgtcacatcaaatatttggacacatgcacagagcattaaatgtggacgaaaaaaaaaacaattgcacagtttacatgtaaattgcgagacgaatcttttgagcctaattatgccatgatttgacaatgtggtgctacagtaaacatttgctaatgacggattaattagacttaatagattcgtctcgcattttataggcggatgattatgtaatttgttttattattagactacgtttaatatttcaaatgtgtgtccgtataaaaaaaattgggcgtgaaactaaacacggccaattttcataaatcaacaagctcaagttgcatcatctgacacgcttctttgtcctggccaatttaagagctaatttccagttcattaagtgcttcgcctgtgactgcaccaaagaaaatcaacaagaaacagcaataattgcatttttcaatcaacaagaacaagtcatgattgtcagtaactagcacaaagaaagacaggcgtttaaagcaagaaacaattactagtatccaggttgctttcgtcgaatatattattattgaagttaaaatccagacggactttttctatcataaacgcaaaaccccaatatcatgtaccataaaatgccgcttatggcaagaacacgctgaacacaatttcttggctgcgtatcttctgccactaaaatgttgagccaagcttgcaattcactcaatcaacgagcatttgttttgaaagtactgttcactaccaacttgacagaattccaccacaataaaagaaaactaagctgtggaattatctaatagtaccataatagttttgctgtcattttaaaggatgggttgcgcacaaacacagattcagctcaacacaattcacaaacttatttctattgaattgccatgatttgtttaattaactgatatataactttgacaacaatgtacaaaacaactgatatcaatagtcttccatgcatcacactgtcatcaaggcgacaaggcatgcctcctgaatttagctctagaccctaccgaaacaagaaaggtacaaaaacaataattccctagatcttaaaaatggcaagcattgcattcatacatatggtcacatgtaaaaacacaaggtgatgaattgccagtgtagagaagttacctgtaatattcctcagatacctgcaaatctcactggtgcataaggtgaccatgcaaacggagttctgcggctggacatcaagcttggttaatccttgcagcgtcctcttcctcacatcaatagcaaacaccaaatgcaacttgtccatgggactgggactggttctagaaagcaagaaaacaacatcatcatccatgcttatggtggggtttaccattggaagttccttgaacatttccacgatctcgctgaagctcaagttagaacgacatgggttgctggcacccaaggtgatgtctttaacaccaacctcacagtcacggtgccagtgctcgcacgaagaaccaatcaccggcattggcatgctccatgttgtggccttccagtcgtcacggattacctgggatttccttgtgttattgagcacgcaatccacataagaaacaggagtgctggtggtattcatcggctcttttggtgaccacatttccatctcaatatacttgatagagtctctgtttcggctgatggtcacatcccggaaatagctggggtcatattgtatcaggaagagatccctgttgctcctcgctgggcacggcagagggatgtcccggagcgcagggaactcatcgagcacgtcgcagaggaagatgccacgccagaggtccacccaggcgacggtgccaccctcgccgccgaccgtgatggtcttccctgtctcgtggtacagcctgtcgacagaggcaggtatagggataaacttgtctctgatgaactcggtcaccgataaccgcttggaggtccaacctttggaactggaggtggatctgtagaggtggaggtagaaatcccagctaacgggcgcaccgcctttgtacaccggggggccaagacccagggcggcgactgcataccaggcgccgtcttggcggctgaggagggcagtcatagagtcgtggaggtacacggggtgcgggttcgggagcagatctagccgatgggcgcgcggcctgtagacaaagtagtccaaacctcgtgcgttggcgatgctgtcggggttgacggggacgcagaggaggacgagatcggcgtcggaggcgatgatcttaggcaccacgcggcggaagtcgaggccggggcagtggacgcagaagcgggagagaagcggcgggcgggcggggtggaaggtcgcctggatgcgcaagccggtgctcgtggtgcccacgccggtgctggcgttgggcaggtcagcgatgaggcaccacctgtcgaggaggaccatgccccctgatgagccgtcttcatggccgtcggactctggaaggggaggagccgtggtcctgtagggaacagtcggggcagccatgtccatggacaagcgaaggataacagatccaatcgcagggaggaaccgaatgtgggacggggtttttgacttaaaaaaaactaattttataactcatctgaaaaccacgagacgaatttattaaacctaatttattcatcattaacacttataggtttctataatatttagctattcatcattaacactaattctgatttctatgcaaactatgcaattagtttttttatctatatttaatgctccatgcatatgtccaaagatttgatgtgaccttttaggaaaaaattagcaactaaacaaggacataggagaactaaattattgtgcaacccctcctctaccaagttagtctaagagagattgcataattctaccagaattggagacacaaagatgtagaggtaagactcttcttatttattcattaacttgtgcaatacaatagcacctcctcccctcaatatataggcatagccatgagtgcttttcatatttagtgacggacctaattagtgggtaaccgggctggaccttcatgggccggtggtttccttaaacaaatcaatcagatccaatttaacttttggggacaagagtctagggttcacgaaggacatttttctccacgtcactcgtgtgcggttaccatcaacagcacgtacaacaaagacgctactacatgtggtctcgagtcttcacatgggctaaaaccacaacattgttatagctcacacaataggaataagtttactttgagtgcctaactagtagccgaatcttattcatctcgtttaaccacgatataagatatgttgactttccaactattaaaacatgtacaatttttctcccggtggttctgaacgtggcgactacgtggaggtgtttgacatgatcttcatcctacgtgatacttatgagcgcagtttgagatctaatcaaccaagcgatgccggccttgtcaagtgggaataaattatgaaatggccatgtgtcttatttactttttttattaccatggattatttgctttatacttctaaaaatatgttttattaaaaatattttatcttgtttagaccacttattctaaaccatttgtgagtttcatttctaaataaaatataaatttatcatgttaatgaagtggacaatccatctcaataatctgcgcaaaaaaaatgtttcaaacatggcctaccaaacaactaaacaagacccgtatatggcaatgttaactaaacaagtccaatagtttgcatggcaatgtttgccgcatagtatgattgcaagtctgtaaccttccagtgattgaatattactcccggtcagagaaaataaagatcaattgccgttatatcgtctattttctatacaagggttctttttttttttgagaaaagtttatatagtagttggtatgcataggatagaaaatgcttggtaggtcaagttcattggtcctataggctgagttctttgcttgaggttcccaacccacctcattttttttcatacgtatgcatcccacactactaaatgatactttttttaaaaaaaaaatcctacaagaaagttgttttaaaaaaatatatattaatattttttaaaaatagataatatttaattaatcatacgctaatgagtcgttccgttcttgcgtgcgcgagagattagttcctaacttcaacatcaggtatgcctataaaacaaaaggctacgatagttttataatgttcgggggtggaaacaaatttaatatgatcttttgccatgccattgttttttttaccatttgttataattaccggaaacaagctaataagtcaaaagcaacttccattaaaaatgattaattttaaatttataggaaatcaaggttattagaggaaaaaaattaaacccccacatgagcaccgaatttacaccgtgtcccctcaccctattattcatcaatagcactatacaacccgtccacgtgatttttaattaaataagacaatagtacggtgaatcatgaaatcaagcaaattaaatcattgtataataaaatgctaaaaagagaatgtctgagctcgtaaaatagagataaacaagtggctatcttaacttttctacgggaattgacaactgctagtaaaacccatatttccccctttcagatcaaatacaagcagcctcaaccaccctcggctcacctttctggattaagaaacatatgccttatttagttcccataaactttttgtaaaaacatcacatcgaatatttaacacatatataaagcattaaatataaataaaaagaaaaattaattgctcaatttgtatgtaaatcacgagacgaatcttttgagtctaattagtccaggattagccataattgctacaataacccgtatgtgctaatgatggtttaattaggctcgaaagattcatcctgcgtttccagacgaattatgaaattagttttttcattcgtatctgaaacccctaccaacatccggtcaaacgtatgatgtgacatttaaaaatttttatttcatccactaaacagtcccatagccgtcttgacatcccattggttaactcggacacgcaaagccaacttcgaactcttcaactaaaacgtgcgtcgcatcccccggccccacacgtcagccaccccaaacagcccatcgccacgccaccgaaccccaccccaccccacccgccgcgccacgccatctctctctctccccccttcccagaaccaaccaaccacgcgcgcacgccccgcgtctcgtcgcgtcggctcggactcgaaccgaaccgacgcggcgagacccaacccgacccaacccaaaccccccgaataaaagatccctcgccccgcggcctcccgtccctcgtctcgcctccccacacgcgagcccaacacgcaaacggagctgcctcctccacacccccttatcctctcctccgggcgagcaatcctcgacgaacgatggcgtcgctcaccaccaccaccgccgccgcgtcctccccggccgcgctgccggcggcctcgaccaccgccccggcgtcgtccgtgtcgccggccgccgcggccgccaagcggcctcacctcgccggggacgacgcgccgtggcgggccgcggcgaccggcgccgcggggatccgccccgtcccgcgcatccaccacgcccccgtcctccgcgtcgcgcaggacgattattccgcctacgccctcgccgtcatgaaggtgcgttcccttttctcggttcggtttggttggtgggggaagggggtaattctaattctgggcttgctctgcagcatccggatccgataggggaggggttggccatggaggctatggtggaggcggccgggccggagtgcatcgtgcccgggcagcaggcgccgctgcggctgctgggcctcaaggtacgaaccgatctctcgatcgcagtgtatttttgcaatccaatcgttacgcacatgtgatcgatatagcccttagttaaattgaacgttattagatgttacttgtgaggggatgtatgcctgattttgggttaatcatgtatcttggttggatagttttgttatggttggtaattcggtgcttggtgcctgaggctcgctcaattatgctttatggttggtaattcggtgcgcggtgcctgtgattggtttgagcttttcttgatcattaaatattcattgggctatgcttgttaattgccaggtttagtgggttggttttgtcaatttcgtagtcatacaaattacagaaaacaaaattttatccatgggattagggatagtcgattaaacagttacgcaattgcgcagcaatgatttgtattatatttttcgtgttgtccaatagtgtttcagctttatcttttgtcaaaaaataggaaatacaagggatactaggttaaggttgagcctttgaggctactctgatgctgtggtactattcatttcgtgctctcgtggtattcattatgaaagtttgccattgctaggcataatatagctcaaaactttttcctttgtttaagtagaatatcatgaattgcttaaaagcttgagaataaattatgtaccttgcacattatggtgtttgagtacttcaataaatcatgtcttttcaatctctgtatttacttgcagtaattgatttctgtgcatgtatgcgttgcggtctttgcatgctcactatttggacacagcaccactagattgaattactacaatagtaaatgatatcacaaattgtcaactgaagtgaatgaaaaccccagccaattaacatggctagtatgaaatattgtgaactgtgaaacacccaaatttttcagtcttaaatttatcctttttgtcatttctatgtaggtttggccccttgatatagagatgaagttcctggagccatttggacgggaactacattccatgaaaaaggtaatgcaagcttgaggctttccatctgttgttctgttgcagctgcacgattggtttgaagtataaagtacttgaaaccaactcaagccttgtgtgctagtaatacttaatcagtctttagccatccttaagacctgtttggaaattacaatgtcccggagaaagataggcgttgtgtttgctatcctatccgtaggacttcctgtagacactcttaaagtcatccaagcctgttgccttttttcactttcaacattagtgctgctgggtaacatgcacttgcttccaatgacctgtatattgtgaccagaagagtccacccatgtatgccctgggattcctaacatttcaatggcaggttgaaggcaatagacccaaataaagtcatgatagaacgttcttcatgctttctagtgatcatggttaataacaccacatatatgttcacttctttctttctttctttctttcagtagtggtctgttgtcatttcctacaaactaaatggtggtctcctgaaccataattgccagagcagatacataacatttttgtacaactatctgctagtcgaaatgcaaatgtaaaatatggttttgtctcctaagatctgtttaggactacattggcattagtttataattaccttctactgctccattagaatgataacttatcacgcctagtttgtttagaacagacatgatttttatggtgtagttactatatcgtacattccttgtgcagttcatggacaagtcatgcagcgttatggactcatctatgtcaaataagtaggcgcatggctgattagttccctccattactagccaatgctgtatccacggctcttgctgaagttacaggaccagaaaggtacaaaacttgaagagcccatggagagaaaccacattcttgcttatcttgagtcgcatcacttgatggaacaagatatagcgccgagaacacagtaacgattagctagtactactatgtatggatccagggctgcctccaccgagttagtctacgtgttatgcgtttattgtattcatgtaacggttgtgacttgagaatataatgctgagttgcaaggaaaacgaagaaaaaaaatcatacaaaataccattctttttgtttctgtattgggttattctcggctgcaggccacatgcgaatatctgatggtgaattctcatcaaaatttcttgtgcgcgccccaggccctcatttatactactatttgttaacccgtaaagtactgtatttgtataacctgtgtttcggggtactcacgtatggtgaagcgtgctgttcattgcctggtccggattggcgattactgttgtcaccgtgaggattctattgatagagcgcgctcctccgattggagctctatcatccgtatgcgagatttcggatcgcgacatctgcaagatgccaagccgccaagcgtggattctcgattgcttaacgaaacagtggagtctccatcaaggactcatgggcacgccgcacgcctggtcgcccacaccacacaacggtgtcaatgagagaggctcctctcttcctggagcgcacggcaaaaccgctcgcccgtcccggtgcctgaagccgccaccacgcgcgacgagacacttcacgcacggcgattcggccttgcattgcaacacggagagggcgtgtgtacaggagggagggaggagggcttcagtcagtagtccccgctcgtccaaactcaagcaagagcaagagcagtgagctagctcgggcgcgcgcatgcatgtcattcgcatagcgtggtaatggccggcgtgccactggccactattgcagtcctggacgatttgtctatgcggatatatggtccatcccttgcaagaaacggtggcttctgcgcacgccggcgtcaatgcggcatggtcccatactccacaggaccatagccgcaatggccacaaggccgcaatcttgcgtcctcgtcgtggatggaagcgctcgaaacgtccgagtctgttttactgttctaccccgtatgggggggggggggggggtctgccgcatatgcatgtggcggctctagccacttgcagagttgcagcgcaggaaggggcagggcagtcagtgggtggggccaccgatggagcgtggaaactgcgtgcgcgtcgtagcgtaagctactcctacccaagcagagcaccccggctgaatcgcatattcgaatcagctcgtgggagggattcggatcaggtgcagtaacagtagtgactgtaactttggtaatacccaatcatccagccatccagcacacaagggatggcccagatttaactgtgtcatgcatcattttagctatttgaataagcatagaacagcttcagttcagattttgcctgaaatttctctccttttgatctgaattttcttgaacgttaagaaaacccaaatattgttaaagaaaactagacacatacttcatttcattatattgaacttcataatatcttgcacgcataattgacaaaatgagctagagtttaagcccttgtttagttcccaaaatattttttccaaaaacatcacatcgaatctttgtaaacatgtatggagcattaaatatagataaataaaaaaactaattgcacaatttgcatagaaaatgtgagacgaatcttttgagcctaattagtactccctccggtttcattttaatgacacggtatacaaaatatatctttgaccttatttttctattataacatataaaataaataaatgcatatttacttttattatagtgctttgaaagacaaatatatatatacgttgtcctttaaactaaatatttttaaaattattgatggtcaaagttataaaagtttggcctcggccttatctaaaacgtaaaataatatggaaccggatggagtacatgatagctataaagtgctacagtaacccatatgtgctaatcacggattaattaggcttaataaatccgtctcgcggtttccaggtgagttataaaattagttttttcattcgtgtccgaaaactccttccgacatctggtcaaacgtccgatatgacacccaaaaattttcttttcgcgaactaaacacaccctaactattttcgctgaaattgggtatcatgcatccactggcacaaaagctttcaaaatcaactagctatgctactgctagattaaccccgttacaaaagctttcatgatacaaaagtagatcatcatctgcttccaaaatcagcacgatgccttctaagttctattgacctcttcaaatgaacttttaagataagatgatatcttcaacattaatagaaccctagggaaaaaagataatatccaaattaatttcatgtgatgtgcagcagtaggaggtaaagtatgcttcccatggtagaattggcgccaattcttacctccctctcagatttttccctccaaaacacatctgctggaatcagagagtaggtgaaaagctgggggaaattaagcaacgaatctagaccatcccttatgtactcgatggttggatgatggatactgttaaagttgcagtcactactgatttgaatcctcgtgagagatgatgtgattacattacagacgcaaaatccagatttcttaatcgcgaatcatcaaaccgaaaccaactccaaaactctaatttcggccaaagagattccgcagaacagttcgagttgaccaatattatatagtttatttccccccttttttgttattactattccaactcgattatccaaacaaagtccatgttggatggatccagatcgccacaacactcccttgtcagttgtctgatcgactgatcgtctcatccctccctaacccgtctacttggccgataacccgtctcaccgccaaatcgccaatctcccacctcgtcacgcatgcgtgttcaaacgtgaactaatcaactctccgcgactccgcctccggccgtcccgtccccgtctccgggattttaatttcttggcacctcgcctcagcatattccatgtcccctctccatccgccccacgcgcccactttgaccgacccatcgatcgatcacgatatttagtagtagtagtagtattacaaatccagcaagcgatcccaatatcccattcccaaaaccccaatccatcctcggagcacgccaccttcacgaggaagagagaatcgaggaagcagagcgctcggaccagaggaggaggaggaggtgccagccatggtggaccggatcggcgccgcgtggtggtgcgcgtgcgccgtggggatgctggtggtgggggcgtgcctcgccggggagaccagcgagtaccggcgccagctcggctccgccgtcgacatgccgctcgacgccgacgtcttccgcgccccgcccggccgcaatgcgccccagcaggtaacccgctgcactctgcactgcatgttcttttctgcatcgcggaaggaaggcatcgatactcgatagactcctccgagggtatcgggtttcgaagccctcgatttgttttcagcatctgtgcagcttcggaggaatcaaatgttcctcttgttccttttgtgatcgatgcttgagatagtagcgtcctgcatctgttcgtgattcgtcactcgtgagccgcacttcgattactgtagattgtataatatactagtactagtactacggagtattttgctgttcgttttgtactcgcgctggtcctgctgagtgctgagtggtggtcatccatttgcatatgcttgtctcatggtgtctccatgctgatgaaacaagcaaggaattttcggtttcgatggtcccgaagttgactgcttgtctctcttcagaaattgtctcctctttaatcacactgtttgtgtttaattcgatcgtttcaatcggataaactgttgtgtttctggttggtagacctgaatttagcgtggcataaatgtttctagctacttgtgttacagggtttctgtcattagtctatcgatgagcatttggcttattcagagtcgtcacctggggtgctttttgcacttagcttaatcccagtccacaaacttggtgtgttcatgaattaaaatactgcttccgtaccaccgcttgctctgcttcactcatttctaaagttaacaccaacttttagggaagtgttccaacttctatcatacactatctgcttgaccatttactagtactaattggttgcagggcccttttacgaacccttttgttgtcttttggaactttcttattcttagggcacccgcaatggttatctataggctctctacaagagatccatgtcagcatatttttctacttggaagaattaaatgtagagagagagcaaagctatctactaacctgaagatagtctatagagaaaaacgaggcaatggattagagagctatagatacccatgtagacataccattaaagtggtttactattaatctagtctattgctgagatgtacatgttttatagatagcaccttactttaccattgcgggtgctcttatagagtcttactcccttgaattaagtattaggatgccttttactgagattgatgtccattcctttttcaatatgccgttagcataaaaaattatatgcaagatgtgctggggtatggtcattggtgtattctccactctgatgcttattgatattgttctctgaaaggttcatatcacacaaggaaatcatgatggcactgccatgataatctcatgggtgacaacaattgagccaggctcaagcactgtgctctatgggacttcggaggataatcttaatttctctgcagatggaaaacacactcagtatacgttctacaactacacctcaggatacattcatcactgtacaataaaaaagttggaggtattagttctttgcaaaagtcgtctttagtgtttggactgtaaattaaagattgactattggctttgttgcagtttgacacaaaatactactatgctgttgggattggacaaaccgtgaggaagttttggttcagaacccctccaaaaagtggcccagatgttccatatacatttggtctcataggtagtattcaatattcctaaattcatttttgctatgtcaggatacacattcaccaaatctataaacgatctatatcactgaaaacaacatctgtattcaggtgatcttggtcagagctacgactcgaatattacgctggcccattatgagtccaattcaaaggcgcaagcagtacttttcgttggggatctgtgttatgcagataactacccataccatgacaatgtgaggtgggatacatgggcaagatttgtagagaggaatgttgcctaccagccttggatctggacagctggaaatcatgagatagattttgccccagaacttgtaagtgtagtactccatttaactttatttgtgtaatgatcttcagtggatgcatatacagttcagtactagataatcagtggagcttatgttataagcatttacattctgttgaacatttgcagggtgaaacgaagccattcaagccatacagctataggtaccccacaccttataaggcttccggtagcacggcacctttctggtattctgtcaaaagagcatctgcttatattattgtcttggcatcatattcatcatatggtatgtaatatgatctagttgcgttttcttttgcatctgtattcaaagtacttagtaacaagcttcacaagtaaaattaaacacccacatgagcaacattgtgaataagtagtcagtcttacatgctttgggcaaacagaaacacacactgtacataacaatgaacttattaacttatactccatttgttgattgctaatagatggaataagataatttatcagttcttctgtttctttcccaggaaagtatactcctcagtacaagtggcttgaagctgagtttcccaaggttaacaggagtgaaacgccatggttgatagtgctattgcatgctccgtggtacaacagctataactatcactacatggaaggtgaaagcatgagagttatgtatgagccgtggttcgtcaagtacaaagttgacctcgtgtttgcaggacatgttcatgcctatgaacggacagtaagcacttacagttttttttcccctgaaaaatagttaaaactttgcatggggaatcaaatggaaatttcttgcaacttcattaggaactttagcacgcacttctttgtcgtctttatatttattagtatatacttgcatctagtaaaattaagttcaacgtgcttgtcgttttctttaaacaaaggagtgcttggttttactacttttttttaaactggtacggagcatgtatagctttactactgatactctgcttagagtagtactagtaccttaatcttgagctgctgacatagacttattttctctgattgcagcacaggatatcaaatgtcgcgtacaacattgtgaatggccagtgcactccagtccatgatcagtctgctccagtctacataaccatcggagatggaggaaaccaggaaggactggccaccaagtaagaatccttttttcgcttccaccaaccgttttcagttcctgaacgctgacaagatatcatgtgcaattgctgggaaaaaaaaacaaatataatgcagcatgacggcgccgcagcctggctactcggccttcagggagtcgagcttcgggcacgccatcctggacatcaagaacaggacgcacgcgtactacacgtggcaccgcaaccaggacggcaacgctgtggcggctgactccatgtggttcaccaacagatactggcagccgacggatgaatctttggacgactcccagtgatctgagtcgttcgtacatggtttactcacacctgctcctcctccctagtttgtgttgtggttcttctacgtgaataagcactggctcgatttgaacacacaggacggactcacggacgcctccggttcaggcgtcgtgatctaggtggttctttctccgctccagctccctcgtggccgtgtgctgcttgtgtatagaagaagcgcagctcacgtgcagcgagaggaaaagaaagctgagaaattgcgagttgatacttgataggcttgtgtacgttcgtactcgtctagatgttgaataaacacattggtttcgtggcgttgcgacttgcatttgacaatccgagtgggagtaacatgggcttctggcaagctgtggcttgtgccaaatcctaggaatccgttattatcagtcttttcgaatacttcaaatgtcgacaacaaactgataataacatcaattcagacttatcagtaaatcccctgaataatactactctaaatatgactgtatctagttctaaatcccctaaattgtaaatataacgatgcaaacattcagtagtaggtggcgtctatcccagccctatctagattggtttttttttttaaggacggagggagtacggagaagcactgggtcgacagcagctcactaatgttgagagattaaatacaccttaataagattagtaagcaaaggctctggtaactgccgtttgggccagagattagatagcctcaagttaagcaacgcagcagtccacagcaccaaaatgaacatttgtacatacatataaattgtcaagacaagcacaagtcgtcagattcccttgccaagacataaacatagcaattcaaaatggcagaaccaagcatatgacttcttgtacaggttaagtagcaaattttcaacgaaacagaactaagccctaacacatgtacttgaacttctgtccattgtagtatccgtatttgtggcgagtccgggtttcattacggggcagatcgtccggatgacaccaaaatggcttgggcacgggccagctgttataaaaaaaatgtatagggtacaataatgctatcaacaaacaaatcaacaaccaaatgcaaaacattgtaatttaactgcgatatgaggtgcaccagaatacctatttggccgaacactacgatctccagtcatagtccaatcaagcacaccagatgaagtgtcaccattgccaactttattgatagtcctgccaagcacaccaatggatagttttaacacatttgtgcttcggactgaagtaccgaaccagattcatcaagacgagcgcacaaacacatgcacatacgaacacaaattctaggagtacctttcttcatcaaaacgtgacagaacgtggaggataacggtgcatgataggaatggggttcctactatgtcatcaaagaagttgataccaacatatctcccatcaaaatcaataagaggccctccaatcccagcctaaccaggttacatggacaagttaatcatagtaccaacaaatgagactacatgcaactatttacttccaccatgtaaaagtaggcaacaaaaagtctcctcccataccttggtgattttaaaattggcgtaccgaagcattctgcaatcaagtgtgcctgaccagccaaccaaatgaccacttgcagccattaatatgtctgattcgaagcagcgccccacagctaatacatcctcacatacactttcctgctcatgatgaagatttgcagggcaaagagcacggaaatccttcacactgacaatagcaacattgtaatgtaaattacagtgctctagtgtcccttctgtacgttttttgtttggaagcaacacttcaatctgcaaatgacaaagtaagacttaagaagtaccttagaagaacaaggatcacagaataatatgagcacaacgttagctaccctcaaattttcaacaatcttgctacgatcgccagattttctaactaagctcgctgaagtcagaatagatgtacatccgttccattcaataaaaaaacctgtgcatgcaaaatatcttgtttctcctgcatataccgtaattttgattattagtgaaacaaatacaaatatgaaagtgaatagcaaatgtaaacttaccattgaatgaagcaagcgagacaacatttcgagatattcttgaagaaacatttttgctgagctcactccagacaccttcatcatacaagtcgccaaaagtctcttcaaaagtgttgaccaaaaccatgccatctggttatagatacacaaccatcagagggtagctaatgttgtgctcatattatgtaggaaagatctgcagattaatttacaagcaccgattcaccgttggccatacttattgatggcatgggataacccatggagtctagacactcaaattgatcctcatcacaaacatctgcaacaaaggtaaagttagcattggcatatggatgaatgacattcacgtaaaattatgcacataataatcaaatgttagattatataatgagaacttgggcaacaactcatattagaatggctcagtttgcatgcccatgagcataatctaagactaactgattagcactaaaactaggatagtgcaactgcaagacactatagcatatagtatgtattgtgaatatcaaatgagagctaaatttgcacttgtgaggataaaataaaaaatgatgatgaattgcatacaagagaaatatttgggggtggctttgtgctcaccttctagaagggacttaggcatctcaattgagagtcttcctccaaccctgcgaaagagcatcaacatgagtacttctccaaaggaaaaaatggatcaaaaccagtgcatcaatatgcaacatctgcatttacacaaaatgtaggaataaatatgacctgagtacaatggatatgattattttaataaaacaaaagataattgaaaggatgtttatacagaacctcagtgccacgaaacaacacaatcttttttaatgtgcacgtctatctattaacttattaaaggaatagaaaacgaaggctccacgttcgctctaatagcctagaaattctcatattaatcggagaaaaagaaaaaaacggagtccacaaaggaatacaatttaaaatagctgaaattcggaattaaaaataacgaatataggaagagaagactagagtccatcctggtatacaatttagaactaattgaatttcggaattaaaaataagaaaattaaaagcagagattctgtccatatagaaatatttataattaaaatttgaaattagaaaataaggaatattgaaagaaaagtgtagaatccatatagatatacaatttagaaacaataaaaattcaaaatttttaaaaataaggaatattacaagaatagtctagagtccacatagtaatttagaactaattgaaattcagaataaaaataataaattaaaagttgagtttagagtccatatagaaattcaatttataaataattaaaatccaaaattttaaaaaaagaaatattggaagaatattatagagtccatatgggaatacaatttagaaataactaaaattcggattaaaaaaaaggaatattgaaagacgagtttagattccatgtagacatataataataaatatcagaaattcggaatttaaaaataaaaaatattgaaagaagggtttaaagtatatataggtgtaagatttataaataatgaaaaatttagaattaaaaaaaataaaagaatattgaaagaagagtcatgatcatataaaaatacaaaataactaaagtttagaattaaacaaataattaataactattgcgtatatagaatacaatatgaatattacacattggttagtttggtcaagttagtacacaatttaaaataaaattatattataattttaatatattttaataatgaaatgtaaaatatatatgctattatgtgagaaaaaaatataaggatgctagccgcgcaatctgcgcgcgccatcatgctagttctaatatgaacaaaatgccttttaattagaaaaatatattgccttcaacaattgattcaagaaatataagaatgaattcatagtcacaattgcaaatctagtttgctatagagaaaccgtgaaacatgctaataggacaactagtgtaaccctaatatcttggtagaggtagcaaagaatcaagttgttattattcaatacctacatgccttataagtggttgaaaagttcaaaatagattttttttttcggaaaatgtataaagcatacctgattgccttcaattttgttgccaatgcaaaaaatttcctccttcggtaggatgtccgaaaatactccaaccgttcaataattatactgatcggcaggaaaagggatcttcccacaagaaataaaaggttcatgccaataaggttcccatcagaatcaaacagtgccccaccttcccaaccctagcatgtaaacaaaatggcaggcaacaagggttacataggaactaatcaacaaaatagagttatacagaacacgggttgcatacaaatgatgcctacaagtgcatttagtaatagagatagatcgaagaacttctgtttaaagtatacctcagagattttacatgtggacaacataaactcttcagcatcttcagatccatttgaatcgctaattagcatcccatctgtggtgattaatttgccagagatatcacgtcctacagctactaccttactcccggacagatatttcatcacgtgattgggaagcacctcgtgaacattaaggaaggtcatgactttgacaaaagcaatttcgtgatctaaatcatattcatccaaacaccctacgacaaaattgccttcacagcgcacttcgatctataattatactgcgatgttatcgaatgatcgcaattatatcttatgtaaacagcaaaaaatagtaaaggatggttagcaacaccacctttaagttatcacggtcttttgttttatcattgaaagctttaaccaaacttgctgaagtcaaaaaccttgtgaagttacgcttgtgttctatagttatgcctgagcatgcaaacaacacagagtgtcctacacaagaagagtaacttagatcatttatacctagcaacgttaataaatatatatttggcaaaccaagaagagtataacaacgtaatcaccatcagataaagcaagtgatacgacattactaaaattggatgggacctcttcaatgagttcacctaattaaacaaacatagcacaactgagtactcaaatagagctacaagaaacatgaacacacacgcgtgtgcgcgcacacacacagagagagcaaaccagatatctcctctccattgcaagatcttttactcgtacttgggcttatggtgatatcatcaagaccccttttcaatgtcagcatctttccaacactgacacagaaacaataaaaaaaatgccaaatgtgggtcaataaccagtaaaaaccgttgtaaaaccatcacagtttcatagccctatatgtgcctttaagcagttgcggaggacgaaaaaaaaaaagtgtgcctcatgaaacattatctccatgcaaagagttagcatcaattacacaatcacaaatttgtacatttttaaatttgcaatgctctggaattctaaaccatcgaacaaatatatcacctcttcgtgatgccaagaccttcctctgcctctctctttctaaccattttcttgttttgttgccttgctccttagctccttggcttccccttctgcctaggcctgcggcgcagactgccggcctcccgcgccgtcgagccgtcgagccgtccgtcgccgctcgccagccgccacgagatgacagagttggaagaggctagggaatttttatctagggttcagtgaagaagcccaatgggccttttacgaagtgtcggggggatcatcagaagatgggccttttatgaagacgtcaggagactcaggacgagaaccggacacaagtcgtcacggggaaaagaaaaagggaaaaaaaagagaaagaaacggtgacttttgccaactaattctcccgtacgcccgagatccgaagcggctcgcgcggccgccacatcttccgatcctctcgccggcgggcgcgcgcgcgcggcggcggcggggcaaaaatggaggcaacggccggcggctccaccgcctccgcggcggcgtgcccgcccgccccatcccggccgacggacccggacttcctcagctgcgtgctccagcccccgacaccctcctcctcctcctcccgccccgacgacgactacgccgccctccgccgcctcctcctccgccgcaagcccccctcggcgctccaacaccgtatggtacgcccttcctctcgttcttctcagatccctcattggcgcgcgtagtgttttttttttggccatggggaatgaatgaattgggttggattgggtgggtgggtggtgatgcaggagtggcggtgcaacgggaagggctacgtcgcctaccgcaacttcctcctccgccgcatcgacggtggcgccgcctccagctgcgccagcacgtccagcaacaggtgcgtcttgattttgtttcgttttttttttcttccgcacctcgtcgccctgcccttacctaacgaaacgagaacaaaaaaaatgtagccaggctcgctacctttgtgtgtctctgagcttttcttatgctcatccactagttttctcttaagattaatcatttgaatatgtagtatgattttggaggtgaattctaacactgtggatattgcaatttaccagtggaaggtgggctccttctcctgcctatgctgcattctccgaggcggatagctggagttctagcaaggttggtatcttttattgtttgctgcattagccacattgtaaattatcgttgatacaccattacatttgtgcggatacctttgtggagtgatcacaacttgttgtgaattgtcatgtacttgtttgctgcaggacttgagaaggaacagcggaccattgctccgcaatcttagtatcagctcaaagcagagtgatcctgagcgtcatgtcagatttgccgagcctgcatactcatttgttggaatgcattgcatctttgacgactgcaaagcatcaggtttgttgccttatagtcatggtgcacaatttcaaaatttcatctctgacggtaataaattattgttgttttagtgatctggataatatattaacgaaagtttgattttactcccggcagttacaatattgaaatttggtcgtgcaagttcagatctacttacatatggtgcttctgatggcagtttaacagtctgccaggtttctgacccaccaactgttcttcaaaaattaatagggcattctaaagatattacaggttagagtacaatcattacttgtttatatggttttatttatgtacctacgtggctcaggaaaagtgcttagcttctagtacaagggtgttactagggatgatcaaattgcatatgaagctaagtgcaaaaatcagcattgcaatgtaccctcaatgttactgggatcttattcgatgcttatcttaataatatagaatgatagttcagttaattgtgacttcccaatattttaaatgcctatcatgctgtttgtaacatcaatagtatctcctagtgctgagcatttacaattgctgcacatgtagtttttgtttgttatagccacaaaaaagttgcatgaataatttatggatttggatggatgctaattaaaacagaataattgagttgtacttatctattatttcaatgtttagtatttagtgagcttcgaattctaactgcattacagattttgatttttcatctaataaccagtacatagcttcgtgctccatggataaaactatgagagtatgggagatctcaaaaggcacttgtatcagggttgtatatggggtttcttcccagctatgtatctgctttcatcctgtaagtcccgcctttgcagaatgcatacttatcccattcgcttgttggcaccaatcttatttgcacttcgcattcataaaaattatttgtgtagtaaccaggatggatggtctactttatcatatgtttactgggttttctttcttctttttttttttgcaggtgaataataatttactgttagttggcaatgcaaacagggaaatcaatgtacgattcctgaccttttgctcccagcaattcatatactccaatattttgcctgctgattaatctgcgccttcccttgaatgttctgttttgtgatagtaatggaaaaatgaatgtgttattcttattctggttatttattcactaaagatgattttcttctgattaaattagaaaatatatcacctaatgactaccatttcccctttacattcttttgcttgtaccttttaatgtcgatggttgtgatccatatctctatctattataggccattaattttagcactgggagaatagtcagcaagcttacctttgatgatgcggttacagctttggatgttgatcacactggacaacttatttttgctggggacgctcaggtatccattgatttggtttgtttttactgctaaaatgaatatacgatgttcataattttcaattggtaattgaaatgtgtagggttgcatatatactgttagtgtgaattcacacacgggttcattatctagaactcataagaacaagagcaataaaagcaaatctcctgttacaaccatccaataccgcaccttctctctggtggcacgttgcccagtcctcctttcttgtgttcaaaatggaaacttgtttttcttcaggtgcgtgatcattactgtatgttatgctgttaactctacttttttgtaactatttgtgttgttggtcatttcagcattgcaacagattccaagggatacttgaccctaatatgctccctaaaattggcgtcaccggtgcagagcatccgtgcttctttctgtccactcctttccctcgaaaaaggagaattcattggtgagtaaaaataaaacctttttttttccttttcagttgttgcttgttggttacctcaatcttaaagctgttgataatccaaactctcatttctgatactgttcatgtcagccagcactcaattgctactgcaaattttgtgtattgcctgccctcacatgttgtgttagcattatcctttgtaaacttgtcttttagttcaatgaagtagcaagccgacaatgacacttgacacaagttatcattacaaattttgttaattaattattttacaattttaattgaacttagtgagacaatgtatgatgactggctttggcaaataggtggaccattttgtaccctatgttctgttctttgtaatgcatagctgggtttttgtttaaatctgattcctttttcctcctgaatgtaaagtcacgggcagtgaggatgcaaatgtttacttctacgatttgacacggccaaagaactcgtgtgtaaataaacttcaggtatgttcagtgcttcttctatttttggaatcttaaactttggttccatggcaaaggtaccgatgaaactattttcattcgtgaagggacatggttctccagtaattggagtggcctggagtcatggggaaaatttgcttgcctcatctgattcagatggtacagttattgtatggaagcgggcataaactaattagagcggattccacaaaacgaaagttgcttgtataatgaaggcatttttggcgcatgttgtacctcccatcatatattgtttgtaagacacagaagatgaatcagccttcaattgtatttctacaaaagtatagttctccatagagtgtacagcggttcttcaggtacatcttacatatatttttgttcaatactaaaggggtaggaggtacagtataattctctttttgtaaactaaatttcatgagtttaaatggagtagttgcaccctgggtcagattctgtaaggtgaagaaggtttgtgtttgttataatccttcgttttttccgtctacgaatgagccattactgacttttgtattagacttcctgtcttgagaattggcgttttaccggttgaccgaagatctgccaaagaactttttctgcctttctcagctgtatgtgttttacagcggcaatgcgggaaaccatgtattgcaaacctaaaaaccactgtagtataaaaagaatgagcgtctgagatttatcgacactgtaagtaaaattcggggatgacatggacaaatctcatatgtttacttttcgttcctacagtaatttctaagtgtttacattacatacgtggtttgcgccatatattttccccagcaatgcaatggaacacatagctctatctagttcccgaggtgacaatatggcatatattcagctagctgagcatagcattgcaaatcacaaagaagcacacaaccggctagaatagtgtcactgaaagcactagaaacatggtactactaagttgctaacatcaggcaaccattctacccccccagacagacattatttctaccactccaagcaccatgactccatcaagctgctatagcgatggttactgcaaattgaacgtgaatgacaggattattcctagtgctactccgaaggcgagggctaacagcttgcaagtcccatcacaggtgtctgacgtccgaggcgctggcgaagaagtcatgtcgaaacgcaggacgcagtcgtcgctcaccacgacgccgacgccctctccctgctcctcccgacgtgcctcccggaagcatctcggtatctctcgcgccgcgccctccaggcactgcacgcagtccgccggcgcgacgcccgcggcgcactgcgccaccacgcgcccggccagccccgtcctcgtcgtggctgctccgacgtcgatcgccagcatccgcgccgccacgccgttgctcatgtcgaggaacgtcgcgtacaggttgtcgctgaacggcaggacgtctccggtgacgacccaccggtggaactcgccccccgctgggctgggcgacatcgtcgtgttggtgtcggcggcgtaggcggcgaggtagctgcggtagcacccgtcgagccaggcgccggcgcgggcgccgcagcccgcgacgacgtccgcgacggcggcggcgaggctctcgcggtacagcgccggcgtagagtcgccgaggcagacgctgagagcgagcgcgcggtcgccgccgccggcctgcgtggaggcgaacctcgtcgcggcggcctgggcggggaggtcgtcggtgggcagcgcgaggaggttcgcgcggaacgccgtgccgttgctgctgttggacgtcggcgccggcgaacagtcgatctgtgggaagtacctggctccggtggccgtcgacgtcacgcagacgagaaggaggcaagaaagcttggtgagcgccatgagcgatggattgcacgacaccaaggtcgccaggccggatacgaactgcatgccgtagctcgaagctacaccgctctttatgaaggcgatcgagtgagctcaatgccaccacactgtgcagctattaggcctttcacagcgctccaccctggaccggtgctatggggcgacacattggatttttgctgccgtggcgctcgaacccgcgtctcaagttggaacctcatctccatgttgagcgacgcaggacttcgtcaaaacgatgccgcgagcagaggagaagactggaggcgcgcgcgctgtgagcgttgtggcttcgcccacgcgtgccctcgtggcgaaatccaagggcgaaatccccgatacgccctccaaatccactcccaccacagcaaaatccagggcggcctcgccatctcgtcggacggcgccgcagttgccaccggggtgtccgacgagcagggaggcgcctagcacacttccagctgcatcaacccaaatcaaaatcaaaaccaaatcagaacaatgaaacaaatcaaagaacacaaatcgagggcaaggaaacaaaaatcaaacataaatcaacaaatctgaacacaccaccaacacacataccacgtcaccggcgagctcccaagaaacaaaaatggcggcggcggcgagatagatggacatacgtgtcgccggaggcagaagcgatcgaagcaagggagtgggggagggagaggggaggggcgggggacagatccaccgccgccgctgtcgccacgacgacctccatggcgacgacggcctcctgcgccgcagaggtgtagaagccgtccgctcctgccgccgaccgcccgtcggcgccgtctcgtccactcccgctgctcccaccgtcggcggcgcgccgtccactacagccgcccccacagctcctgagtccgagcgggaggaggagcgagcggcgtaggcagcgcgggcggagcgggcggcgcggtcgatggcgaggcgaggcgcacggcggcggtgtccccggcgtccgccgcgagggaggagagggaggagaaggcgaggcgaaggaggagacgtgctgagggggactcagcttgggtgacattgtaaaggcaagtcacagcgtgacattgggaagatctggaccatccgaaacaaatccaacggacatggcgcttggacccgcctgcaggtcgaaatttcgctgcccatccagcccctatccagcgcgggagacggcgcccgcccccgatccttcccgcgcgctcgcatcgtcgtttcgcctcgcccgcccgcgtccggccatcgctgtgagcacgaatcaactgggaggctcgccgccgtcgtgcctgcgcaggcctccgtgctcgccgcgagtgcggactgaaccgggccagccgccgcgcgaggccaactccctgccctgccgcgacctgtggaggccgccgaggcactgccctgccgagcgcgtggaggcggacggccgctgggcctgacggcgcggtggtgtagacggccggccgcccagcctgagcccggcgcgtggaggaggggacatcctggaggaggctgcgctgctaccagtcattggctgctgtcttgctaatcctacagatgacaacttctattgttacttgccaagtttttgccggctaattctaacatttgcatcagtcaggctctggaatggcacagctatcataaatgtgaaattcttttgtatggaggtgatcaatgctgaaactctgaactattcaggatttttaggtcctcaactgagaagagcagaggatagcacacaggacaacacagtaacttgaaaaaggagaaaaaaaaacccaatcaacacacattcacgcgctgagctgggcgcaccactgcaccagggcttgtctcaggtacttcatgaagccattaggctcgtctcctccacgcgccgagctgggcccaccagcgcgacgtctggaccggcagctggccgcgggccgcctccacgctcctccggccgtggcggcacggcagggcctggccccggcctagcgcggagatcgcctagtcccctccccactcacggtgagcccggcggtctggcgcctttccagtcacggcggcgacgagcctcccagctggctcccggcgacggccggacgcgggtgaggcgagcgtcgggcgcctcgcgcggtggtcaccccgtcccctccccactcgcggcgagcccggcgctccagtaacggcggcggcgcgtgctcccagttggctcgtggcggcggccgaacgagcgcactgctccacgcgttcaatggatggattggggctgggggagccgtctcccgtcgggatggatggattggggaataatttcgacctgcaggcgggcccaagcgccatctccgttggatttattttggatggtccagatcttcccaatgtcacgctgtgacttgccttcgcaatgtcacccaagctgagtcctgctaagggtgaggggtaggtgaggaaaataaatttggggtcgcgtcctgtgtcctcctgtagggtatcgcttcgtttccttcacggcttcacctctctctctctatccaattaagccacacatatatgggtgctttcactgtggggtgagtgtctttgagttgtgactttggactagggatatgggccccatagcttgcactgctattgcccttagctatagccgctgcctctctgcgcggttggaccagggttcataatttcagctcgaaatttcggttctatcagaccacgatacaataatatttcggctgaattttttttcatttttttcataaatttggtaatattttgttcaaatttaaccaaattttattcaaaaattcatatgatttcggatcaaaatttcagaattttgaaaatttcggtatttcgaccaccaccaagtcaaaacactaaaccgaaaaattaaaccctcggctggacacgcacgcgccacaactcgaaatggcacgggaggttagcacgcgtcattgcagtagctgcaagtaagcactgtgaatggccaacgggtaattgcggcgaaaagctccgccgaattcgctaatcaagagggcgtcactccgaacttactcagccgaaagttgtttccctagctagttcacccgttgctcgaattggctggacttctctccctttactcgcttattaagcgctatgctcttctattttcgtgagcttacggtcttaagcgttgtcattcctggcaggtctgttcggcacgaaactccggtgcaattaagtcctatggcggcaactaaatcctagccaatggcggcaaacttcaacggtgctagattggtgggaggctaccgcaaacatgcaagagacacctaagaagatactccgcactttgatgttgttggtcgcctgggagatatggaacaaaaggaatcgcagaaccttccaacagaaggagctttcagctacctctcttttagccaagatcaaggaagaggtcaaaacttgggccttagcaggagcgagaagtcttaatagctggctttcttttagttaactcggaccaaaggtcctaactcctttcctttttttctttcgctttgtaaaattctccttctctattcaataaaattggcgctcgtcgattcgttcaaaaagaaaagtcctatggactatggtgtgtgctaccagtttaacaatttctcatgggtcaatgagttggggttgttgaaacttggccggcgcaaaacacgttgcaagattgttgtcatggggagtaagatggactaacgtgtaagcatgtttgctgtcagtaatatacattttttttcctttttgttctacctcttgctatgtgcataaactccttttattaatataacgccaagcaggccattccaaaaaccttttcccatgggtcattaactactgcaccttcccgtaccaagcattgctagcaattaatagcttgcaacgccatgtctagggatgaaacgattggaaaacaacatgcatcagccgtttaagtaatcatatatttctcggaaacgaaccgataacgatgaggctgaaaacaaaatgatatcaaaaatactgaaaacgtgactacatgaacaaaaccatgtcaatatcgatcggaaaccagtaatgaatatcgaaaacattaaactcgatgtttaacttaacatgactatataatattgtctctcctctagccttgtactcaaattagaaatttgataaatatttatgggtctcaaaactacgggtcacgggtcacatagatacatggacgataaatattgagatatttaaaaatacggtgattaccgtattataaatgtagcatttttcatgagactttggtaaattaaagaaacggttggtagaacaataaaatcgtttttttatttttaccatttctatttttagttattgttttcactcctgtgatggcaaaggcaaactggtcaccattgcttcctacgcatccgagttagccgcaggctatttcataacgtatagttgtgaattgtgagattttcttttagtttcacagtgtatggtggcgcaccggcagtccggcacatcccggccttgccccgataccacgactggccctcaaaagccttatcttttcacttatgcttatacttatcagctaaaacttaaattttctatcttagatttaaatttaattttgaggggtttttttatcgaaatttatttttcagtctttgcttttagatcggtaaaaacatgtatataaaagttttattcacaattttttttttttgcaaatatgcccgcgtcgcggtcacggtcgcgtagtcgcgcgcgcgcggcgaacgcgtgtgcgtcgtgcggggtgattctgttcaccgccccatgggccgcacaaaggggtccaatctttcaccctgcagaatgggttggcggtggacgctcgtaacgctagcggctagctgggcatagcattttgcaaacaaaacacacatgataagctactgttatcctaacacataatccctagtactacatatgaccatttatttctactactcgatcgagcaccatgactccatgaaagcttatctacaggtggttatattactgcaaattgtcttcactcgattcgaacatgacgactactactactacatgattattgctagcgctgctgctccaacggcgagggcaaacggacggagagctcctccaccaaggcttgccgccggagaggccaggtgcatggtgaacttggagcacgcagtcgtagctcagcgcgacagcgacgctctctcccagcccccatgcgttccagcagcatctcggcatcgctcgcgccgagtcctgcaggcactgcacgcagtccgccggcgcgcggcccgccgcgcactgcgccagcacgctccccgccagccccgtgttggcgccgtcgtcgaactcctgcgtcgccgccagcatcgtccgccccgaccccgaccggttcgcggcggcggcggcgagcgccgacacggcgccgttggccaggtcgaggaacgtcgggtccaggttgtcgctgaacggcaggatgtcgccgtcgaagaaccaccggtggaacgcgctctcgcggggcgaggtcgcgtcggtgtcggcgtaggcgaggtagcacccgctgagccacgcgccggcgcggcgggtgtccgcgccgcagccttcggcgacgtcgatgacggcggcagcgaggcagtcgcggcactgcgacggcgtggagtcgccgaggcaggagccgcgagcgaacgcgcggtcgtcgtcgtcgccgccaggcgcccgtccgccggcgccggcctgcatggaggcgaaacccgtcggcgcggcctggtcggggaggctggcgagcagcgtgaggaggttggcgcggaacgcggtgccgttgctgccagtggacgtcgccatcggtgccggggagcagtcgatctgagggaagtagccggtcgtgtagagctgagtaccgcgggctacaatggcgctcgcgccgccgacgacgacgaggaggagctgggcgacgaggaggagggaggaaagctttctgagcgccatgagcgatggatggcacgacaccaaaaggtgtgttctatggcaatgggcggatcgaaggagtcaaggaggcgggagcagactacggctgtatttagttcagcccaaagtttaaaatttggttaaaattagagatgatgtgactttaaagttgtctgtgtatgaaaggtttgatgtgatagaaagttgaaagtttggaaaaaaaactttggaactaaggctgtgtttagattcaaactttcaactttttccatcacatcaacatatcatacacataacttttcaatcacatcatactaacttcaacccaaactttcaacttttgaaggaactaaacacacagcctaaacacagcctaccagtgtgagcagtggtcgacagagccgttgcgctactacccgaaatggcacctgagggatgggggtagcacgcgccattgcaccagctgcaagcgagcacagcgtgcgaatggcaaccggcaattgccgcgaaaggctcacgccgattcgagaatcaggagggggcgcgttacgttctactgatccctagctcgctgcagacgacgacgcggccggtcaccacccgttgctcgaattggccctctctccccttactcgcttgtattttggtgagcttatgtttatgctaggtatagcagagaggtgccattcctggttgatctgatccgctcggcacgaaacttcgacgcaagtccatcctctggtggcttagcagagttaccatttcttcatgggccattattggcgcttttcccgttccgagtattgctagcaatagcttgcgttgcacatgtcagtggcaaaaggaaaacttgcctgttgagaggcaatatcgctgaagccacgcctctcgatcgaatcgaaaccatccaaagaacaaggcgattagagattcaaattttaaatagaaattcaaaatttgaaaatccgtttttttcttcaaaattttatactcaaatttgcaaaacccaaatcacaataagaaactttaagcgctctgcattgaaagcttaaaaaaactattcccaaatttaaaacatttaactcaaattttgaaattttcaactaaaaattaaaaaacatctacccggatctgaaaaactttcaaattctgaaatgcccaactaaaaatttaacttttattgaaaaaacaaaaaactctacccaagatttaaaacttccagcacaaattttataactttcaaccctatcatttaggtatttcattatacgcgttggcataaactgaaagaaaagactgttgttaggcttgtattgtgtcgtctagttgcaactctcatgtgtacaagaagggcgaagacgacttctattgctagcccaacggtgccaactagctgctccgcatcagggtttacaaaaccaatgaattcgattggattttgctaaaaaccaacgtttctacgtgactcggcaatagttctcctctaaatcgatgggtttcttccaaattcaaatttggattaaaaaaagtgaaaatatttagaaaaaatactataaatagtatggtataggtagaacctattggcatataattttttttagaaaaatgctgaattccaaatatgtcatccttgttaaaaaaatgttaaaaaaaactaaggaggtgttctgtgctgaactctaaagttgtactaatgggctttaatttagatggtgggcattctatttgggcaacggttggtgaaggatgtcaagatgcatattgaattgtgcgtgaaatgtcatatgtgttctaaattattgccttctatgaatttgtatagcatattgtgtgtatgccaatgtgaagttatcaaatttataggaaatggaccaaaatttttagaaaatttccccatttttttagccttttttttcagtattttctacatttttaggaaaccggcttgcgcggctgcacacgttgcaccactgctcgaaatggcaccggaaggggaaggtgttatcccaagttcgccatgcaaagacgacgaagctgccaccgcccctttctcgaactggccttctctcttcactcgcctgagctgagatgctcgaattggcattctctccaaacaacataggccggtccaccccaaacaacaaaattcatttcggaccttactattcatcacctgtaagttcaagtgtcttaatttagttttggtgattaatgacaaatctaataatatgagactaacgtttttatgagcttctctttaactagtctcgtttagatatgaaaataaaaatgatgagaggtatgtattaaacttcacatattctaacttggtctctcttgtggatccaaaatatagtgtgagctccgtcattaatcttgattgattatgtgcatatgtattcctttatatccatatgtatgcacatcttgagggggagcttattatatattttgtttattataagatctctaccttgatttgaaatcatctttcatcccatctctctatattgtttatatcgggttattatctatcaccaaaaagagaaaagattgaaagatcttggattaaacaatttgtgtaattgttgctttgatgatagatgataaaccgatgtttatgggattaacctctctttttcataagttgttaactaggttatttcccgatgatgagatgtggtagatatgcattctttagtgatggaccttaatcatgataaggatgaaatgcatggagataaaacgatatgtaccacttcttatctcctactttttgataggttcatatatatgatttccatgttattgttatataagtgtgagactaatgtttactcgagtcgtatcttatttagtctcatttacattaagaacatggagatcatgaatgtatatgttttatgttggtctacatctttactacatatgccttctctatgtgtataggataaacccccattggtcattctctaattatgcatacacttgcatctcttgtatatttatttgtatgcatatatttagggggggcaaatcctatacatttattgtgcatgttctagatccatgttattcacctattatttatatcggatctttgcacttaaggttgcatacgagtatatgacacttgtgatgttaatgaatactcaagaaacatatccatatctttcatatgcaaccggttggtcatcaagtgaaggatgacaaccgatttgttgagactaatgttctcctttgagatgtgaaaaggaataggtcccactatgatgaggctgatggatgacaccatgggttaatggtcaccaagccaaggacatcgccatgttggtaagaatgaaatcaagcttgtaatgagaagaaagtcttgacaaatgatggtaaataccttggtataaacatggttgaatcaaatggtcacaagtgttgatctcgactcaagcttgaccccaagatggattttgcaaggcaaaggtataatgtagctaagaatgttttcttagccttttcccggtcttgatgtttggtgtagaccggatttgctagataggcgccgtactatcaagaggggtctatgaagcgagcttgtggatgatcttgtgccttattagttcatatgcatgtaggtgtatttggtgggcttgtctagccaagtgtggtgagttttctcaagtcctaaacaaagagatatgtgggcaaatcctataggtttgggtagcctcatgtggttatgtccggtggagtatcctttggagtgtgagccctttctccctgagaaaatttgtgtttcttggatggattgttcatgggttggatagccctttgaataagctttccataaagtccaagaacgccaaattccgagacccgagtcaagagatatcgtcgttttactaacggtcggttgagctgaaaagtgaattgcggtatgaccgtgggccttaggccggtctgaccggccccacaggtctggtttttggtggcgatacagagccgccagagccgcaaccagtcagaccgagccgacggcggtctgaccgagccgtggacggtctgaccggccactacactgtggtcagaccgaccaggttgagtaggctcaatgattgccctgtaacggctagttttctagccgttacaaagtagtccggtctgaccagcctcacaacagcggtctgaccgacagagcacagagttggggatttcggttccaacggctagttttggtggttgggggtatatatatacccactccccagcagcaagggtaaagttttggcactccattgcattatcttgaacccttgcaagagctctcacacccttgtgcacttagtttttctagtgaggtgttagagagtgagttaagccaatccaagtgcattgcttcattgttatagctagtgtggcacttgatcatcctcggcaagcatcctagacttgttactcttggaggttgccgcctcctagacggcttgtgtaggtgttgcccggtgacctctccgaggagattgtggaggaggcccggcgccgtttgtgagttgtttggagttcaccaccttcggagtgaaggaagaactaccccgagtgatcgaggcttgggtagtcctctccgtgggccagctcccgccttgcccaccccttgacaaaggaggcgtgcggtggcttcgtggttgagcggtggagttgggctcgcctcaacagggattaggaaaccggcgagtttccgaacctcagtgaaaaattccttgtctattgtctcatttatttgttgcatttacatttgtgctatttacattcatagagacatatttgagcctatatcacctaggtttacaaaacttaacttagttgcttagttaaccttgcaccttaccttgcctagcaacttaggttagttttgtttaagtgccattaagttttaaaaccgcctattcaccccccctctagtcggcctccttgatcctacataacccctatgtacgagcaacactaacgcgtactatgattctaaggtcctgtttgatacagctccaacttctaaatttagctccaagagttgagtctggagtggagttg

SEQ ID NO: 6590 - DNA, 17730 bp, Oryza sativa
  unsure (1)..(17730): unsure at all n locations
cgttttgcttatccatgaaggtctgcctgatgaattcaaatccatgtttgtggaacgaaagaggatttgtgaagatctcatgatctaggggatattgatcagtaaggctgctttcatgtacaccaatgctatactgcttgtaacgcaggcccatttgttccgctgggttgccgaaatcaattcttgatatccagtctagtccaccccatggcacaatctgaatcaatgtagcgttttgtggcaagaacacacagttggtgagtccagcaccatggacacccatcatcacatcaacagagttgacaaccttgccaaaatgggagagatcagagctcacattggcctcttcaaccaccacctcgtaacctatctcctcagccatcgccactatctcgttaagattgagaaacattcttgtcctctgcctggatataatgagcagtcttggcttggctttgggaatctcaccaagcgcagttacaaaatccctaggcagtgagtaggtcctgcgcatgaacctattaaaatccaccattgagtagttatgtggagcttttgatgagtcaattgtgaactccatgtaagcatgaaggccaacaattgcatgcttgaagcaatgcacttgatcgtcattgttgaagtcaatcaaggggtacttggatagcttatcaaacaccaccttatacttccttgtccaccaaatagccatgtctgtgattaggaattgaacttcgccattgaattcgcttgcggttgtgaaaagagggacaagcacgtcggtgaagtcatggaatagatttccagtgtatccagtcagagcaaagaccactgcaggcacattgtgatacttgctacactcaggtgccactttgcttgatttcacggttatctctgtaatatggccgaggcagagctcgtcacctttacgagggtaaggcttaactttccatatctcctctctctttgaactggcaggttccatgtacatgacagaacttgcattgggatgaatcctaatgttgccccgcatctcacagacatttgctctgaagtttgagaaatcacatagtggtttcttgttccactcctcattatcagtttctgcaatagagtatcatcaatgaaagagcagaaacaaaagactgaatgaagcataatcagtctaatttaaggttcaatctagtagttaggaatctgaagtgtatgatgccattggtctaggataccaaaatagggttttgcatctatggccaaaatcactaaattcagatggtccattttcctgtcggcatttattgaaatctaaaatcctaacctggttccacattgtctcccttgtccgcgtccatctcaaattcatatttttcattcggtttgccatctgcagacaaagtagggccatcatacccaccaagaacttgtaagcaccagcttaacaagtaccaaaacagctagtactacaagtaaagtccaagaaacacaagaagaaacagcatctactaccttcttgcttgccattgtcagtgtcttcagcatcacggatggtataattggaaacagtcgggagggtcaccttgctatgctgtgtgtgcccctcttcctcgccgttcttattatcctcttcgcctccaccacctgcacatcccaccaccaaagtactcatacataaagcaagcatcaattgatggcgcccaaatctctcttgacctctcaagaccccgtgaatcaaagcatccagagacagagctagacaaggaaattattgacggattggaaggtgacggctcacctaacacctcagatgcagtggccgcctcctcgttcttgccttgctcgggctcactactgagtagcctcttctcctcctcactagtccctatcatcatatataacgaaaaggtcagtacgctaggcccaagatttgctgactgcagcaaggcggcaattagctctggagcttttcacctttggcggtggcgtcctcggcgccttcgtcttcgtccaccaccttgggatcctcggcggcggggaaggtatcggcggatctcctggagtcggcgtggatccgctggcggatcaggagcgagcgcggcgcatgatccaccgacagccggccgttcactgcgaactcaaagaaacgagtgaggcgcttggtgttaccatcgatccaaggatccaagaagaaaaagaagaagaagatgatgaagaagcggcgacggcatggcgtacggttgaagaggagggcgtcgggcttggagatgacgacgaaggtgagtgtgacgaggaagaagccgatgacgaggacgagcaggcgcagccgccgcgactcctgccggaggctccgcaccagcttggcgcgctcgacgggcttcatctccccctcctaaatctcctcgctcttcttgccggccgctccactcgaccgacctcgcgcccgccgctgactttctcctatcccgcgaggagagaccggccgagagaggcggaatggggtttgggatcagcgtggttgcgagaataagagggatagcaatctgcaatcctgggctggctggatatgtgcgtgctagcttccttcctttccttgcctctttcgtcagctttccagtattcctcttcctctgcgctctcctcccagtcccagcactagcggtctctcagtatgtgtttggcactttgggttaaaacagtgatgatgggaggtggggttttattcttgcatagtttacccgttccaaacaaacggcggcttaggctcagttttacataacttttttccaactcacctcttgcatttttagcgcacacttcccaagctatttttctaaaataaattcctataaaaaattgcttaaaaattatattaatatatttttaagttttgttagctaatacttaatttatcacatgttaatccatccgtatataggggagctccaaaataatagccttaatcagtgtgaacactctcgttgcaggagaccggaaagcagctgagaggacatccattgataaggcaagacattactacaggagtatcatgatatcatgtatgataaagtcataggtctcaaatcagtttttttcatagtgttcagtagttctaaagctgtttcagtttttgcatgtcaacccatattatttcctattttagtcctcatattttacatcaaacatcccgaaaattagaaaaagaaatataaatacaccctcccatcctcgtccggtcatccccgtcacgctttctccaaatgtcggcacgtagctctctctctccccctccgccgctctcctcctaccaccagcacaactctccctttcctcctccgccgttctcctcccaccgttggtgcaaccctccctcttcccttccaccgctctccctccaccttcctcgtcggaatgctagcgccgcctcatccttgccagatctagcccgtggttcgtcgagtctggcctcggacggcggcgatggctgcgactccactccactaagctcgccagatccaacctggggctcgccggatctggccttgggaggcagcgacgacggctcgacgacatcggtgcagcaacttgactacggcggcagaggcaatgggacctcccttcacccgcttcctctacctcgccgaattcggctgaatctcgacagtgaaggcgaggatgttataaaactggcctgaaatcaccatcaacaaccaaacgcggaagaaacgccataggagatccaaacacgatgatgacacgaggcacgatatttgttaacgaggttcagctgaagcctacatacccgggacactgattgtgggtgctcatctgcgatccagcatactacaatgtatcagagttacaatgactcacgcccggacgtcgccggcagccacaccatctcgctgtgctaagtcaccatatgcggttacaacaggttcgtccctctatttaagagagatcctatgataaagtccgactctcactctatttctaatacctattacaactccaattcctaaactgtaatcgacattgtacacatattcaacataaactctaacaaactccacgttgccctccatgctgcttgcctgaccccaaccccgatgcaccccatctccgggagccacatcgtagtgcctggtaacacctctaaccgccaagagctcgaaatctctgctacgactcctgaagaaatcctactcgatctcctccctagccgcacgccaacgagtgtcaacgtggaaaacacgcgctggcctgagagacttgctttactctagtgtaggtccaaagagatcgctttcgggttcagggtgtgccagttggtttgatcctgcaaccaacaagaaacaaagaaaacaaccaacaagaaacaaagaaaacaaagttaaatccgtaaacgataaccgatcggctgggttgccgatggcgtgtcgtttataccgggctgatgcgatacagatcataccggccatgtagtatatggagaagggataattggacgtgctctgtcggctgtagatgtcaataatatataatctatgctttgaagtactcttgaaccaagtgattaggatagatcggtcagcgcgccgagatagtataaaccacttgagtccatgaacactttaaggcagggattatatacgctcacagcatagctgacaggcaaacccaacgtgtatcggctagtaatccgataccactttataccaagatttcggtatagatcaaatatgctaaacaggaatcaatctagtgtcagggtaacctgacagactgatggcaagcttagtatatttggtccaaacgagatcttaaagtaaagggcaggcttagcatatcaagtaaacatatatgaaacgagataactaagtcaggtaagaccggctaaaaccccgatgctatctctattaacaaccatagaacatgctacttaacagatcaaactaaactgatgcaacattaagcacatggagaaacataggatctaaacaagtctaagaaagccttttcgagatggtagatatgctatataatctaatccgacacagctatctagccctatcggctattttcgatgatagagactagccgacacggtaatatagcaagatcgatctagattatatagcatatatgataactcagcggtttgtatagacagggctagagtgtcatgaagatataagcactagccccgagaacgcaagccgccgtaacaagctttacctcttcatcgaagatcaaaaccgatgcagcccaactcgaaagcaagaactcgttgaaaacaaagaaaaggaaaaaagggtggcgatgcgccgagagtgtattgaacttgatgttgtttgtttacatggtctcgggtcatatttatacccaaaatacatgatatgtctttgccagacacgactctatctctattacaactcaaaaatatgaacaagtcccttaggtggactcttaccgaaaatatctataaggaaactatgaaaatatcctaattaatagatacaattgtcttctccgagctccatccacatttggcaatacttgtgtagcacctcaacagatcctgacaacgatcccatgattgtcttgccgggattggctacattggcttctccctatcaggttcagtaccagccgatgcagacgacagccgatgcaacccatagctgatgcgggttctgtttccatgattattgatttcctccaaatccgcctcggttctgacttcggatccaatatacgatttaccaattttagccgttaacacatgctccccaagtccgcgatatttgggatgttgcggatttgatcgatcctgtttccactggtatctagggttcattttccatttcggccataccgcacccttttaaaatagtgatcaccatcctcggatcccacttacaccgtatcgcttccgtttttaccactttcgctcattattccccacgcagcctctactgtagcaatccctaatctcttggcgatctttccagcgatcgcccctcaatcggcaaactcctccgctccgtcaactttgttcggacctatggcgatagtgcacgtggctgagatccccgaggtaagctccttgttactttttagcaattccctcagtcatctttggctctttggtgatccgattccttcttcccttctgccagcattctagggatcatcttttgattcccacctcccagaactccacatgctttttccttgggccgatgggtgatccggatcccaccgagtttatcaatgtgaaacagagaggatccctttcaagtagatcaaactagacttagctcaatggaaatcgactttcaggtcttggctgtctaggttgaaagggtacaagtcatggtacaagaggatggtggctgctaagcgatctcattgggaggaagtaggaatagcgcaatgcctggctttatctatagcaaacctgaaaaaggatgagcccctactttctgctatcggctacttctggtctgatacactgaatgctttcatcttgaggcagggacctatggctcccactttgcttgatgtgaagatgttaataggcctagacatcctttcatccattaatccttttgacgtggacattaaatgctcttatcaactgaacacgaagaagaagaacaatggctggtgaggcttcatcgtcgaccatcggaaaactggtccaatttcggatgaggaacatgctgccttcctctccctatggctcgagaggtttgctttctgtgggtctacttgagcactgactgcgaacttccttcattttgctgaagccctggtgagaaaggaaaaagttcctcttggccgatacctcctaggggcagcttattggatgttacatgtttccttagccaatattcttatagacaagccggtcagttacggggcccttggtggttggttcattcagctgtggttgacaattcacaccaacaccgtggccaacagaccttctctgcttgaatcggccttccccacatatgactccattgatgatcaatcagattcccagccgtgcaagtcttatggggaagcagctttagtttaccctggtgtcaagccatctattgaaggctttaagacatggttcgacatattttacaacaacgatgctgccgatgttctctttgcctatgacgcctacaccgagtttgatcttccaatggatttagatctgagcaagctaaatgatgaagaagacctgttattgaggggcaattacttggcagcaatctctccttgcgttcttcctacagatgtgtctcagggaagaaaatctttctcttatgagttttatcacccaacatcggctgcaagacaactggggcttggccagcttcccatcaatcttcccttactaaaagttgtagactcaagatgtgaagtatcatcagtcgataccatgaagaaattgttagaatgcaaattcccagtctcagccgatatcggcgacttcaccctttatcagtttaagcatgtcaccttctacagttgatagtcggattggtcaaaacatctcttctctgctccatccgactattgtcttaccaagattgataaccgcatcaaggtaggccgcaatttacttctaactagattatgcccccctccccacgacctaacttgttttgctcccttttttctctctgcagatcttaaaaccactggcaccgaaacacagcctgagtgatcggccaatttgctatgcccaggttctcaagcattccagagggactaccaagatattgccctccccgatcatttcttctgctccgtcaattgaaacattcatgaagactcctactggggttttggctaccgatcgcctagattttggcaaacacaaggatccctcttcaggaattaccgggtcatcacccaagagggccaaggctgatggttttgctgggataagtgccgaagcgttagttgacaatattccgccttctctctcgttgtctccaccaaccagagttcattacgccattcgcaaggttgcattgcatattcgcaaaaaaacgtttatctccctcatggcctttttgtaatccgtctctttcccttttgtggtgaaagcgtcatcgttgatagacctatcggcctcagcagcgcaagagctgtccccatcggctcgagctgctccgtctgtcgaagccgttaccgaggaaattgcgtctacttcctctaaggctaaggctaagctgcttccccacttctaagcttgatcatcggctaatctttatccgtgcctaatccatcccttcctacaggacctgtccaacatgttttcctttgacgtcaaataatttttgaatgaagatgaaggaaatagccccggggcaggatgaagttagggccctatcagtggagatcgccgatccgcttaatgcctcttaggacacccttgtaaccaactgtgggccaatcaaacaagcgggctttaggggggaaagcagtttcattcttctctctcaccctcttcccctcaatcccaaaggggtggccagagttgagatcaatgatcgactgtcagggcttggttttgggcggtttcggttgtaacttaaaaaaaaccgtctagtagtagccagtcatatttagcggtgaccgtagaggtggcaatttccccattagggccgggatttggggaaaattctcatgcgtgggtgagcggggtgagggcagggatgggagttgaccgcgggtgacccatggggccctgaaggtattagttataagttaaaagacccatttgacccattaagtgaaggactatataagcgaaaccttaatttttcccaaatccatacctagccgccctctctcctgtctgagtcccacgtctctccaacctagcaccccccagccaacctacctctttgtgcgctatccccagctgtcaccaccccgagccggcgctgctagacggtggtgcatctttgctgccatgcccagctggcgtctcgttttcgccgccgccctcaagcgatgccgcctcactgcagcgcgtcgcccccaaccgccaccgcttcctcacagtccaccgcccctagctggtctcgcctcctcacagcgcgctagccctacccgatgtagcctcttcgttgccacccctggacggtgctgcctcatcaccaccgtcctcagccgtagacaccttgtcgccgcccccaaccgtcaccacgttgcggtgcgccgcctcttgctgccacaataggtgccctgcagttgctatccattcgggtagtggaggaccccgctcacccgttgggtcctctgtgggggtgagggcaagtgaggttttccacccggtggccaatgcggggccgtggacagggaaaaagggaaaaagcaaggagcggtggctggccgggggcattcttgtccaacccaaccccgccccgctgccacccctatgtggtggatttggtgctggcctcttcttggctctgtgtaggtggtgttgttgtgtggtggtggtgccacccctatatgaccgattcggtgctagccttttttttcttggctttgtgtaagtgttgttgttgtgtggcggtggtttttttttctggctattgactttcggggttttagcgttgtagtttttttctgttatattaaataaattatcgcgttgtctggtgctgatggttcagaaggaatcattaaaattgtagtggtcgtgtgacagtataaaataaataagctataccactgcattggcgtaattttattgttgggttggggggttgaggacactgtatttgcgtcaaagctgagctacttcctccgtttcataatgtaggtcattttagtattttctacattcattaacatcaatataaaatgtgagaaatgttagaatgatttgtgaaacggagggagtagatgttaccgacgcaaaggtttgccggaagagacggttgccagcgctacaagaaattaatcggagatgaaacagacaaaaatgtcagcgtgtgttttgtcggtgtgttccgatctgggcaacgggcctacacggtcccatgtttgacgggaggaggatgatagaaaaaggcactgcatgcaaacctgattttgtttgactcttttcttggcttttgctctctttgtttacgtatacgttgcttcacaaatcaagtaggcagactggtcatatttcagttctcatcacaggatcgtttggtaatataaatatatataaataaataaataaataaataaatatatatatatatatatatatatatatatatatatatatatatatatatatatatatatatatacgtcctgcctaactttagtagatctgtaatacataaatgtaatttgttaggctggttatttagctgatgatcaatgtggcatggactcatgtctaagatcgaagtcacaatgctgatgttagggcatgtacaatggtctttattagcggttactttttattgtcatgcaagaatatttggtgacgtgaaagagagaaaaagaaagaaagagaaatatggttgctacgcatgacaacagcatagagttgactcttagcatttattaggaaattttttgttgcattgagtctagtaaaggaaagatgactagtaagaaagtggagtattttggtatattaatggttagagaccgtattgtcttaactattataacgtgatagcctttaattaatgtagaaaccataccgatctctacctttgtacttgcacttactagctggcgaacagcgcggaagaaggaaggaaagttgctttgcctcctagccaagatggaaaaggttggcacatgggaacatcgggacagcgtgaaccgggcggtgcggcggtggttgggtcctctgtcgatcgaggtggtgctgttctcatcatgcgttcttgcatgcatccaagggattagcaggattaggcctgtgggataactaattaacatttctccgtgaattaaatttgcaccctcgatttcgtctctcggggcagacgattgaggagccgtatagccggtccatatgcgttgcaatgtcacctcaggtaatgtttgtccgcgtcgaacttcgctggtgtggacgtgtggtgccatgcggctgaactcgttcaattcggttgcactttagagttggaacaggtagattggatgtttctcaaatctcaacgttgtcccaatgccacaggtgcaagcacagtattacctctatcccattaatctagtacgggatatatataacatataactagtactagattaacttattttaggcagaattagtatgtaaggaatgtattttcattccctgattggcaatcaacggctcaccttatttcttatatattatgtaaataattataaaaatgttaaaaaataaaacggtactactccatgaaaatgcaaattcaaatttgactctataaattataaaagataataaatataagcatgaatgcacatgctagtttgagtataatttgtttttttaattaacttatagaaggtgaatttgactttgcatattctttttaagttactcgtcattttagctttgttttagtcaaacatttttaacttggaccctcaatttcttaaattttatatattttcacatcataatatttgtgtttttaaattcaccatgagaaaaactttcataatatgtaattcacatgtaattaaactatatgtataaagttaataatgtttgagttcaaacaaaactaaaacgataaagtaatttgaaacggatgatgtacactctttgtcactacataactactgtagcatcgatggcaaagggcaccctttcctttcctttctttctttctctttttttcttcctttctataaaggaaaaagtacgaattacccttcgaactatgacgatagtatgaattacccctctgaaccataaaaccggacattttataccctgaactatctataccggacgaataaccccctcgacccaatccaaagcggtattgtcctacgtggcaatgtagtcagcattttttttaaaaatggtggggcccacctttcatactctcccacctctctctctcttcctctcaatctctctgtctcatatgtggagccgcgagttggtggccggcgatgggcgtggcgggggcgcagtgggcgtggtggagagtcgggcggcgtccggcggccggcggccagaaagccactgcgggcggcgggcgccatcgccctcgctcaccactgggagcagctccagctccacgcgccgtcgtgctccagctctacgcgtgccacgggcaccatgggcacggcggggcgcgaggcagcgttggcagcgtcgtcgtccacctccttgcgtggtcgagctccagctccatgcgcgccctcgcggacaccgtctcgaccacctccagcgcgctctccagctccgccacgtcgcccagccgcgcccgccgccgccgctgcagccgcctccgattctcagtccacattatgaagaaagtctgttcactactagaattacattatccattaacttcttcagaatacgaaacacaggtgatttgaagaagtaaatcagtgcaaatctgaagccaataaaatggaaaaacattcagcaaacagtgcaacttttggattcaaatgtgcttttgtttgcacctccactattctactgttctacagcgtttttggctccttgcagggtgaagctgtgtatcagctgcgtcaggctttcatacgaggagcctcctttctccatggctctgcaagctttctccccgtactccttcgccttcctcctcctctcgccgccgtccatcagttgtatcaccacccacgcgacgtcaccccgggtgaccgccatggcctcgtcgccgaacaacagcacaggcgtcatcacgccgacgccgagcacgtcgacggcgaaccgctcgttcaggaactggtcggagaagtgtggccacgtcacgaccagcacgccatgggcgatggactccagcatcgagttccagctgcagtgggtgacgaagcctagccgcgcccgcctccgctcgcctagccacgcccgcagccgcctccactcgcttgagtgagagagagaggaggaagaggagaaataggaggggagagagtaagtgggccccaccattaaaaaaatgctaactagagtgccacgcatacgccgccacgtaggataaaactgccatgtattgagttgagggggggtaattcgtccggtattgaaagtttaggtgagcgatgtctggttttcaggtttagggataattcggtcgaccgcgataatttgaagggtaattcgtactttttccaactttaaaggtggggaagtgcactcaatgttgaacgctcccatggcaattacagaacactagtggttgggctattttattttcaggggcagaaccagacctgattgggctatagcccagaggactataatttctatagtacatggtttatccagcacagcagacttgagctgtttcctggcccatagtaggccgtagctcaagttccccgcgaccagcgtatatgttaggcccaagggcaaggagtcatctactccttctatttcaggatataaaacgttttgactttattcaaggtcaagctattctaagtttgactaattttatagaaaaaaatagtaatatttttaaccaagattattatattataaaaatttattcaattatagatttaatgaaactatgctggtgttgtgaatattaatatttttttctatagagttagtcaaacatagagtagtttgactttggcgaaagtcaaaacgtcttgtaacctgaaacggagagagtagacaaaaggaccctgtcaagccgcaggtaccagataagacaaccgcagcacaagactaaggccctgtttgttgcaagtaaggattattgatttagattacttaaactggattataataagctatagtagaataagctattagttgtttttttctctcgattattagagtatggattattcggtttgaaaagctaatgtttataatggcccagttattgtagaatgggaggaggataagacggcggtggcggcttggggaaggatccggggtatagggtgtgggcttggggaagggtttgcgtgcggctagggagagaggaagcgaatgcacgcgctgccgggggaggcgctggattcacgtacgacctgggagagaggaagcggatgcacgcgcgatcaggggaggcgccggattcacgcgcggctagggagtgaggaaggagatgcgctggatctgttgggtttgatggcagtggtaggtaatttacatacaatttataaaagtagtgggtctttagccacccaataatccttaaaaaacaagtttagaggatattaccagattatattattcttacttatagattataataatatatcataataatctgtctgtttgtttcagattagtaattaaccaaattaaaataattctaagctaaaacaaacatgacctaaatcatctcactagttgcaacaaggtaataaataacgggaaatgaaaatcgagagcgctcccggttttgtgttatcatacgacgtgttcgacagccatccatccatgtcttcgttctatgggagcaacaggcttgactctacagcaatggcattaaagcgagaaacctgcacaccaccaaccatcaaaactaaagattttggtttcactggcctattctttttttaagcaatagaattgatgacttatatattttaaaccactagaaaaaatacccgtgcgttacaacgggtgaagtttattttaatcttattatttttatatggtttagttaagatgaaattcatcgtgggaggtcgcttggatatatatatttttagaaaatcatgagatgcagttaggagtccgatcatcttaagttagcatgcgagcttttttaaataaatttcttatatggttccttctgtattaccaaatgtgaacgatcttaaaaccgactcaaatatggatatgcattttcaaaagtaaacgaacttaaaaaccgactcatacacagataacgtaccaaaataccggtaaaaatattttcaatttttataatagtagagatacgaaatttattgtgagaattcgcttggatatatatttttttgaaaaatcatttaggaatccgatcatctcaagttagcaggcgagtttttttaaaagagatttcttatacgactcatgtatttttaaaagcagacgaacttaaaacctatctcaaatacggatatgtatttccaaaagcaaacgaacttaaaaactgaatcatacactgatgacgtaccaaaataccagcaaaaacatctttaatttttataatagtagagatatattatttctcactttcctttttaccatcaagctgtactcaaaatacacgataaaacgagtccaatattgaatatattcaaacatttaaagtaattaacttaatctaaaagtaatttgcttaaatcgtagaagtaacttagctctgcaatagaagtaactacctatgtagcattggaagtagttatcctatgtagcattggaagtagttatcctgaccaatcagttgatgatgactgagatacgaaaacgtggatattgtacttaccaagatacagagaaacgataccacttgcccttgcccaggaaaagaggaccacatgatttgtagttgtcatctcgattcatgtgcatgttactgaggctaacaacactagtatattttcttttctatagaatctttgatgacctatatattttagacgtatattatttttaagatccatttgaaccgtcagactctacttaaaatatgtgacaaaatgagtcaaatattgaatatattcaaattatattttttctcaactcctccagaagtgtagttacttatagaagtgtagttactactaatgccgtgacgagttaattctccttagctgtacagtcacttctaatacctttaagagttatttctatttttttcatagttacttgtctataggattttatttacttctaatattacgaagagttacttatatttctttaaaagttactttgctccagtaatggagttacttttaatatcgcaaagagttactttctatatgacgcaatattttatttaaaaaacatagtgattactttaaataaagaatatatgtatttacttgaaaatcttctctacactttgcttttcctgtcgatttactccacatagctttcttatttcaattcactcataatgtaactacttctaatgctataaagagttacatctattgcatagctacttttgcaatttaaataaattacttttagattaataaaaattttaaatatattcaacaatgaattcgtttcatcacatattttgagcggagtacaatggtgcaaaaagatcttaaaaataatatacggtttaaaagatataagtcatcgaagaggtttaaaagaaagatacgctagtgaccaatctatataaatggttgttgccatttttagatggtaaaggaggatttatatgtcacatgggataaactggtcgctggtttggatcaaccagcgaccgtgcattgtgtagtcatgtccaataaataagtaaattatccttataccttgaaagctcacacaatatctctcatacctttaaaatttacccgattccttctatactcatgaaatttcaacttatccattccatactccatccatcagttaactgtctaatttgtataaaaatgaccattctacccttacacttgggtgaacaaagaaatttatgaattacattattgaaaatataaaattttttcgcatgagactattatatttatgatttcctgtgcaacacattattttaatttattgcatttggtttatttaaaaaaattatgttaaatttttttattaattatttaatcttattagtttcataaaatgcacatactgtgcacccaaagaattttttttagttttccaagcctatattgaaatttacatcatcaagggcattaaagacatttgtaatcaaatagtgaaatgaaggaaaatgtaacggcaggggcatggaatggatcaaattgaaatttcgggggtatagaagggatcggttaaatttcacgggtatgagacggattgagtgagttttcaaggatatagaaggaatttacttggggtgattatacctgttagtaccagattctaaaaatttgtgcaccaaatgtttttttaagatgattagtaaatagtaagatgaagaaaaaatcgatatactaggtgcaatagtacctaagagtcccgaatgataaccagattcagtattcttcaatgaaacattctatgattgtgattgattgtggttatggtacaaagatactggatatttgcttgaaatacaaggatgagtcttcttacgagatgagtatctggtaccgttcctataaaagtgccagtactaactgacctacatgttttatgattcaagttgtagaaaaccatacatattttcacacttgacacttaagtacatatatattttggtagtttagntnnacaaaaccacactatcnaataatggatttacccgtgtgatgacgtgattgttccatctaggatgatgacgtggcatatcctattaattccgtgcgatggctgataataggatc

SEQ ID NO: 6591 - DNA, 816 bp, Oryza sativa
taatttattttaggagaattctagaatcctatttttctatattttgccagatcaaacaccagattccgaatcagactctgactctcctatcgagtcctggtaaaactgagtccattttgcacttgaaaactgtttgttattaaaataaaatctataggtcttcattattatgccatccttggcaaacaatgttgtttctttacataacgttgagggccatggcggtacttttaatttcagatattaataggtgatacctttcaggccaacatgaggtcttagcttctggaccaattgaagatcttatagcacatcgtgagcataggtgtgttccactccaactttgttgtttatccgtatatctggttctatcattatctcatcatttttcacaaaatggattatattaggtaccgtatatcaggatctcaattgctagcagcaatggatttgagttcaagcgttccacattctgagttactatcagctcgagctagtgaagcgtctccatttttggacaaacaagaacagatgtctgctctattccaaggaaaggaagaagccctctcaaggttagatgataggaatggacgtgctcaacaacagactgttgatgtggctgaaattcttcgccgttggactcatgctttacagcgtattcataaacagtctcttcatttggtacgctattcttacattaattttgatgagtttaatggcattcttatgcatttaatttatttgaagttttgaacgcgtctgctttcatatagaaatatgtgcattcaacctttcacaactactgtcactgtgaaa

SEQ ID NO: 6592 - DNA, 655 bp, Oryza sativa
aaaaattttgaatgtaatatcgaacgtttgaccgaatattggaaggggttttcgaacacgaatgaaaaacctaaattcataactcgcctggaaccgcgagacaaatttattaagcctaattaatccatcattagcacatgtaaattattgtgccacaaatggctaataagggactaattaggctcaaaagatttgtctcgagattttcatgcaaactatgcaattagtttttcattttatctatatttaatgctccatgcatatgtccaaagattcgatgtgacgtgtttgggaaaaaaaattggaaactaaacaaggccttaagaagccagaacctatacgtgagtacaccaccgacgatagatggaagtatttcaatgcaacccattctaaaaaataaatcacatttcctttcaaaaaaaatcacatctcacccatattaatagctgtttcttgtgtgaatgtgttgtccgctcacgattcctcgcaacagtccatcggatagcatacagtgtaaagcctctgtcgcatactgagtgaaagaactctcttggtctgcgttgcgctccctggccgcttaccagtcaggtgtctggtcgtcccatatgcatttatttatcggccaacgcacttggaaaggctgtttgcgtattgg

SEQ ID NO: 6593 - DNA, 826 bp, Oryza sativa
caagggatttgggatcatcctcagcatcaacagctgtcctgtttccacaggtaaaattaaaatctatgaaatgcaacagagagaaatccattaatgtttgcaatacaggatcatagtcatagcgccctatttcttgaaatttttgtatgagaaagaatggaatactgaccagcttatgtacaagcaagtttgttagcaacacaagagtgattaggcgcctttatgttgcagtgatctctggacaaatggatggtcaacagctgagcagcagatggccgatcatttggatttacttttacacacttaattatgaaatcacgagcatcttctgacagtgtagctggaatttctggtggtattcctctaccaattttaagcaaagcatgcgtctacatagcagaagaaaagactgcatcacggacagtaataatacaaattcccggataataagaaaattaacacagcaacatacagtggatttgctgtttgcagttctgatagaaatgtttaattttcctactgacatttttaaatccaatactacccaaattttcctgatgaaactaatgtttgattttcccaaaaagatatacttcatacgtactgatgtaagcaaacaagtcatcaacatgaagaagttgtcatcaatgtttttgctcctttaattaaatagcgtgcagcccgcgtatatcagtgcatttggtatttaaaaatgggatgctgttactggaaagtaagacaagagatatactcacccattccatatcagggtatggaactttgccagtcagcatttctaaaactgtgcagccaagactccatatat

SEQ ID NO: 6594 - DNA, 1265 bp, Oryza sativa
aaaaatggagcagtgaaggttggagattttggactggcaaaggaaggtcacttcatttttggtttcagtgtccttttttcccctggtttgactgacagattattaaatgattttgtttgatattgacgatgtgaattctcaacccttttaattgatgtaatgccagataaaagtttggaagcagaaaagatcttgtaccggaagtgtatattggatggctccagaggtaattgtttgacttagtatttatacatagagttttgctcccatccagcaggtaccatcgggactgtccggtaccaaatctcagccatttaatcagcgaaatcggacggtggaaaataagtggtacctccaggtacaaatttgcccatgaggaggtgctaaaaaatttcgagtggtggaagggtaaatttgttttttcgcgtaggagtgtccagggaggcagtggcgagttgcttcgtgcttcgtcggcggcggcgagttgcttcgtcggtgacgacttgcttcgtgggaggaggcggcgtggcggcggctgatccgtttgaggctgcggcgtctgatccgtttgaggcggaggtggcggcgacggcggtggcggcaggtggttcgttgcggcgaggttgtgttgggcgcagtggtggcgggcgcggcagtggcctggtgctgctggtggcgggcgcggcggtggcctggtggtggccacggtcacgaggtagcggcggcggctggtgtgtgggcagccttggctgcgaggtggcgacgggcgcgatggtgccggccgtggtgatgaggtggtcgtcggagccggtgttgtggcggctgcagcgacgagatggtcatggagtcgtcttagcaggcgatgtggcagtgtatacatcgatttcttttcatccgatctaaatcattaggttcggttggttgcagcagtagatactttcattttctgggctgcatatactcttcttcttcattgcttataggatttgtattgtacgatttattggatgttttgatgagctcaaccattacttgttctttgtgaatgttcaaatggccaataccctcccatatcatttactgattactcattcgagtaagggcgtgaatgaagccgctggtgaaggagctcgctggttccgccgccgcggatggcagatgcggggcgagcaagcgagcgcacaggcgggggcatggatgcggggtgagcatgcgcgcggctcaggtgggcttcgcacgggtggggctgcgctcggagggaggaa

SEQ ID NO: 6595 - DNA, 1335 bp, Oryza sativa
cagtcgtaatccatgagtaataagagatagtttgtcagcatttttgccatgatttaatgaaaatatcacaaattatttatatgtccagattcatagagtgcaaagatcattttccatcacttcagtgttccctgtataatattgctggctgcatcacatctcttattacttaattttcctcttcatctttacagaagtttgtggttaaggtagtttcccttgctatagcccgtgatggtgctagtggaggggttgttcgtaccgtcactgtaagtgctcccttttttcgtccttattgtcattgtctgttcccttgttgtagatattttgaaacatcagataccggaactgattgctttagttgacttcatacaaacatgtaaatttctatgctatatttgtcatgctgtttgctgtgatggccatagaatatagtatcagatgaaacttaaaatgaaaaagttggccttttttaacttccatggactggttttcttgccaaaaatggataatatttcagtgtgatatatcccttatacttcattcagacctgttttactcttttactaaaatgtgttagggtattgtagacaagacattggatgattggaagcattagtaacaaattttcttatgtcttgttgggcatctatttgctttgattgcattttcttgtagctcttcctttttctgaaaatgtgtagcatgtggcaaagtaaattttaagttgaggcatgtcttgttatctttgcttaaaatgctattacttttctgaaagaccaatgattcttgaacttatggatatgataatcttgcagataaacgcagatggtgtttcgaggaaattcaccctggagacaaactacaactgtggcatgaagagctggagccccagaactcgttgctggacatacttgcagctgggaaccctgatccgatggtccaatgaatctgccctcagccatacacctcccttaagcaactttcttctgtatctgactttcactagatttactgaagaactggactgcagaattatgttcagctgtgcgcaattatctagtgcaagatgcttcttgtgctgtatgtaatttcttttcgttaaggaagttcaaaaatatcatttagactttgatttgcctccttttgtggttttgatgcatatggcttgccccctcgtattggcagtatgttgcttctcttttctgcatattttcattttgaggctccatatgcacgtcgtaccttatagtcttcaactgaaaaccagactgttgtgtttattcaggcatagttagaagataaagggtgtaaagaagatttaagtttttttac

SEQ ID NO: 6596 - DNA, 995 bp, Oryza sativa
tattttaagttacctgccaccatgcatgtgcttgctgaattaagttttcctcttcattttaccaactaaacattgttgtgactatctagatatatatatgcacatatatagaattgtattaatatagctactagtactgtatatagtgcgtcgttgcaataaaactagatagttagtttaaacacacgaaaatacttttatatgacggaacatacagaaccacaatatggaaaataaccgtgagtggatgtatactggctggaaacgtggtcgtgcaccgactgatgagtgggtacagcaaactaaggattttttggattatgctttttccatgccaaatgttgttgttagtggaaaaattaagtgcccatgctccttgtgccgaaactatgtttcacacagaaggcaaatggttgagatgcatttgtgtcgtgagggtttcaaagagaattacatgaactggtcagaacatggtgagtgttctattggtcaagaagatcaagctacaacttcagcagaaaatgagaaatttgatgaattggatcggatggatgacatgttggttgacatagccggtgactatgagctttctgaggaagagccaacagcctctgcccaagctttctacagaatggttgctagtgctgatgagaaagtgcatagtcagacaacacactcctgtttatctaccacatctcgtcttcttgccatcaagtcacagtacaacatgccagcagcatgctatgatgatgtgatgcaattgatccatgagcttctcccttctaggtcaaaattggatgataatttctaccgttcaaagaaaactcttgctggccttgggatgccatatgaaaaattgatgtgtgctacaacaattgcatgctttactacaaagacaatgctgagaaagttatatgtgatttttgcaaacttctcgatatgagaatgagcatagcaaagttccacataaggtgctaaggtatctccctatcaca

SEQ ID NO: 6597 - DNA, 694 bp, Oryza sativa
tctatcaaccttgttgaactcctcaggactcaaggcggagagaattgcattggaagcttgagcattgcgatggatgagttgctcttgctccaaagtgagctccatgtcttcatgagttacgtcaatacctgtacaaacaactttcaaatacttggatgcaaagagattagatacaactttatcttgtgcttccaagcggcgtaatgtgtcccatcaaattgaggagcacgcccggaaggcacggagacgaagttgtgagagggaatggtaagtttgctgtaatcaaaaggtgtagtggctcccttgggtgatggtgttcccttgctgctcgctccatcttcattaccaatttccccgtcctttccacctaagtccgacatcgtggatcactcaaagcggtgaagcttgaatcaagagcaccaggctctgataccaattgaacgtgcagagatgtagcctagagggggggtgaataggctttcctgaaattttctcaacaaacgcaacggttaaattgacagggcccggaacctcctggtgatgaacaccggaacttcctggcagtgatgagtagcccggaacttccggagtttttgagccaggaacttccgggcaacagagataaacgaaatatgagaagaaaaacaggtcctagctagggaaaatcaggcacagggttgcacaaggtaaaaat

SEQ ID NO: 6598 - DNA, 610 bp, Oryza sativa
tattcattattttgatttgagaaatccaagtgcgcctgtccatgtttttggtgggcacaagacagctgtttcttatgtgaagttcctgtccaccaatgagcttgcgtctgcatcaactgatagcacattacggttatgggatgtcaaagaaaattgccctgtatgtgtcattgagatttttcttgcactgcaattatgaaattatgtttttgccttttaagcagctatgacttattagtaaaaagtgatgttttaggatatactctatttcatatcgataaaaattggagctatagtgtttctttatttcctgggaaaaaactatttgagaagcttcgcttttttttcgaagaattctggtccttgaaaaacctttggttaggtccgaaattcttggataagcatttgttttcacctttgtttcttttttagctcatctattagtctggcttggtttagtagttacgtcatgctaggcttctcagaaaacagattgttgaccttttgtttaaaatggttacctttttcaggtaaggacattcagagggccaagaatgaaaagaactttgttgggctgtctgtaaataacgagtacattgcctgcgggagt

SEQ ID NO: 6599 - DNA, 532 bp, Oryza sativa
tgagggcggagtacggcatcgcggcgcggatggagcactacggctgcgtggtcgacctgctcggccggtcggggcagctcgaggaggcgatgcgggtggtgaccaccatgccgatgcggccaaacgaggtggtgctcggcgccctcctcgccggctgccggatgcacggggacgtcggcatggccgagcagctgatgcagcacctgctcgagctggaccccggcggcgacgccaactacgtgctgctgtcgaacatctacgccgccgtcggcaagtgggacggcgccgggaaggtccggagcctgatgaaggcgcgggggctgaggaagaggccgggctacagcgccgtggagatcgacggcgacgtgcacgagttcgtctccggcgatcggtcgcatccacaggcggaggagatatctcagatgcttgggttgctcatgcatgagatggcagggcatgattatgaccatgtaatcgattgcttggatgggggatgaattcagaccctggagactggagaatgcagaagact

SEQ ID NO: 6600 - DNA, 1501 bp, Oryza sativa
ttatgcgcttgtacgaataaatataggttcctaaccaaaacagacagacataaataccactgcggtaaggagcaaatctataagcctcctgaggagttcagcatgtcttgtgtcctccatttgcgtcctaaatttttcctctctgaaagaagctttctgaaatcccatagaattttgatcttctctagcatgtgtgagtatgagctgagagctatctgagattgcttcaattgcaatttcctcatgtttagtcctatttcaagttccttgagctcatttgaacgagtctgctcattcagagatctctcaaatacattaagaatgtgcctatcaaattctggactagctttattatgaggtagtttaaccaactgctgatcggtgcccgcatgaagaatgatttgattatccattgaacttaacgatgtactctcctggatatcatgtaccggcctttttgaatcagcaccactcaatttgatttcagcagcagaagtaccatcttcgtgagaaaaccgagagttatcttgctcatagacaggtgtctcattaattaaatgaagtgtcctcaatgtacttccaaatgatttctcaaagtttttcgtgaagttgtcgaatctatcaccatatatctgcagaataacgtaagtcagatatgtaaaaaaacctgtctaagtgtaatcacagacaaggaaatgaaccattcatacatttgtcaaggactctttcactgctgacgtgcacatctgcatcaagattcagagttagcatacctgaagttctgttatagtccatggccatcatttgtagaaaggctaattacatgaactgtgtacctttgaaaggaaatcaggttgtaatcttccttcagagcaactgcttctattaaggacctgaaacaggataaggtcagttcttgttaattacgagtaagaaaaggttaaaccatacaagctgaatccatgcttcagaaccacagttctctactggagagcccaagaaattcatttgattcatttttgtaaataaacaacttcattttaatttggcttggatgtatttcatcatcctaatggcgagacgatcatccagagaacagaaggattacatatctgagcctacgcttcaaaacacacgcttctgttcattagtgccgtcccatgtaaatttgcttaattcaatttggttatataaacgactttagttgaatttagatgcaatgtgaaaagacgcccaaaatgagttccggagcaaaagaatatctctacttctccatcctaaattcataatccaatgaccgtcccagcaaggcaagaattgggtgaaccacatgaggagggtaaaaaccgaacctttccgccgcgactaaacaagaaaccagtcaagaatcgaagcgaacgcgcacctgggcaagaaccgccgcgaaggacatcccgagaggcagcgcgaggtcctgcgcgccgtcggcggcgcccctcccatcccctccagtcgcaagcag

SEQ ID NO: 6601 - DNA, 1312 bp, Oryza sativa
ggaggatctcttccattctgcactatacaacaaaacctggtaaataaatgacaatagttcatatatagtatcaacacttttgattgtttttttttcatcacatgttgttcattgcttataggtgtatcaacttggaccaaaaatgcaagtggcttggatacctacagagttcaaatggctggctttaaagcctcactcaaagggtctggccaaatccgcagcgagaaagtcaaaccaagaattgtgagttggttcctgaatagttctcagcatcacattttatagatccttgctgcatttaagtgagagtcaagttaataagtcaagtcaagagtctttaagtagtaagccattagttgaattatttccttatcttaagcttagtgtgtgtagttcagtgatcctaccaagaaaccatacttactttctcatttttatagaatatttactgccaagtttatcacgaagaacgtggtgaggagcataacctgtgagcagtgagttagatgggaatgtggtatataaagcttttggtggactgaaacatggacggtttgcaatgggcaacggagttttcaagaaaactgaagttcttgctgctgttaaacataagaaatctggaatatctggatctacgaattcttacaatgctgtagtgcgtgagaatgcacaacttcgccatgaagtgactgaacagcgtggaatgatacgtgaacagcgtggaatgatacaagaacatcgtggaatgctaaaggtaataactactaaattaatctctgattcatttattttttttcccctcacagaaaaatccaattagcaaatttaacttgcatgcctataggcagtatatgagaagcttggaatggacatacctgaggaggtactttcaaggtgggagtcacaaagagaggtacatttgctttgacaaatgtataatttgttgtttcaatgatttattgtagtagagcgtgaaactgatgtctttactgttagtgaacaatggttgctcacaatgcatggatggatgattgaatgctaatataaagtctgcaagatacatttcatttatttatttccagtattttcatacatagcatggcatgttttctaaatggtttacctagcatacatatatactgcaatatctccatttttcttcaatttgttgtctagcatgccctcttttgtatccacaagactctggaattaagttcttttgccggcacaatgttcccttaacaaaaccagtccaatctccaattattaatcttttagcatgcttcaatatgactatggcctataagcaata

SEQ ID NO: 6602 - DNA, 525 bp, Oryza sativa
cactttcccccgtgttttgtgcacagtacactgcccgccctgccgctcgatcgatctggcctttccgccggaccgccgcgcggcgccccgaccgtcgtgcggccgcaggaggatgcaggcacccttcctttcgccgcttttctcctctggaagaagggctctcccatagacaacggctaagaattacaaggctgcttctttcgggagtagtttttctgttaattttacaagggaaataggtgagatttctgaggtgtaaaaagagaattagtagtgctgtggctggggaagatgaccaagatcagctgcttctctgctcttctcgccggcaagaggaagttatcaaaggttggtggattatattcttaggagacccagttctttgatgaattttgggttaagtttttgtttcttatcagctctgaacatggcaggttacgagcaagattggttacggcaagaagtctgggggcaatgagttccataaggtgaaaccggtggagttcatggaggggacggacaccg

SEQ ID NO: 6603 - DNA, 503 bp, Oryza sativa
cattgatcacctaggatagaacagaattaacaacgtgcactgacgagtttggatccattagcagatgatttctgtagggtggtgccaaatggcgtgtttcctcacctcactgacggatttgtcgccgagttgggatggattgacgaaatcagtcacaccgaactcttttcctgcaaaaagtagaggtttcttcagttgtgagaaaatgcaaagattcttcttcactgcgtgttatacacaggaaaaataatttggacttgccaacttcctctttgttaggattcaaatcaacaccgataatcttcgttgctccacacatttttgccccttgcactacctggaaaaaaaagtcaaaatatttgcagcggtcgtcaactcatcatgtatccgagtaagaaattacactgcttcacctctagcttaccgccaatccgacggatcccagcccgaagacaaccaccgacgaaccgggttgcactttggccaacctccatgctgctcct

SEQ ID NO: 6604 - DNA, 671 bp, Oryza sativa
ctgcttaaatctgtatgtgacgagtagaatgcgtgctaaaacttgtatggcagatatgtgaaaaaatcgtgactgtagcattagaggaaactagaaacaacaccaattgttccagttgtatttttctgtccatatagttctcgtttggccctgaagagtgaagagtcagaaaagtgtacacgattggtgtttagcgtgatgttgctgttttggaaatttagaacattgggtctcgtgtctacatgattaacaagcttcttagatgattttgatgttctgacttgttatcttagatgtgcatgttctgaaccaactgaaatcgatgttatgttgacgtactatgttggtttttgttactttcctttaatataccctttgttgtctggtattaattcttaggaatgtatgtggcaaaccgtgcgtcggacaagattactcagctaactgacaatgtgtacatctgccgctctggatctgtaagtatctatattagggacttactcctttttcatgttgtctcattgtactgtggccataagatattgggaaatcacgagcttcctattcatcaagttatatatgttcttttgttatactgtgtcatgtcatcttgatcggttttcccagtcattcattgccctctcataagttacactctcattgcaatattt

SEQ ID NO: 6605 - DNA, 1803 bp, Oryza sativa
ttcctttatgagtacagagggagtattatttgtctctgtcctatctatatggattattttgatatatacattgttgttgccattacaatataaatacacgctgatacctttttcatgaaaaatttgatgacacagaagtccgtttgtaagctctcactccttctgtctcgctgagctgggctggcggttttctcctcaactatgcggcggtcatgcctctgttccgcgcgaaaacagagtgcaagttgccacgggctgcacacgaaagcggagacgaccactcggttttggaggtgggaacagcagagacccactggaggcatccaccaatctgtggtgttggtaacaccgtaagtactcctacgtaacaatgacagaaatgagcgtggcaaatccgtgggccgaacggctggagatggcagcacggaccgggacttgtgctatcatccaaagtctaggtttaatgtgttggcaagtgtgtataggaatgaacagttgtcgctgtccagaacaatgagttgacgttcacttttcaagacattaaacgtgtaatgagtaatcagggcgctctatcgtgcgagggttaagtattaacaagtcaaattcaatgatgaccttcatcaacgttaaaaactggataagttaactagctggccattgtcagcccagcagttgtgccagtagatcagatactgccaatatgtagaagcgtgtgtttatactacgtcgtacaattgctcgtatatatatatcttgagcagcccatcgttttacaatttaatatgttgatgaagtacaatactctctcaatcctaatataaatataactttgtattgatgtgactgtatgctcagatttataactatagaatataccatatttgtacaaggtaaggtttcacttgtattgagacggagggagttggagggagtagagttcaactactttagtaggtaaaactataagaataatatgtaggcctagaatgagataagttcatggggaaggattgggatcctttgcattagagtacaaaaatttgcaccatccattcacaatcaattcactaaacgaagcattttcgagacttccgcgaaagtcttcttttagcttgagttcatcggcctgttggcgtcccattttttttccgcttattactatcttctgaattaggtagagtgggagcactcgacgaggcatctacgacagtagaggctcttcctcgtttttggccggacaattctataaatagaatcaaaaaccagaagaattgtgagaaataaatcaatttattaagttgagacacatcgagggataaaacatttcatactatcataagttgattccatttacaattgaatttttttttctttttatgtgagtaaattttattttgggccatgtatttttacccatgttgcagcttgggctaggttttagctgagtttttcaccttggatcacttaatataaccatttgtttcatcctggaccatagccgctcatcttctccgagtccaacaggcgataacccatcaccaacgtgcccatccgaacaagcgttggcggcagcggcggttactgatgcgcttatttgatttgatcacaacacattagcttggttgctccatgctccacaatcccagccggccagccaagttacacctacaaccaaatgggcaatggaacatggcttccgttcactgaagcaacaaaaattgatgcaacatcattaaaattagaacaactcaaaccatgcatttgtgttgcctctgtccctaatgtaagcatcaacaaattact

SEQ ID NO: 6606 - DNA, 696 bp, Oryza sativa
tgattttggggtttttcatcatagtttattttccagcctttgtcttttagatcgctaaaaacacggatataaaaaatttatttgcaaattattttctgtttacaaatatgccgtttcacttattctgtcaataagcgaaacgatgggggtcctaatttcaatgcatgcatgcacaccttgtattatgaaacgtgaaaaaaagtagttgtgccgtatattttggaatggaggtagtagtttgcaagttatttctgaaatttgttctcgtggctatgtgcagtattttgagcactgtttttaaggtgtttaattaggtcctgtttcttcaagagcatttccacaaatcaaatattaggactgctaagaatgtattaatgctttgagtatgctaacatggatggaatgtctggattccttggtctggtgaatacacaatcatatcttgaggttgctcttgtttgtctctccgtctctccgatgtagtaacaactaacaactagcacatcagcgcaactgtgcaaataagggaaaaacagcgtgcgcaactcatgcccaggctaacattaaagatgttttggttgatgatttatctgtttgcaggttccaaaggccccctggtgcattgccatcatctatgctaggatacgaggcgctgactggttccttggatgatttcgggtttgaagattatctcaa

SEQ ID NO: 6607 - DNA, 715 bp, Oryza sativa
ttatccaatgttagtttctaggtttgtacactatataaactttacagtatatattttcgaagagttttttctaaagaacagatccgatataggacttcttcgcaaaatacccccatccttcctgcaaacagatgggacaggattgccatagctagagcaaagaggaaccacagtactaaggccatggccagcggcgatgcgggaagatggcccctcggccagcaagaggaccctcattaccggcgacacctgcggctagggtttgaatttcgttgcaaaatttctgaaatttcgttaattttgccctcccaccggcaagctcatatctcgcccgaaattttcgtttttttacaatttttttgtgaatttgtcaaattgtattcaaattcattcaaaatcagttaaacttttaaataatttcggtcaaaaaaattcgaaatttctaaaatttcagtgtcctcgacagaaatagcaatttcgaaatttaaaaccctgccgcggcatcggatactcaccccaacacacttatccccttctcgctggctagggagacctccgccgcggagccttctgttgcttctacgatcaacgcggggaattcatgcgcaggcgtgcggtggtggacgagctggcggcgctgggggcggccgtgcatacctgctccaggaacgaggccgagctgggcgagcgcctcagggagtgggagggcaggggg

SEQ ID NO: 6608 - DNA, 1920 bp, Oryza sativa
aaaaaccaacatactgctagatgtgatacattctaatacaacgaatctagatatacatatgtccagatttgttgtattagaatatatcacatctagttctagatttattttttttgacggatggagtaatgtaaaagaaaaataactgatccaatcaaatagatgtgtccaatctcggggtttttaactatttaccactcttacggagtggcatactgagatgccactcttccaaattttgttacacaaacactacatgagagaggtattttcctaattaaagtgccatatcagccagagagacttaaaataacctttttacccctagtttaagaaatatgagaaattatatacaaacatatataagaaaatattatttaggagtatatcttaaaaaaaagagttatcatgggcaaatataggtcgaacaagttcaccataatttataatagattcaacatagggtgaacttgtttaatatatatttgtccgtgataactctttttgagatataatatagtacgtacttactacgttgaatctattattaaattgtagtgaacgtgtccgacgtatattgcttgtgataactcttttttaatacaatatactgtattgaatctattattaaatttggtgaacttgatcaacgtatatttgctcgtgataaatattttttgagatataatatactatgctaaatctattattaaattgtggtgaacttgttcagcgtttatttgcccgtgatagctcttttctaagatataataaacaatattttcttatattgtttgtatatatctctcatatttctcaaattaggggtaaaaaggtcattccaagtccctcttgttgacgtggcactctagttaggaaaaatacctctcttatgtggggtttgtgtaaaaaagtttggaagagtagcatctcaatagtgccactccgtaagagtggcaaatagttaaaaagaacctcaatctccccgtgataaacccagccaaacacgacacgcagaactaaaataaaacacaaggtacaaacaaatccactcaaaagaaaaaagaaagaaaaaacagggtacaaatccgctgctaaacacacagggttttagcagagcttgtgttgtgttgctcatccgacacccaatcccagacggctctgctctgtgtctgtctcctccgctaccttttgcgttttcccccctccaactcctctctatttccttcgaagcccctcgttcccctctctctctctcctccacctcgctcccacctcctcctcctcggctttgctgatccaggacgagccaatcgagctcgccgacgggcggagccaccaccaccaccacccatccccggcgccgccatgctggcttccgcgaggtgagggtttcttgggggggatatgtcggactcctccttttgctttgctcttgaggtgttcggcgaattgcttgggtgggatgggtgattgattgattgatttgatttgattcgctggtgggggatttgtgttgcagggggttctgggggcggcaccggcggaagatactggtctcgctcggggtcgccggcgccggctacgccgcgtacaggtacttggactcgcaccggaggcagctcgtccgggtggagcagcgcgcgctggaggagcgcgccgccgaggagatcatcaagaaccagtaagatgctcgcggcctcgtcgcctccgtcttacttgctacctacttgagtggggtttaatcggggggtttcttcttcttgcattgctatcatgctgtgttcgtctttgatgggtagcctagcaacagcaaagttgggggtttgagggtaggattatagattctacggttggggtttgaggaaaaaatagaaaccttttgtggtgcgcctattgttctaattgcaggggattagt

SEQ ID NO: 6609 - DNA, 5032 bp, Oryza sativa
ctccctccctcccgtcggccggcttgcgctgcctcctctcccgccggccgccccgacgagctcgcctcctccctcgcggcgatggacaacgcatggccgacggcgcgcgaggcgcctggggcggcggcggccatctctctcttgcgcacgctcgcctagcagtccgccgcccttctccccgatgggcgccggcgggagaagagggatcgaagccacgtgcctctccccgtccctcggccgccgcggccctcctcccgtcgtcctccccctccaccgcgccctcccgttccccccccccggcgccgccgcctctacttcctcgccgccgcggccggggacggccgcgccgatgccctcccctcgtctgagctccgcaagcgccatggcggctctgctgcttctggtggtggtggtggtggtggtgaggacgagaagttccacttgctccgtcgcctcctcgcgcggcccaacgtcgccatcgacgcctacatcgtccccacgtgcctcgcgcgcgccgtcgcccgccgccggccatgcgctgtccattgtcgcgccgcctgctgccgccgtgctggacgccgcccgacgagaggagggagcagagagatggggagagccggagagaggaggaagaagatattggattcggtcaacgacatgtggggcccacgtgggcccaccatatttattttgtgtagctgacatgtgggacccaccatttttaaaatattttttggggctgacatgtgggcccatgatttttattattttaccgagatataattgccacgtcagcgccacaccagcgccacgtgggatggagaccgagtcaaaatggccaaaaatggccaagtaggcgtcacgtcagccaaaaccgctattaaaaccgccgagggatctcgtttgactgatttttgtaagttggggatgggtcgtatacggttttgcggttcaaggatgaaaattagactggcgacaaataaagggaactcaagtgaacttattccaacgttgaaattgctcagtcattgggccgtcatgagcagtgggaaacgtcatcctgcacatgcggcctgcactaccagcccactagttgttgggccatttgaggctttgaacgcagtgtgctcggagaaggaaagctgattagctgagcctttggtattattcaggcccactcgtgtacattgccttcattgttacaagaacaacttcattgttaccaagaacaacttcgaacccgagcagggaggtcagttttctgctatctgttaactagttctatctggtatgcatctgatatatgctaatgatgctatgcaggtaaactgtaactcggatgttctccttcttttgataacaggtaactgtataacagaatgcttgaaacctgatgttcagtaaaccgtcatccagcagctaatcgaactgccgtcagctaacgcattcggttttgctgcaacctcatgacttcacaagtggacttgcattctgcagttatatcttcccaagaatcttggctagcaattgctgcccaagagctttgttacttcttacggaatacggactgcagcttgcaaaacgaaaataaattatacagtacttcaggctgacctactgttacatttctcatttttcacggagggattattcaatgtactgtactagtactagtattctgctaggatttccaagatttgataattggtgactttgttcattttgcataggagtatgactgtatgacaggaccacatgacgcgatgcactgtattttgaagtgtacacggtgacagcattcacgcgttgtagctgcatggctgcatcaggttcagagaaaagcaggccgaggcaataatgaatgtaagacggcttgttagtattcttaatcacatgaatctttttttcaaactcatttgagacttgacatcctccaaaagcttatcagagtcctgttaaacactaattacacatttgatcccattattgagaaaggaagactaccatcaacctggcccctcctaacaaaaaaaaacatcaagcaggccatcttgtcaaggtctcaaggataattattcaaccatgaaatcaagaagatctcaccacttgttgaagtatgtcataggcaccaagtcctcttttgctagcctccaattaccataactagttactacttgtatactagctagtaactgaagaccccatcacctcacaactcaatgattaaaacttagattaccacttgttctaaagtgactgtttttttttctttcaatcacgtttcagtttcatccatactctgtatgagttatatgaccagagcgatgatcacagtgtgaatcgtcacctctttagaattattctgtctctaatgattgtatctgatcttatatatatacactgagtgctatcacaacgacaagagcgtagcattgacttgcagctggaaaatgtgacaaaactgactatctcgcggccgtttcagcaaacaaatggactgaatgctactctattggccatggaaacttgtggaaacgaagcactgaaacgtagacttggcctcagctgcaaaacttcaaggattgagacaaacagaattggatgagcgatcgcgttggtggaatttttctatcttggctgacatcgaaagcatttgggttccccatcaggccgtcgccgactttgtttttgggggcttgatatgattagattaagagaggagttctatccaataggtttttttattagctagtagtattcaattagcttagctgactcctttgctagaggattacaaagtcaaaatgttcagctgtaggaaacacatttgaggagatatgtacagtagcagtgtagcacatttctagaaccagttggttggtggcaatgcaaacaatactacaagatcgacaaagcgatttaattctctcctagtacacgaattaaaatctttgggtatgttttacttttaaactttatctgtagtgtataagaaaaacgaactttaaaaaggaagaaaaaactcacctagaaaattgggaaaacgccaaaacgtaacatctctgctgataaatgccatttctagcaagaaagtatttttttccattgaggtgatgtgcccttgtttcttacattttatcaaaataattataattattttaacaacatggatcaatatatgatatatcattacacaaacacaaaggttaatatttcaaacttttaaaaaatatataactataaatgatagtacatgtattatgcattagctagagtttaatttatttttaaaaaaccttctctagattgaaattaaacggctatgtatttgaagttacctatcactttctatgtcccaaaatataagaagctaaaaatgaatggaacattttctattattacgaattcagttataggtttttatattttgggacggatggagtacataataatctatattattaaattatcttaaaattatttggaaggcgtacaaaagatgatgaccattacctccatggctccatctacagtaaacaactcccgtttctaacgtgtgagttgtgaccaataattcccctcgtcagaaatgttcctttcagcgattgccaccagccgcctgcaggtaccaagattgtcaaatcacctttcagtccccgcgcggcaacgacactagtacaacagcgcaagtatagccggtcagctaggcttgcacagttgtactacattgccgcccgcctcgatcgtcaacctgcagacgcacacgcgcactagcccgtgtcgccggcgctcgcagggcccccccggagacgacatgccatcgcctctatcgctaaagccgtcgtccacctccccggccgtcgctgtcctctcctccccctgcgcgagcaaatcgatcgaaatcacggtggctcatgcgattctctcgtgtgtgaacggcgccaaccgtggcagataccctttgccgagcggaaaagggtgtcaaaatgcggtcgcattttctgcatttccaagcgacccatccaaacaaggactcgcatggagtagctagttctagccccaaaaaaaaaggggcgagatgttagttatagttagtggagggcttttgacttgcagcgtccggccgccggtgtacggaggagaacaagggaacagcctagcgagctatctgctcctacctacatcgtcgtctcgtcaaggttttgtttgttcgctggtcgatggattggaacattcgcgagacccttctttggcatgcgttgaaattgttctctcgaaatggaccgaataatgttcctcgataaaggaccgaattggagtactagcaatgaaatgtatgcacatctgagtacgagaactaattaaacaagcagaatcagaggccaggctttaagcaaattaaactctgcagcgtacaaacacagttaattaagtccatcgtctcgtgatctcgtatgatcagaagaataacacgtgacggcgacgctgctgggcagaacacagacgatacatggtacttatcctcatcttaagcgccttgatctttaatttatatgtgttaacactgattattttttgaaaaaaaggcggatttgtggaatattcagcggccggtatcgacaagcgcaagcgatagatgggtcaagtggggggttttttttttgggtacaaatatgtgaacgattgattgggaaagatcaaccgccattgatactgtcgctacgtggaaatctcaaatctataagcgtagttcgtatgtctatctgcctgcctaactcgaccatacttgcatttctttcacgactagttatagctcgaaattgatcttctacagatatggttggtctggcatgtaatggatgaaatttgccgctacctgttggtgcgtgggtcttgtgttcccaagaagatggctagttttggcgttttattaggttggctcttatctagtgtgagatcggacggtgaacaatagcgggaaacaatgtttaatttagctgaaagtgcgccgggggggggggggggggggggg

SEQ ID NO: 6610 - DNA, 6419 bp, Oryza sativa
  unsure (1)..(6419): unsure at all n locations
cttaatgatagatcagattgatccacagacactttaaaagggtcaaaatttgctggccttatctcagatgagatcttctttatccttcctacgacatcaagaaactggttccatctttcaaccttcttcctcttcatctcttctaggtatggtaatattgcaccgagctcatcccgtaatccacatgctttctgattagactgataaaacaatcaaaaacaaagaactaattactgccttactggtagatcctatttcgctacagcatacttctacctttcaagttggataactaaataatacacattaaatgagcccatctgtgactgtaatcatatactacctccgtctcaagatatagcaaccagtactagatgggatataatctagagggttgtgctccttccggctattgggtgtggcaactccgtggcatgcacaacaatataagtcattagtgcatgattaattaagaattaattattataaactcaaaaattgggtttatttgttttttagaataaatttgtatgcaaaaagtttttgcaaaacacacactgcttaccagttcggaaaatatgctaacggaaaatgatgaagttaccatgcttgaatacaggcgaaaggtagtatacgaagaacatatgaattcatagcctaataataattcgataatatcacaatacaattgtgggtagtgtttttgaatcggagaaacggctaaattctgatgcgccccaaaccattatagtaccataacacagtaaatcgtatcaaccatcaaaacataagctcttaaacgacagaaaacagaagcaaaagtgacagacctgcctgacgtggaccgtcgtctcgccaatggcggagcagatggcggcgagttcagcttcatattgagcgatcgcctgccgcagctgggcgcgggagcggttcgcctggtccaccttcctcctgtacacctccaggcactcctgctcgagctccagcagcatcctgtccctcgcggcctcgggctccccgacctcgtcccagatgacctgcaaccacgagcgatctgaatcagcgagagaccaacaaaacctgtcaccgccatcgcggcaacagcagatcagtcgacagcgaggcgcacctggagctcgtgcatgagggatccgcatatggtcttcatcgggaggaggcgctccttcggattgccgctcctcgtgaggacgataccacgcagcctgcaggggaatcaaacggggagagattgatcggcgtcagaattagggttggcacgatcaaccagcagtaacgcctacggcctcgagttcactcaccagtctcggtggctcggctcgacggagggcgatacgggaggccgaaacgagggcaccgctgcgtcgtcctcggcggcggcggcggcggcggcggcggcggcgtggatttggccggagacggccgcgcgattttgggggaaatgatgagggattgaagagaattgttcgaaacaacttgaaaatgggagggagagggggaaacgattttggatcaccggatttgggcggcacaggctgatagatatactgggccgggctagtcactcttgggccttttattttgaattgggctggagatggaaagttttactgatatgggcctaggctaaacaactcataaagctgttgcagattatgctgagtggtgagtagtgagaaccaaactagtagaagtacatagtggggcagtaaaaagagttaatgaaacaattaaaaataatttataggtaaaaattttgtatctgtattacggtttaaaagctaaggttgagaagttgactataatgaaaaatcctaaaatcaattttacaattaagcacaatcattctgattgcaaattcttccgccggagaagcgaatagccacaaccaaagcatggatatggaaataataaagaaagaattaccaactaaaaacaagaactcaatgatcctatgcttcatggatctgcattataaaggacacatgctttcgaagttccgagtacttttgtgcagcacaatacaatgtcactgcggttccttattaggggtaaaaggagaaaaggaagacaaaaaaacatcgctcatcagaagatgtcacccctgcttgtaatcacgtcctggctacagaacgggcatatagaaaccagaatccaaaaatttaacttgtacagaacttaacaatgaagagatcttatgaagccgactccttggcgatcttctcagctttagcaatgacttcctcaatgcctcccaccatatagaatgactgctcgggaaggtcatcatatttcccatccaaaacaccctgcacatcaacagaaactttagcaaagagcacacaagcaaacatgaatatacattactaataagcataatgaagttctgtaatatcgcgtgtctacaactacagatctagcaaaatgtgttactgaacaaaggattaaaaaagtgtagatggattgtactgtctggtaaaactagtgtattcttgcaggcacatactgattcatcaattataaccccaaaaattgcaaaatactgtaaccgtagtggtactgaactccaaaaactactatgcatattcaattctgacctggaaactgttgacgctctccttcagctccacgtacttcccaggagcacccgtgaaaacttcagccacatggaagggctggctcaagaaacgctggatcttccttgcgcgagcgacggtcaacttgtcatcttcactgagctcgtccatacccaaaattgcaataatatcctgaagattcttgtagttctgaagaaccttttggacaccacgagcagtgttgtagtgatcctcacccaaaacatggggggagagcattctggatgtggagtccagaggatcgacagcagggtaaataccaagctcagagatctgcacagatagcaaattcaagtcataatgaggacattattaacacgatgtattaggtcagttggacaaacctgtcgtgacaacacagtagtagcatcaagatgtgcaaaagtagtagcaggagcaggatccgtcaagtcatcagcaggcacataaatagcttggacagatgtaatggaacccttctttgtagttgtaattcgctcttgaagtcctccaagatcagtagcaagagttggttgatatcccacagcagatggaatacgtccaagaagagcagacacctcagagttcgcctgacatcaagattcaagattaatcaaaaccataacaatgggacttagtagaaacacctacgctacgtatactactagtaattcttttttatgcagagtagaaataccaaaagaagagatgtcttgcataaattacctgagtgaaacggaaaatgttgtcaatgaacaaaagcacatcttgtccttcggcatcacggaaatgttccgcaacagtcaaaccggtcaacccaacacgagcacgagcacccgggggctcattcatttgcccgtagacaagagcacacttgctttcactctgcaaccaaaattgatatataagtagcttgcacatgtgtgcgtcccacagaaaataagatatcaactaaaattacctgtttgtcacctagcttgatgacaccactttcaatcatttccctgtaaagatcannnnnnnnnnnnnnnnnnnnnnnnnnnnnnnnnnnnnnnnnnnnnnnacctggcaaacaaatcatcatcagtcaaatagaacaagtgactgaaatttgaacaatatcacacatgagactatgtatagatgcataccatgggccttagcaacattgttgatcaactccataataaggacagttttgccgactcctgcaccaccaaaaagaccgatctttccacctctttggtagggcgcaagcagatccacaacctataaaattaaaccaatgtacagcaattaggactctaaatcatggttgcaactatttaccattcaaatacttcagataaccacaggatcagagaagggtgggacaattataccttaattccagtaacaagaatttgctgttctgtggcttgctcaacaaaagcaggcgcctcacgatggatgggaaggaagtggttcgttgctacaatagaagtcagcatcaataacaaaacataaataagaactggacacacaaattcttaaataactatgaataatgaagacatggaacatatagtaacttacttatgtcacccttctcatcaattggctcaccaataacattcatgatacgtccaagcgtggccctgccaacaggaacctacaaagaagaataacttccaagtcaaaaacatagtagaacacattatatatgattagtttcaacttccaagacaatgctacagatacaaggttcagcaactctaattataatcagaatttacacgaatgcatcagcagttctctgaattcagtaatgcccattttatgctaaacaattggcaagggtattaaataaacaaaaactggaatggattcctagactatgacgacaattttcattcaagcaaacagtggaaaagttataccaaccaatgcatgttaacctcacaatacgccaatacggaaatgcaacactggtgaacataatgaattctaatagactctagatgaccaccacaaaccaaaaggcagcactttataggggaaaaaaagtcaatttcttcactagcacgaacagaccaccacaaagcagccaacagtctaccgataaaatgaacgaaatggaagggcgatcgctcgccactcagaactgtacacctagatcaaatctgacagcagtagatccacatttcgtcagatctggtcggagacaacacgaaatgaaatgtacgatcgcaaacaaggatgagaagacgggcgggggggcattacagtgattggggagccggtgttgaggacgcgctgaccgcggacaagcccctcagtcccgtccatagcgatggtgcgcaccatgttctcgccaaggtgctgcgccacctcgagcacgaggcggatgttgtggtcgagcacctcgagcgccgtgaggatgggaggcagcccctcgtcaaaccgcacgtcgacgacggcgccgatgacctggcacacctgcccgacggcgccggcgccggtgaactcgtcggtgatcttacctccacccgtggccttccccgtcgcgggcgcgggaggcgccgcctccttcgccgcggcggccgtggcgtacgcggcggcgcggttgaagaggtaccccgatggcgacggtcggtggagcggcccgcgcgggcgcggggcgggcgaggccccgcggagcctggaggcggcgcggacgagggaggagagggcccggcgagtcgccatggccgggagatcgccggagacgcggggcctggatctagggttagacttttttttttttggttgcggcggcctccgcgagaagggaggaggagaggaggggagcggagtgaggaggagagtgggtgcggtgggtgctggagatatcgacgtgtggggggattggcgggtggacccggtctacgggagcccgagaagcgtggaggagcgggggttgtgtggtgcatggtgggctcagttcatggaatggattgcaatttttttggggatccatttggtagcttgatattgcagctggaaatctggaatataatagtgttcctttttttttcttcttttttattttgggctgtcaactgtcatttggcactttttaatggcatttgatttttgctatgttttgatggtgacagaggatttcggtttttattgagtagatgatgacagcagatgattattttgaactattataagttcgaaagtcgaactaaaactttgcgtaatcttcgatcaagccgtcatgtttagctattttctagtccaaattcgtggctaactttggtaacagcatcttgttcgaggcctgtaaccttttcttttttagaaaatcgaggctcgtcactctgtcagcacacaaacgttgaaggaataagttcattttaggtccctctatttgtcgcccagtctgattttcgtccctgaactgcaaaaccggtacgacccgtccccaacttacgaaaaccggacaaacgaggtaccttgacgattttaagggtggttttggctgacgtagcgcctacgtgtccattttgactcggtcttcatttgatgtggtactgacgtggtgcttacgtggcaatccgatctagaaaaataataaaatctgtgggacccacatgtcagtcacataaaataataataaaaaagatgggacccacatgggccccacatgtcagtccaactcacctcacctcttcttcctcctctctccccatctcccatctcttcatctctctctttccaggcgacggcggccgctcctctccctcccacctgcaggcc

SEQ ID NO: 6611 - DNA, 593 bp, Oryza sativa
ctcgatcgattgattctcgatccatggacaccttcgacacgcccctcttcactgggttccagatcccaattaaatgtattcaagtagaggattaattaattccaatacaaatctcgaaagtctttgtgatttatatgaggtttctttgtgagcactgagcagtgacgagtgacgacgacgcatggttaatcaacaataaacagtgccacatccttaagcaataggaggagattggactacttcttttgtagctagagataatttccatatacagtaccaacatccgaaaccacttttgggagtcatacaaaagttttcaatatttaggacactaaatgcagagtaaacatacttcttccggtttcattttaattgacattttagacaatgacacggtctacaaaatatatctttgaccttatttttctattataatatatgcaataattaaatgcatgcttacttttattatagtgttttgacagacaaatctatatatgttgttatagtttctttaaactaaatatttttaaagttattgatggtcaaagttataaaagtttgaccttaagcttatccaaaacgtcaattat

SEQ ID NO: 6612 - DNA, 954 bp, Oryza sativa
cttgcttacactccagtggcgggtggaggagatgccattcccgctccccggcgatcttctccggcggatcgaggcggcggcggtgaactccggcgcgtccgggttgaggcgctccgagacgacgacgacgagctcctccggcgcgccgtcgtggccgtcgccgtagccgtagccgtagccggtgagaccatcaacgcctcgccagaacccctcgtagacgaactccggcgcgtccgcggagagcttcgtcctcctggcggcgtcgcgtcgtcggcggcggcggcgtggcggtgccaccgcggcacgaactccttcgcgttcgggttgaggctgcgccccgccgccgccaccaccaccctcgaagtcctcgcctcctccgctcccatcacctccatacggtctccgactctccgtccggctgcggctgcggcggcggcgatcggcggcggcgacgaggtcgagagcgcgagatcgcgaggagggggaggggagaagagttggtagatttggcactacgacgatgtgaacgcggcgtgctttatatgctacaaccgcaagcgcgagcgcctcaccctcagtgacgccctgcgccgccaccggtggccacgcacgccacactcaccgacaggtggggtacgcgaggatgtgggccccactgtcagcgaccgcggtgggtcggtgagccggtcgggaggtccaccggtcggcgagaggaagagttccgtctctctgtttggcacgcgacagctgtggaggaggggtgtgggggcggggtgagttgctgacgtgtggccccacgggtggcgtgggccagggcggtcagcgagaggcgcgggtcgggtcgcgtgtgcggtctccgaggtcaggaagtccatctgactaggtcaatgacactcggggccaaccaggggggtgggggccccttatgtcagtgatgacgcgagcgctctttac

SEQ ID NO: 6613 - DNA, 713 bp, Oryza sativa
ttccccgacaggcggccgtaagccgcgcaaggcgcggggaggtgtccagctacggtgggcgcgaagacgtgccgagggtggcgcccgcagaggcgcccagggcgttgccaccggcaaccacaagccggcacgagacgacacctgccgcaactgtggcaagcttggccattgggccaaagactgtcgacagccacgacgcggccaggcccacgtcgcacgggtggaggaggaagagccggctctgctcctagctcacgcaagcatcgagctacctccagcggcaccggccgcagcggctttcctccaccttgatgagccgaaggtactcgtctccctctgcgacggctccagcaacgacaaggctgatgggtggtacctcgacaccggcgccacccatcacatgaccggccgacgggagttcttcaccgagttcgactccagcgtccgaggcaccgtcaagttcggggacgcctccggcgtggagatcaagggtgttggctccgtcaccttcaccgccaagtccggtgagcacaggctgctcaccggagtctactacatccccgcgttgaggaattctatcatcagcgtgggacagctggatgagaacggctcacgcgtgttggtcgaggacggactcatgacgattcgggatcgccgtcgtcgccttcttgccaaggtaaccagaggcactaatcgactctacatcctcagcg

SEQ ID NO: 6614 - DNA, 1685 bp, Oryza sativa
ccccatgatgaggttgtactggaatccctgcagcctcacaactacatccgacaactcgtaataagtggttttagaggattgaacttctgttcatggctaggagaccggtccttgtttagtttacaagaactggagctgtgcaagtgctactacactgatcatctaccaccacttggacaattgccaaacctgaagcagctcaagctgacgagcctgtggaaattgagaagcatagggcctgagttctacggcgattgcgaggccccatttcagtgtcttgagacattggtggtacagaacctggttgcatgggaggaatggtggctacctgaaaaccatccacattgtgtcttccctctccttcgtacgatcgacatcaggggctcacacaagcttgtgcgccttccactgtcaaatctccatgcccttgcagggatcaccgtatcatcgtgcagcaagttagagaccatagttgggctcaggagcgctgtgaagtgactgctgggaacggtggattgcaagcaggtcagactaacgtgcttccctcccttcgaagggtaaagatcactgcttgcccttcactggaggagcctctgatatcgatgcttcgccggcagacggagatcggcttctcctactgggaacaaagccccagcacctctcccaccgacatcgctgattttggcaagactccatggaaagattctggcaaggatagtacctcatgtggatgtggatttctgtttggtaccagatgctcctcttcatggcacacaccatcctatgcatgtaatgtaggaataagtcttggctggttgtccttggtcttgtggtgccttttttcctgtttttcagctttctaggacagcatctttactttcagtttggatgctctaggacagttaggacagcagtttgttgagatgctctaggacagtttgttgggatgctctgctctaggacagtttgttgggatgctgacagcaccctcttagactagcatggctgcatggctgctacaagcagctataaatatgtatccaatcctctttgggaggatatggcttttgtgtttagtgaatgaagaaaaccagaaaattgccccatctcgagtgccatcctcttctcaatgagagtaaccattgaaattctaacatctggtatcagagccacactttcctgtaggctaaacatctcttgttccaccccttcccaagctcggttgagctctcagccaccaccagcagcagcaacaccggctgctcctccttcccctttcccttccccctctccacgcagcagccccccggaggtgcgccatgtccgacgttcggtctcggcgttcggtcgcctcgagcactcggcgtcagcaggacgccgagctcgccgcagcagaagagcgcaggcgagcaacggctcagaccgctgcagcagcagcgagggcggccagactggcggcagcagagttggcagcagccagggcggaggcagaagcagaggcggcggaagatgcggcacgtgcggcggaggtagaggttgagaccttgcgcagcagcatcaacggctccatcgccggcgacatcaccgctgacagggagcttgaggagctggcaagaggaagggcacgggagcgagcagagcggtgggcagcagcccacctccacggcggcggcggcggcccaagg

SEQ ID NO: 6615 - DNA, 691 bp, Oryza sativa
tgaggaattccacccaaaattgtcattgaccctaacaattccaatatatgctatgtaataccgacacagttatctaatgttaacatgaaccgcaagtgattatttactcgaacaaatcgttttcccagcgaaatcatatggggggataggatagtgaaattacttggagaggatttgggcatcgagatccttgcggatgttgaaagcggatccgtagatggcttccgccccgaacctcttcttatccgcccagaacttggcctcctgcgcgcgggcaagccccaccaccaatcacccggattcagcgcgttagggttttcgagggggcgaggagaggggaagcagcgacgggtaccttgtggacggtggcctggatcgggtgctgcggcgcgaggtcgcccttgacgctgttgttgaagccgaagcggagcacgtcgtggttctcgccgacctccttcttcacgatgctgccgctcgccatcgtcgccaagctcttcctcttcttgtgcttctttggggagaagaaaggggcgcgattgacttgtggtgggccaaataaaaacaaaacgaaaatcaaaggaccgaacctaaatatcggttttttttcttcggtgttcgattcggtttatcttggacccctttttattagcctagttgtacaatgcaccagggatttaccaatcttttcact

SEQ ID NO: 6616 - DNA, 671 bp, Oryza sativa
ccggctggggtggtgtcgacgacgagctcgtcgtagtcgaagtcgtggcccgagggtgtgttggtgttggagtcggtggaggctcggggactggggtagacacgctcggtgaagaagagctgcctactcccccagctccctcgaagtggacgtactcgatggtgaagtcgtcgtacgtcggagtcgaaccatcatccaccgccttgtcccatacccaccctcgcccttcgtcgaacacaacatcgcgcgtaatgcgcacacgctgtgtctccgggtcgaggatgcggtaggccttcgagccctccgcgtagccgatgaacacccctggggtgctcctgtcgtcgagcttgccgatgtggccaagctccttggcgaacgcgaggcagccgaagacccgcaggtgggagaccgccggcttgcgcccatgccaagcctcgtacggtgtcctgccatcgagggccttggtaggcgagcggttgaggatgtaggcggccgtcaccaccgcctccccccagaagatggccggcatccccctctgcttgaggagggcccgagccatccccacaaccgtctggttgcgccgctcgacgacgccgttctgctgtgggctgtacggcgcggtgtagtggcgctgaatgccctcatcagcgcagtacgacgcgaactcagcc

SEQ ID NO: 6617 - DNA, 1476 bp, Oryza sativa
gatagcccgagtcaacaaggtaaaatttccctgttagcataaacataaaccatgagacattattttataattgatgctagttcgacgagactattaaacggataagagaagttaccaggtggtggatgagggaagatagcggcatatttgcgcaaagcatcattgaacaccctcatatcatgtgccgatccaggccaccccgcaacaattaatgcaaacctcatgtcaaagtcacaaatggccaagccattttgcgtcggatatttatttctacccacatgttgaaccacctttgatgcgggcacaactactggtatatgtgtcccatctattgcacctatgcaattgttgaaatggggctcaaaccgatcatcaagtagtcttgggtgaatagttgtgaagtttgggtctctaggtttgacaagatcttttgaaaggagatagatactctgcaacacttcattgaattttctactaatttttccttttgacctctcaaatcggttcttaacttgaacaaatgattgtggagccccaatggtccacaaaaacatttctaaagcttcaactgaatccatcttactagttgacttcagaccataagatgagaccaacaaattatgtaacctctcaaagagtggcctactcattctaaacatgtcataacaatcttgtggaacttcaaggtttctcataacccaagcatgacccgctaaattagcttttctatacttggacttgttcaaataattttcagcgtagaacataccaaatgatgtcaacaccggtccaaattttctcatcatatctagttgtctgctagcaacaataatagtttcatcctcctcctcatcgtcatcatcacttccatacatgcccatctacaaacaatgcaacaaatgatatcacctcaatagtcacagaaagaccatgttgatggatcactaaacagtagttcatccaatcaaaattaaggcgccatattacatggccaggcagtacataagttcatgcgaataaataagtagcaatcttgctaatacatattgtctgacaaagtaaaaacagagataactagttcatgcatataaataattagcaattttctactgctgcccttccttctcgcaccatctctgcaaccaagagagccttcccaccttggtggtaagagtcttgaacatatcacgatgttcagctttcacaaataatcttgtagccatgaaatgctccgcacttccttctgctgccccgcaatccaccaccaaatccatcacctccttaatggaattgaacctaaattcaccttgcatcaccttgttggcaatatcacaattggtatccatagtggtttgaatattcctcattatcctaaccatggggttcttaaccttcttgtatggactagtggcggtgctggaagaccctcgcttcactggttttttacccaatgagcaatctactggtgtgtcgcca

SEQ ID NO: 6618 - DNA, 606 bp, Oryza sativa
cctccttccttcccaccccttgccgccgctggagctggctgccggaaaccgtgtggcggcgggcctcctttccttgggctctcgcacggacgatggatggcagctagatctaagcgtgacgttggttgctacggcagcggtgggacggctttggatggtagccaaagccggcagcgctaggagaggctgcaacagtggctggcaccggttaggcaggatgcggggcttctgggttggatccgccggaacgctgtggtgattgctcgagtgcagtcggcagagcagctgcatgggcgtttggcggtcgtcctagtcgcaaaagtgggccgcgtgggcggtggttgaggctgtgttcctggctattcaagttggcatcaacggcgaccgcagccctgccgcggtgagcgactggatctggtgcgtcctcgctaggggtagggatccgagccacggggcgtgctagcatccgagcagcgagaggactcctcccaaccgcttggacgttttggagctccttgtggtgcatggatggtggcaacagggtggaggtgcgaggtacgacaacgaccaaagctgggcatctgcgatgatcaagaagcagctggg

SEQ ID NO: 6619 - DNA, 716 bp, Oryza sativa
ttgattgtttgtagctccttacctttcaagtggaaacatccaacggaattgcacaggaccaccaagtcgagcctcataaggtaaatgcatcatcaaatgttgcatggagttgaaaaaaccaggaggaaatatcttctccaatttgcagatcagaataggtatgttctgttccaacctatatacattttccttattaagctctctggcacataattgtctataaaagaagcttaactccgccaaagtcacccatatactctcaggaaggaagccacggaatgctgcaggtagcaaacgctccataaatatgtgataatcatggcttttcatgccaaaaatctttttctgtgccaaattcaccccacggctaatattggctgcatatccatcagggaatttcagttctttaaaccacttgagaatggtgaccttatcattcttatcaatacaataagatgcctttggcttatgccacttgccattagcttttagttccaaatgcagccatggtcgatggcaaatctcctctaaatcttgtcttgccttcacattgtcattggtcttatcagcgatgtcaaagcaagtattccaaatagcttcagcaacatttttctcattgtgcatgacatcaatattgtggcgaagcatcaatttgctgaagtaaggaagtctccaaaaacatgatatatgtctccaattgtgctttttcccataat

SEQ ID NO: 6620 - DNA, 698 bp, Oryza sativa
ccgagaaacacgcggcatggcgtgccgcgatgcagtcggagatggacgcggttcaggagaaccgcacctgggagcttgctgacctccctcgtggtcaccgcgcgatcacccttaagtgggtgttcaagctgaagagggatgaagccggagccatcgtcaagcacaaggctcgcttggtggcacgcggtttcgtgcagcaggaggggatcgactacgacaatgccttcgctcccgtggcacggatggagtccgtgcgactccttcttgcgctggctgctcaggaaggctggggcgtccatcacatggacgtcaagtcggcgtttctaaacggcgacttgaaggaggaggtctacgtgcaccagccgccgggatttgtgatccccggcaaggagggcaaggtgctacgcctgcacaaggccctctacggcttgcggcaggcaccgagggcgtggaatgccaagttggattccacgctcaaggggatgggcttcgagcaaagcccgcacgaggcggccatctaccggcggggcaatggaggaaatgccttgctggtgggtgttacgtcgacgacttagtgatcaccggcaccaaggatgcagaggtcgcggcgttcaaggaggagatgaaggccaccttccagatgagtgatctggggcctctctccttctacctggggatcgaagtgcacccggacaact

SEQ ID NO: 6621 - DNA, 715 bp, Oryza sativa
gtaatcgtattctattatggttggatgtaatgactgctagatgctttattatcctttatgtcagtaagttagaccatatgaatgttgcattttgatgtgatgtagtgttcttttcatctttttgagtgattgccatgtcatctagtctttcttcttgcatatcactcatcattcaagcactcacatctgcatcttatttgtttgagggtagtgtgaagtttcttttgagctttccttcatttttatgcatattgtattcatctcatttcattatatgcatatctttagggggagcttcacacttctctcatcattccaaatttaaattctattatctttttgtgtgctttaaccatgttgtcatcaatcaccaaaaagggggagattgaaggtgcacttaaaccccctagtgggttttggtgattaatgacaaggtggttaaaggggactaacgtgtttatcaagtttattcacaggagtttagtcccacagcaagttgtgatggctaagaatgcaaggagacccaccaaattgaatgttcctaagtgtgaaaaacacagaaggtgattagactaggtttttcactttcgaaattgagtttaggaaaaaccgtactattaagaggggtttcaagtgtggttctagggtatacaaagtgctcttagtcatatccatgagtcaaaatatttttagaatcatttttgaaaaataattt

SEQ ID NO: 6622 - DNA, 731 bp, Oryza sativa
tcctgcagccctgcttgatgggtgccttacatttaagaagagaagattgaaggaacatgaatatgaaacttgtaaagctggtgctgtaaggcttatttctatagttgccatgggtggaatggggaagacaacactagctaggctcgtctataatgacgcaaggttcaaaatcactttgatatacaagcatgggtttgggtttcagaagtattcgatgaagtcagactaaccaaagcagcaatcgagtcggtcaccgctaaaccctgtgatctgactgagctagagccactccagaggcaattgcacgaggaggtcaagggtaagaagatattgcttgtgtttgacgatgtttggaatgaggacaccatcaaatgggagacgatgaaacggccattttctgctgttgctacagggagccacatgatcatcactactcgcaacgagaatgtctccacaattgtgcaggcgaagaaggtaattcatctaggtgggttgcaaaaagatgacagttgggcgttgttctgtaaattgtcattccctgacaatgcttgtagagaaacagagttgggaccaatcgggcggaaaatagtagaaaagagtgatggagtgccactagtcctgaagactctaggtgcaatgttatctttagacacaagcttggagttctggaattatgtactgacaagtgatctctgggagctgggccctggatgggaccacatccttccaat

SEQ ID NO: 6623 - DNA, 564 bp, Oryza sativa
gaacctcttgccacccccgaaaccatcgagcctgacccggtgaaagggctgcaagaattttgtgatcgagatcattcaaaataacctacgaaaaaaaccatgttgatggagtctcatcggtcattgctcgggtgaaggctggagagactacatactccgcaacaaaatcaggtccctgcaagttggcgaaaaagttggcatcaaaggctgtgcttaaagatctgattgctggtcacaaagatacagaggctgctgcagtatagtgatgcttaactatttaagcgtgcaacagtagctaacaattgatatagatagttgcgcacaatagaaaagttttggttggattcatacatgtaatttggaaatgctcctttttgtgtgctcgcaaacgatgcgtgtgaacggcctcatgaattctggtaggttttcatgcttcaaacttacaagtatcgcaattttgtaaattacaaatacgggcatagcacacctgcccatgccatgcagtagtttttttttcctcgaaatagtagcattagttgtatattactcatagcatcagattgt

SEQ ID NO: 6624 - DNA, 2833 bp, Oryza sativa
cgcgccctaccgggacgagctccgcgcccttctggtgggcctggacgacgccgccgtgccgccgcggctgttcgtggacggccggtatctgggcggcgccaacgaggtggtcaccctgcacgagcaggcgcgcctccgcccggtgctccgccgcgcgccacgccgcggcgcgggcgacgccgcgtgcgccgtctgcggcggcgcctggttcgtcgtctgcggcgcgtgcagcggcagtcataggctctatgacgccgccgccgccgccggcggccgcgtgccgtgtaccggatgcaacgagaacggactcgtgccatgccctctctgcagctgaagctgaaccggagctcattcttgcaagcactgcatgtaaaatcaattttttttttgtcatgtcatcaggatcaggagaaattcttttgattgttttatgtaatttatcatgtgtaatctatctccaccaaccaaattaagcaacaaatcagaggctccagatcgagctttgtcacctcgaggttgaattgattgctcccttctttcaaaaacaggctcttgaacacatcaaccgggtattgcctactagtagtagagtactagtaatttcaccactgcatccaggggaattgcctggttgtgagtacagagaaccaaggaaatgaaatggacttctcaaagttatctcttttttttttatgttgattcaattcataaagcaaaagtgtgtctatttgttagtaaaacagattaaataaattctttgatgacctcacttttccatctccctccctctccaacttaccacagacgttgacgctttctgagaagactggcatggcctcctcattcctcaacaatcaaacctctactagtaattcttcacaagtcaactgctttttggttcttgtccaagtttaatacgtagtagtgatcctcagaggttgtcttaaatacgttttgtcatggtttcttagaagatgctttccttttatttactcctgccattcccaaatgaaagtcgttttagccatttcaactcttttctggagcttctaccaccgtcccgtagtttcgtcttttcttccatttatgccattgttaaaaccatgttcagttatcatctaagctgaacatgcctatgaggattcttaagctgtgaattttgcttcttttttttttacaacttgtgttaaaaatcaaggatccaacggggccatcgtttcgcttattctcggaataagcggaacggcatatttgcaaataaaaaataatttgtgaataaaacttttatatatgttcttagcgatctaaaaacaaaggctgaaaataaacttcgataaaaaaaactcaaaattagctacaaatttaaggttgaaaatttaaattttggctgataaacataagcacaaacgaaaagatgataccataaaatatttactcttacatctcataattatactttttttggcgtgaatttaatggataattgtaactctgcttctctcgcttgagtgggccttgttacgagacttggagtgaatcttcctagattttgcaagagtatttggaacatgtctgcatcagaaactgaaatcaggaggttcctgggtggattatgacatgtaactaattaaaatctcagagaaagagccaacattgtgacactgacacctacattaacatagaaacttttttttgtgaccttttgcaaggttcaattacacctaattaacctgatgtagagcttcctcaccatatatgaaatgtttcttttccaagaactgagttagtcaatggctcctaaaaaaaatgaactcgaagaaacaggcaatgcaaaggaaagacctcggcagtcacccttacataaggttttcaaagagtcatgagaaattaaactgtaactttcgtcgaaacgactccaattgagttcacccgagactgtgactccgtccagtgtccacattgctcacaagtagccaaagtaaccgcgtgtgagaagagatggtagacaacatattagtcattgtttatggaggaataatctgaatattctctcccaatactccacccaatccctttagacaacttcattgttaagggagacatttgtgatgcatttcgcattggatactggtgtaattcaatcgaagaaatgggggaaaacttcacacgattgatgcaaattaaagcattacaattgggaaggaaattaatctagcaaagtaattgaaaaattttgcaccatttcacccgcgaaataaagttgagcttctctgtctctctggtaatcctacgtcgataaatgctctgcaaatcctgatgagtaaattaaccggcggcggaggcggtggcggtggcggaggaagcggcggggcggctcgtccgcggcggcattgggcggcagccaggcttgggaagcggcggcaacggcgacagcccgccgcggcacagcgggcaccgccggtgcttgcggagccagcggtcgatgcatcccgcgtggaagaagtggccgcactgcaccacccgcacctcgtcggcgccggcgtactccgactggcagtacgcgcacctgtcctccccttgctcctcagccgccgccgccgcccgcgacgacgacgacgccttcttggccgccgccgccgccgcctgctcgtacgtcatgagcgtggcggccccgagcgcgcgctccacgtcgtccacccgcgccgctgccctcttcctccaccggccgccggggaacgcgccggcggcgagcacgacgacgaccgcccccacggccaccaccccgacgagctccacgcgaagcgccgcgtcggggtccatccgcgccaaaccg

SEQ ID NO: 6625 - DNA, 1236 bp, Oryza sativa
aaactccccagatcattcaagaacattaaggttgtgtaccaacaggatggtcttcaatgaagaaggtcgtcttgtttcatttaaaggtgatattgtaatcatcatttattcatccaatgaattatcatttgaagtaatgcaggatatatgcattaaatgaattctctacctccctgaagtttgttgcctggggtatgggattgctgttacttgacaatatttggctcttttgattgagacataatttgactggcatattcatgtcaatatggatgggtcaatccctttttttctataccatcttttgcaattgatgacttaggttattgattgtttgtctacatcaagtacttaaagacctgtgcattgaaacaaactatggtgtaatgtaggaaagactattcatgttctaaacaaaaatgagcatgccttggacatggcagctccagtgcatgacaatttgggtgatccaaatggatatactgatgactattcgttggtgaagaagaggaccaatgtgcttctccttggagatcacattggcgaccttggaatgtctgatggtctaaactatgaaaacaggattgctgttggatttctgtaagtagacttccttatcatcttgctttttgcttaccatttttagatttatcttctgctgcatctatagcttagtttatccccatggatctagactgtagagtactgaatttttactttgatactgtgggcatcttggtgccagtgaaatttgattagttattccgatgcaatgagcgaagttctgaacaatccataggttgcattgtttctgttgaacatgcttttggcctaatatctttcaattgtaagctctcattggaagttctgagcaaatcctgagacttgtcaacgcatgaggaaatacccaaactttaagttgaatttttcattcccagtcatctttattaggcttattgtgttgaataagtgcaattagatgcaccaaattcattacttatgtgcaggtgtcattctcttctaattcaattgctgtacaagattaactaagctaagctgtacaagataaacaaagtataggtttggtccgtaagaactctctctaaagaaaaaaaaagttttttttttggtttgaaaccaaagttgagcaaccacagaaagtccatgtttgtgttctactggctttccttaatcaatgcaaagccaatgttttatcacatgcaactcgcccactgt

SEQ ID NO: 6626 - DNA, 747 bp, Oryza sativa
aagcaccatcataattcaaaagccccatgggaataagttcagttgttaactgaacctctgaaaacaagtagtgcctccacaagaaggatcagaattctaacaacttgatgctctgttggaagcatatataccatacgtataaacaatagcacagaaacaggtccaaaacatagctaacacatgtgcattactcattgattagtaacacaaggttcttgatggttacaaatccggcacttgagaaaaatatgtaggagcaaacacctatttatacaaaatgcaggcagaaagctcctaggcctggacaaaaacctatagtagttagttcatattaggcaggatacgagcgcaaacataaaggacacaaaatctccagcaagtatgcatgcagtggactgatgtcaggacagatcaccatcaggaagctatacaacagcaacagctggtgctagcgcgatctccattgccggtggtggctcaggccatgagaactcaaaaggggcttcgatggttagaatttgaggggctgaggtaatctcctttggggatgatgcagtgtagtggaactctatttgaagccggtggtgcaatggcgtcgacgccatcaggcctttcttgatgtcaacctgtagttcccggattgggatggctgccaagaaactcttgatatactccttgcatgattccttgccctttgaaaccagtatgttctcttcagtgccatcttcactgtcctgctcaaccgag

SEQ ID NO: 6627 - DNA, 2287 bp, Oryza sativa
gacagtttcaagatcaaagtgcttgtcaggaaaacgctctcgtacatcagattctcacaaaggtttctccactctaatgatccttcacggattaaactgtcaaattgtgattgtataggcattatatcctggtttgattggaaccagtccgcaataacagccacaagtgctgtgcaagcactctccccagcagcccgctcacttctctggtctattgatgcaaagaaaacatgggaagagagcttcagatggccatcacggctaactatctctttcaattcccaattcccaacaacgaagttgtcatcaccaaattctgaaaccataccattaatggacccatcttcaccccttgatccctgcaattgaaagatgtacagttaagaacatgtatcacagacactcaaaactagttctatgatttagaaacaagccattatttaaagatgcagatgatgaattgtaaaatttacctctgaaacagatccatcagaagaggttagcagccgtcgatcatagtcaatatcatcacctccctcttctccatatgctttcttcaacagaggttcgcctttgccttcagtgatcgcaaactcaacttcctctttctccaaggaaggatactccgttttacagttggcagcatggtttcctcaacagttgatgatggctttccctctacatggtaaccggcatcagatttgcggtgactataatagatccagtcctcatgctccccatcaatctttgcatgagcataaactaggccgcgacatagttgacagactgcagtgagccataactgaaggacttcctgacagttgaatccccaacttcatcttgctgtgccctgtcatccaaatcgtcatccagagactcgatgtcacatggatattcagcaccatcactgttaacatagcatttttcttcactgctttcatcatcttgggatgtcttcttggaccttcgtgtcgacaccagatcagtgaggattttcacctttctcagcccggctctgataactgaaacctcatcttttcctactggagcagaatcaccagaggatggggataatggagcggccatagcagacctttgtgaagcatcagatgtttcctgaaaagcccttaattccaccatacccagggtgagctgcaagaaagaaaaggttttgattgtcagaccagatggaattcgaacacgaattgtgaactaaagcttgttagcaccacaaacttacatgtagcgagggagctgactcagctgaaccatttggcacggacaatgggagaattatctcaatattctcttcggcggcggatgcataatctgctaggttaagggaagcagttccaagaattgatggcttgatctttggtcctctgttggcagcctaaatcgagagagaacaaatgaaagtcacagtcagactcgctagcagaagtaactgaaaacaaactcatcagcagaaatcgctcaagaaaaaaatgtgtagaacaaaaaaaaatgcatactattaaatgacacgtttccgatggccttgacaagaaccatcttgtccacatttgttcacaccttgttcgcattctcatataggtacaaggttattatcaagaagttctaactggttcttattaacgagaatatctcagtgcagaggtaagaaatgtaaaattttccattatacaaaatattttgattattacgcgattcatagccatcaactactattatattatatatccattcattcttcagaaccaaaatgaaatctttttcccatgtaagacgaatctaaaacacacaaatcatatcagcaaggagaagcaaaaaaaaaaaaaaagtagccaataccctatccatagaccagacaaattaaattaagtaaaattgataacatagataggtaacagtgcaatttttggagcacaataatagagggaaaaaaagaaaacaacaaaaaagaatttcaacaaacaaatctattctgagaaagtgagacaagaaaaagacaaaaagaaaaaaaaactatgatgccaaaaaaatccacataaataataattatagtcttgtctctaaattcatgtgaagaacatagacggtctactactagtaggaagaagaagaaaatgctcacagtgaacacggagaaggcgagctcccatggctggaacgcggcgtgctcccggtgcgacgcggcagcgagcgtcaccggctctcgaactcctcctcccacgcagccaccaccacgcccggcgcgtctctggcgcccgcggcggcagcggca

SEQ ID NO: 6628 - DNA, 911 bp, Oryza sativa
tgaaagaaaggggtaagagacagaaacttgtgcgtgtttcaatatattgtatatatgaagaagcttcgttgttgtcatcaattaatataatatattagtgtactcgttgtttttagtgattatttaccaaatatagtgaatccaaaatactatgtgcatgttccaaaggagtatacaacacaatttgcatccccctttaaactttagaacttaacccaaatctgcaacagcaaaagaaaaccaaacctccaagaactcaaagagcttcaccactccatctctaaaagtgattttagcatcagccacagattgccttatagcttcatatgtaagtccaccttcgataaggagagcatgtgtcttctcccacctgtagcaagtaatggcatcaggactgattagacttcgtgaataatctgcaggcaatgtgcctacactgaacattcaatcatggtatttgctggacaactgatgaatggcatggaaatatcacaagcgcatcaagattgcacaaaatctgaaaaaaaaaaaaagaaaggcttccactccgattgcaatccatgcaacacatttaagcttgacatatgaagaagcataagcatcaaaatcaaatgttgtatgcagcaccactctcacttcgtcatcacttaaatgctaaattcccaaatatgtccaactgggacttgagaacttgaccacaacagaatccacctgatcggtgtaccaaaggataatagggtggaaatttgcagcactactcactaaactacttcctcaccattcttccatgagcttggccttctcggggagcgggatgtcggggcagatctcgatggggtggtagtgctcgaacagctcctccctcttggcgtcgtactcctcgttcccctgcctcagcaacccatggctgc

SEQ ID NO: 6629 - DNA, 3100 bp, Oryza sativa
tactccactgttaggcacctaggccacattggtgttccatagtatatacattgactgttttacactaggcaaattccacacttggccgtcatcacattccatatttccagcaccagcagtatatttaaaagtaggaatcttctgtttcataaaaaaatacaaatattaagctgacgaagccattataatattttaactggaagtcgcttaacctttttttcctttatttatattatttcaggtgaattctgctgctgagatcatctatgaccttgttgatccaaatgctaatctgatatttggtgctgtcatagacccatcactcaatggccaagtaagtcacagacaaatttatcttgatatagttttcttatcaaatatcttgaaaatatggttcagctggtgcataagtttatacttgcagctgttataaaccttcactcggtgccatatacaatttttttcaatataattttcttgtccaatatacctaacatcgtggtccaatactccagttatgtgccattactcattagtttcgacaaatttgcaactcaccatttggtttgtacctgaaattatgtatgcacataattttgtttctgcacgcaggtgagcataaccttgattgccactggcttcaaacgtcaagatgaaccagaaggtcgcaccacaaaggtaaatgcagttaaataactgctggcccgagttgcacgacaaaaatacttacctggtttcactttggcaactgaagggtggccaacaaacgcaaggagacaatggtcgacgcccatcctctgcagaaggcagcatgattgagattcctgagttccttcggaggagaggaccttctcgcttcccgcgagtctgactgcccaggctcccttcccttgcccagtatctatgcttatcagcattctcctagatcagtcgcctcatgtaggataccaggcatgtacagtactgtagttgtttggttgttcagttttgtttactcccttatgttctatattttgagatcttactgttaataatttgtagcaatgagcttgctaatgctatagaaatcgttttatcccagtaggtcaaaatgatcatatgcccctactcaagttgtgttcatctcacgaggcttttactcggttgagagcctggaggttcctctgttttatcgacattgtgtgtgcattgcctgacaagcatggcaaatcgtatcccttaattttggtttctatgccataatcactattgtcacttggtgcttaaacttaccaagcactatgattatgagtgttcacttcggttaaaatacaggttcaaaagttgtgcgtgcctatgattggcgaaattgaatcagggataacagtaacgattcaacgacaacggatataaaggatgtttttcatgtcgttaacctgtgtaaaaccattgagaccatttgaacaatgcaaagagagaatggcctcctgggtgaaaattgtacaataaagcgctaaaaacgaaccgatcatctttagaacgacagtttttagagctgtttgctttggagtggcacatatctttttttttacttgttttaattgatcattttttatatttttacacgataacctccctcagagcaaccttgccccacagacactagaatatacaaaatattactttcagaatgtacacaatattgctttcgcatctttattgtatttggcaaagatgtgaacccagaactaaagcacatatatgtttgttgtattagatattcggtgcagtaagaaatttctcgacaacgaaacaaaatgaaattcctcgactgaattgcaataaatacaaagcaattccaagtgaatccaatacacacagatatgcgtagaatattatagctagaatataaatgaggaagcccattttacttgaactcaccagcttatcagtaaactgaacggaaaataaatgagccagcttcatgtattcaggctattataagattacaatacttaacaaactaaggcatgtatggaaaaacaaaactgaagtgaatccaggtaatacaagaatgtttgcactcaactatcaactgcttgatagtgcagtcaaacattcaatcctcttaaacaggatttctgcctaccatggtagttgattacttgattgtacattctgttgctcactgttccctgggtgttcatggagcgacagactgtcagcgaaatcatcttgaagcccatttgcaacacaagctccaatttcaacctgtgattattcatggagttgatagactgccaccaaaatcatcttgatgaccaattcgaatgcaagcgccaacttcgaccctgtgcttggtacctctatccctttgcgcgtgatcggtatcatccgcatcctcatcatcactgtcctcatctctagaagcaacaccagcttccatatctttcttctcaccttcctcatcatcatcatcatcatcgctgtcctcatctccagaagcaacaccagcttccatgtcttcctcctcatcatcatcatactcttcgtcttcttcatcgtcattctcgccctccgcaccaaactcctcccctatcatctgctcgccgcgaactgtcttccgacccttgcccttgcgcttcccggcctcctcctgccccatatgcatcaaatgcaggtactgataccttatccccatcatcgggtgcttgtcgaccagcatatgccgccggaatgactcccggagcaccaccgtctgcgtcctcagcttgtgagataagtagaagatccccgggtgcctcgccaacaccttcctgaaccccggcggcagccgcagggcctcgccgagcttcaccagcacctccttctccatcttcttccccacggtgaggctcagcacctcgtgcagcaccgccgcggtcctcttctccgtgatgtcgctcctcggtgtcaggtgtgagccgtcctcgtacggcgagatgtatggcagcctctgccagtcgtcgagccacttgcgcaccttcttgtcgagctcgaaccctcgcgggaacgagagcgggaaggggactgtgtcgccgaccttgtacccgccggtgcgctgcgcgtaggtctgcattgc

SEQ ID NO: 6630 - DNA, 24448 bp, Oryza sativa
  unsure (1)..(24448): unsure at all n locations
aatattaaaaaaataaatttaaaaattcaaaactcgtgtccatagaagttgggctgggccgtaggccaactcggcccacaaaaaccaccgcctcgtctcgtcgcctcgcctccgcttcgttcgccacccttccttcgattcgcgccgccgagagttctgtgtctctctcttcttctccttccctacttcgccgccacgccgtgcaggtggagatgggaggcggcggcggcggcggcgggaggaaggaccgcggcgaggggctcggccgcgcgctgacccggcagcggaacaaggccgcggcggcggccaaggagaggggccacgcgctcgccctcgcccgccgcgcgcgccagccgctcgagtccgtcatcgaggtcagcgacatcgacgccgtgctccagcgcgccgcagaggaatacctcctcctcggtggtggtggcggcgacggtgccggcgacgtcgccctctccgcctcgctcggctccgggcttatcgatctgtaacatcttaaacgaactttttttgttgggtatcctaagtgttcgacgaaatgtctctgaagcgggttgctcattcgggcgcgggcgcgggcgctcctttgcgatgcagggatgggacggtggagacggaggaggagaggcggtggctgcgggaggagcaggaggcccttcacgcgggcagcctcaaggtgccccgccggtgggtgctcaacagcgcttctctttcttctcgtcttctaaattttgggtcagtgatgtataggtggatgtgatgttctcgatttcagaccgccatggactccccagatgacggtggaggagctcgacgccaacgagaagcgggccttcctggagtggcggaggaacctcgcaaggttggtcaggtttcattggttattatgctgattcttgtatgtcttccaatgtttgttgtgtttatgtgccaaaaaaaataatatttggacagctacttatgcttggttatgaaaatttgggatggattcctttctacttctttaatttagatattacactggcaacaagtgaaatgttggcctgtatctaattgtgtacaatatatcctttttccttcttggactaagaaaagttgaaactcgtatcttgaatgtgtgcgcagtgagcttctggtgcatcaaagtcaagcatgatgttgcctatcgttctgtttatttttatataccaaaagattctttttttctcctgcagattggaagagaacgaaaaacttgtccttaccccttttgagaagaacattgatatctggagacagctctggagagtacttgaacgcagtgatctggtgagtgcgtatgcatgagaagactatgttacagttcaaatatggacacgttactactttaccacatttcatcatatatcttttttcaacattaaaacttgttccctattcaattgtggcctatttgaaatttctgagttgcttagcagctaacagcataacaaatgtatcctgtagttatattatagtctgttttattcattatcctagtagcttttaattttctgtccaactgtatgttgcttatctttgaatgagctgacagttctggaaattatgtggaagtgcttgacttctgttttccttctttcttgaagctggtcatggtagttgatgctcgagatcccttgttctaccgctgccctgatcttgaggtacttattcccaagattccagtatttttcttttgactactctttttgggtttaagataaacttttagatgattggtaatttacatatccagcctcttgcaagttgcaactactgattataaccttattacattctatggttatctggaagcattagctgaatgcccatttaccatgaaaatttcaggcacttgaatattaaaaccacgatattggatatacagcatattcagtagtcccacatctcgttgcattcattcctagacacgttagtgtttaagattttaagttgctcaggcactggcaaatcacaaaggcacaacctgacgggcgcgatgatacaactgtaaattcagtttaccttcatatcgcagatgttgtcctgtttgatttctttgttttattgtctgccaacagcataatgcttaaatacttccttgcgtgtgtttctgtgctgatagcatgtggtgctagggttagtgtaattcattagtttctggtgttccctctttgtgataaatatgatttgtaataatagcatagaagagatataactgtgtaagctttcactattgtgtggatctttgcagttttgtgttgtcttctgacatgtctttatgtatgttgtaaggtatacgcacaggaaattgatgagcacaagagaacactgcttcttgtaaacaaggctgatcttttaccactgaatgtcaggttagtaacaccacacaagcgcatttttcaatattctaaatgcctttagtgtctgcgatgatccatacagtaatttctcattgaaaaaaaaattgcagacagagatgggcagaatactttaagcaacacgatatcctttatctgttctggtctgccaaagctgctactgctgatttagagggaaagaagttgagcagctattccatggaaaactggaatacagcagatcttgacaccaagatatatggccgggatgaactcttggtgagattgcagggtgaagctgagtatattgtgaaccaaaagggagcattaagagctgaagagggtcatgaatctagtcgttcagattctgtctcaacacgacccaagcatgtggttgttggatttgtaggctatccaaatgttgggaagagttcaaccatcaatgctttggtaggccagaagagaactggtgtaacctctacacctggcaagaccaagcattttcagacattggtaatctcagaagaactcattctctgtgattgtccaggtctggtcttcccttccttttcaagctcaaggcatgagatggtagcctgtggtgtcttgccaattgataggatgacaaagcataggggcgctattcaagtggtggcaaatcgtgtgccaagaaatgttctagaacagatttataaaatcaccctgccaaagcccaaggcatatgaacaactgtcccgaccaccaactgccgctgagttgctgcgggcgtactgcacatctcgagggcatgtcagtcatgctgggctgcctgatgagactagggctgctagacagattctgaaggattacttagatggaaagatcccacactttgagcttccccctggtgatacagattctgaaactgacccagaggaaaccactgaccttgaaggctcagatactgcagtaggtgccacagcagatcattgtgcttctgatgaacaagatgaggaaatcagtcaagctgatccaaacattagtcatgtactaagtgaccttgaatctttcgacctggccagtgaagtgtccaagaactctacaaagaagaagaaagaggcatcctataagcatcacaagaaaccccagaggaagaaggatcgttcatggagggttggaaatgatggcgctgatggatctgctgttgttcgggtgttccagaaacctgccgtcaattttgctaccgttacaggttaatgtttttttgcggcactctgtgcgacttcattctcttttttagcttacggtaattgaagatgtcgttgaaagtcaaactacattttatccattttgtttcatcttctgctgtttgttatggccatctgtaattctgtattggaaatttggaatggtacgcaatgtggctatttttcgatgctagctttcatagcatttgactgaaaggatgaaaccttatgaatgttctattaggttatgaactgagaggtttgttacgatcagttgcaatgagaggatttctctcaaaaaaaaaaagaatgagaggaagataatttcgtacaacaatatagaggaagatatttatacgacaatattatttcctttgttaaaagtgttcgatacacaacgtggtctgttgaattaacgcagatcatttttccagtttgcagacacatgaaggcagtggctaaaacgaacagcggggattgcctgcagtactgaggtttgaagcatgaaagcaaatccattaaggagaaaaaatatggcaaatcacattaaccgcaccaaattttacttaatagaaggtttgaagtatgggtttgggtccataaaaagaactccgatgccactgatctgaaagttttgaaggagcaacgtttagcaattagcattgcaacaagaatgttatgcacttgaaacttacgcaatccatatatccaattcactgccctgctgaaattcatataaaacgcggataatttgctagagagtagtagcgaatcaaatatcactatcagttatcacaagacacaagttagcaaagtaacaatcagatggagcgcaatcgcttgtcaattaaacagaaactgcattgcaatgtacgcaacatcagcacaggagctcaagcatattgacacatggatggagagcaaatatataggatgatctattgaaaaagctattaataatccatgtcagttaatctaatcaagaaaaagctattaataatccatgtcagttaatctaatcaaaacatcacattattagagcatgagatctccgtataattcagaactcgtgtatagtttccacccaaaaatgaatttgacattttcttggagagatccatccccctctccatccgtctcatggatcaaagtttaactaattaatccttgaaaaaaaaagagaaaagaattcacaatctgaaacgcctcagatcgatccctcaaaaaaaatttcttctcaagatccccaccgttttgaccaatcaggccgcgacatcttgcttctccgggaccaccgcttcctcctccgcctgcttcttctcgccggcagcttcttcctccgttggcggcggctgctgctgctgcgaggaggaggcggcggcgtcggaggaggcctcggcggcctggtctgccttggcggcctcgaggtcggcggccatggcgcgctcggcgctgaggatggggtggtagtactcggcgtgggcctccatgcacttgtggagcgcggcggtgacctcgtagcagcgctcgacgacgtcgtcgccggccttctccgcgtcctccacgcacttctcccacccgacaaactcctccctgcacccgccgcccttcatgaagaggcagaacccgcactccccttcctcctccccctccgcatccccctccccggcggcggcgtccaggatcaccgtctccccctcctccgccgccaccgccgcccccgcgtcgctgacgggcgccgccgcatccgccgtggtgttctggggctcttccttggccggtggatcggcggcgggttccgcgggttggggaggaggaggaggagctgaggaggaggcggcggcggttgccatggcgggttagggtttttggggggtgcggagagatcggagtttcggcgacgagacgagatgcttaaaccctttgacgaatcaggacggtgttagtggttggtcctacgaggactattagtagacttggcaggaagtgtctaggcccaacacgacgcggcgcgtccgggcccgatttggtttcggcggtggtcagaaggctcggtttcgcggccggacgggggactcgactcgaatccggatctcgaggttccgtttaggcaccgataacggctacgaaattgaaaaacaaaaaagttacacgatagacgaacatgcaccactgcacatacaatatcacactcacatttccgcgaattcatcctatagcacatgctctaagaaataaaaaccagcggtacatccctgatcccactgaagtcatattaaaaatttatctatatgtatgtaatattcgtgggcaccagtatttaaactctagtaggtgttgaattattgagcgctgccctagtattaatcattttaaatttgagaaatagaataatatattttttaaaagcaactttcctatagtctttttttagaaaacgcatcgtttagtattttaaaaaacatacgtatttttctatttattgttgatattgtaaaccctagtcctgacgcaatatagcctgctataggcttcggtatggttttttttcccatgaacgagtacatccctacgaacagacagcctgtgaaattttgttgcgtgtgttgagtgctatattgtcattctagctgattccagttcgttacaacaactcatattttgcggcctggagcaaagcacagatcgaattaacaggtcaagccgtattttagagatttccaagtggtctcttaatgtattcagcatggctgaatattgcttgattggccatgttgacaaattcgtgatttcctggtcagacaccacttttttgcttcatgcaggtcagctaccaccacttcctcagcccacggctttcagagtatgaagaacacttgcagccgcctgccaacaacaaaccataagaacagtcgttaatttcattgtttattttattttacagctaggtaacgggttaatttcatgcatggtataaaagcaagtataatagtagactataagccgactaaatgctgaggtggagaagaaaagagagaggagaagcggactgtaaacttacagccagcttagacacaagaaccaataaaccctgtgagagatacaagtgtgttctatattaattataaagagctaactattttatagacaggctgaaagaaaactataaataaccttatagctaacaagtcggttgtattattagcctcgctctaaaaagggttaaagtacacgtgtttcatgagtttattccaggaatactaattaagaaatgagtatgcactaaaaggagtccccggtagaaaaataatgacatttatagattattgaaaagagagcatatatacgatgatgcgatgtattattttcataaccaccgtaatgaactacaagtactattacgctaattattctttttaagaaaacagtacaaacttgtacacgctcacaatacatacaccctcacctataattacacatttaatatttcacctaaaacaaaaacaaacaagttactattagttttgaggttgctgttgggcataccgcatatgcagacgtagtagtattagtatctccgttacaatgcatttgcttgggataaaggtggtagtgaatagtaatggattgttcggtaaggctccagtttcaggctctagctctaacaattttttttttggctgaagtctaaccaaataatcacaactcttactcctattagaaaagagtggagtgagttaaagtgctttaaaaaataaactaaaacgagtggggtccagtcgctcgcaaactgtattctacacttcatttctaaagttaagattgctaagtagaccctcacaatttgccaaatgaaagctggcggtgtgcggcttgggcccagtggagttgaaataacgcgatgtatatctgaaaaaactgtaagtgccggccttttgtcttatttgtggaaataagacaaacatcatttttacaaatgaaaaataatttacgaaaaaaacttttatatacatgtcttaacagtctaaaagaaagaaagactaaaaaataaactaaaataaaaaaaacctaaaatcaactttaaatttaaagttaaaaatttaaattttgactgataggtttacgtataagcgaagtgaaaagataagatcggcaattaaaacgcatgttggttctcggggtagggaatggaaagtgatgcacggtttaagccacgtcgttctcacaacattctgcagggtagcgtgaggcctccttgcctcccgtctctcgctctgctctgtagtagtagtaggactgtaggagtactagtgattgctcagcgcgtcagccagtgatcgaagatgtaccccggttcactccgagatgcacgaggggagggagaaacccccacgtcagtcctgtgcttgccattcctgattccattcttttggctatgtttagatctaaggtgtaaagtttgatatcacatcggatacatgaaaaccgtaagacgaatttattaagcataattaatctgtcattagcaaatgtttactgtaacatcatattatcaaatcatggcgcaattagtcttaaaagatttatctcgcaatttacacgtaatctacatattttctatttatatttaatactccatacatatgactaaacattcgatgtgatagggtgtaaaattttaccagaggatctaaccgggaccaaatttgtcaacgccgatacgagaagaaagagcacggaaatagtatttcaactccaatatgcgatgtggtttgaccttgtcaacgtccgacactgaccaggtcggggatctttctgtttgggacacgacgggcgcggcctggtccagcacactgcagcaaagaggatggttggattggaattggatccatctcacgcggcagctttgctttatctgtggctgccaacatcagcagcatgagccgccgccggctccgttggttcaggggacggagacgggcgaggccaccgaggctgtgacgcacatgggaaacataactctgccttcccctttcctttgttttttcttctttcttttgggctttccaggcgtggcgtttttgcgtgtgcgtcctctacgtctctcgatttcacgttcacgtcgctcctgttactactagtagcagtattatgtagagagagctgtttgttatctgtccaaagacgatggtgcacgagagcctgggataaccacttctactggaaaggaacccctaaaaggtgagtgagagtatctatcgatcgctcattcgctcgtacggcgaggtgctgggtgctggtccactctactcgtctttgctgttgtttatccaaagtgatcttgtttgagctgtcacggctaattcaaagctttctaacatagctgagatgaaatctgaatttatgacggattattccacacatagatgatagatttcaaatcatttttaggctacggccgtgtttagaccgtgtttagttccccctattcccaactttccatcaaatcacatcacatcaaaaacttttctacacataaactttcaacttttttccaaactctcaactttcttcaaacttccaacttttttcagaaactaaatacacccttagttcacccccaactaccccaaacttccaactttccatcacatctaaaatttttctacacacatactgtatgtttagttcctgaaaaaagttggaagtttgggaaaggttggaagtttagaaaaaaagttagaagtttatgtgtgtaggaaagttttggatgtgatgtgatggccctgtttggatccaagggttagagttagtttgagctagttggggctcaaatagccctaaaggatccaaacatgaggggttagattggggctagtcgcatctaacccacaaaaaaactagcccctccaagagatgcttattggagctagtttgagtggggcccactgtagaagccacttttctctctctctctctccccgcatcggatccccatctcctcccaatcccgcacggtcgccgtactgtagagcaattttttcctccgctggtcgtcgcctcctccccgatccacgccgccaccaccactgatccgcgcctccgctgccgatccgcgcggcgcggcctccccaactacctgcaccgcggcctccgtccaaccgcgccgccgcctccaccgttccgctccgccggccaacctcagcgccaccgccagccccgagccgcaccgcctccgtccaaccacgccgccgcctccaccgttccgcgcagccagccaacctcagcgccgccgccagccccgagccgcgcctcctccgtccaaccgcgccgccgcctccaccgatctgcgccgtcgggcaacttcagcgccgccgccacccccgagccgcacctcctccgtccaaccgcgccgccgcctccaccgatctgcgccactgagcaacctcagcgccgccgccacccccaagccgcgcctcctccgaccatccgcgtcgccgcctccaccgatctgcgccgccggccacgcatggacggtgacggcttcgacgacctcaacgtgtgggctacgcagctgtcggcgagcggccccgccaccgctccctctgccggcgctggcttcgacctcaactcacaagcgccggcagcggaggggttcccggggcttgggatgtacggagccttcctccagggcgacaacgacgagctcctcactagccgtggcaggggctccagcctccctccctatcgccaccgcgtgtcggagccagagagggaagggcaactctaaatctgtcaaggcgactgaacttgggcggctcctccacggcaggcactggtcacggaggaggaaatggtggcgccttcccaggcgggctgtcttcggggagaggcgggcgcgttcgacagcgctcatgttcggtcgccgcggcacctggccgccagagccagcgcagcaacacggcggtacgtgccggcggcagcggccagcgcctaccgcgtccccgggcaccgagggcagcaaggagtgccgtccgtgggcaagcatccggctccggcgctcccttcaacaatgaagatgaagaattggaggatgatgtggaggagtttgcgagcttcggcggacccccggtgagccaagctagtcgagcccaatggaatgaagttaataatgcttgcttgttagatttgtgcattgagcggcgtagagtaggcacgtataatggtgcacaaatgagtggtgaagggtaccaagccatcgtcgacggcttacttgatagaagggggttggtgtatacccattgccaggtgaagaaccaaatactcgtactgaaaaccacccactctttctggcgatacttgcaagcgcacatagggttggggaggttaccagatggaaccattgatgttgagtcttcgttctggaaaatacatacagaggtataagcagccaatctgtgtattctatttttcagtttcctagtttcaaattgtccaatgaactgatctctcataggactgacttactgttgtagttactaactttcagctattaagtaggcaaaaatttgacagtacgctgtataaactatactcttcctttatgatagtacagtactctgtaattcaggttatatgagcatgtaatttagttttctgtgcactagtatagtacatatatgctcatccattttatttatcgctgcagaagaaaccatacctaaagaggctgcaatgggatcctccggaaaacgaggagttgcttgatcaactattcagagggtacactgtggatggaagcacagcctttgtgcctggagatgattatggtcaggactaggggcaagaggatgaggaggagtttcaaccaacacctattagtacaagcagccagaggagccaaaagggcaagatgccattaagtagcacttcaagcactttgtccagtccagtgaagaagagcaagagcccaatgcttaagattgtgaaggacatagccagtaccttcaaagaggctgtcatagtcaacactaagcaaatgcagaaacgggcaagtgacaaggctgcattttcagtcaagaggtgtcaggagctggcatttgagtgtggtgtagagcaaaccattgaatctgtctctgctatgtccaagatgttcgaaacagagtatcaaagggagttcttctgtggccaattaactcctgaccttaggttgggttacttcaagaaatggtgcaaggacaacaatttggagtagtagatgtcttgctctcatatgtctgtagaactatttatttgtgtgttgaacctatcatctctgagtcagaagttgaactatttatctgtgtgtcgagactattatctgtgcgatgagactattatttgtgtattgaaactattatctatgtgtgttgaacctattatctatatattattttcgaatgtngaccnaattgtacatgtgttgaagcacgaagaagatcatggccctatggttgaggaagcagaagatgatggaggcagcacaagtgaggatgagattgtatcgatgtgccgcaacaatctagtgcatgcagagaatttgatcgtgcaattgggtgctatcttgggtatgtactctgataactactttgtgaaactacctaagagggtcaatggagattctggtatggattgggtcatggatacactagcccgagatgcccaatgctacaacatgtttagggtagagagagctttatttaacaggctacataatactttggtccagtcttatgggttgaagtccactacaaaaatgacatctatagaggctcttgctatgtttttaatggattgttggttcaccacagtcagttagacaggctgataactgtttaaggaggtctttggatacagtaagcaggacatttaacagagttttgacatgcctccttaggttagctcatgacataattgtacccaaggacccaaccttttcagaggtgcacccaaacttggaaaatccagcattttggccacacttcaacgactgcataggagctatagatgggacacatgtgaatgttgtggtgcctaagagtaagagggttccgtacttgaacaggcacaatgaaaccagtcagaatgtgcttgctgtttgtgatttcgacatgagatttacctttgtgttgtcgggatggcctggttcggcacatgacatgagagttttcaaaaatgctgtgagtacttatcatcacaaatttccgcatccaccaccaggtttgttacttgaactatcttgcaacaatccttatccaattgcacttgttcatctaagtctcattgcgtgcctcactttcacaatatgtagggaagtattatgtggttgatgcggggtacccaaaccggccgggctacctttcaccatacacacgtataaggtaccatgtcgcgcaatggaacgatggaccgccgccacaaggtatgaaagaaaccttcaaccatgcacatgccaaagttaggaatgtcatagagcgatcttttggagtgttgaagatgaaatttaggatcttgttgaacatgccaagttttcctgaagcaaagcaaactagaattattgttgcttgtatggctcttcataatttcattcgagagatagggaatttgatgcctgtgatgaggatgaaaattataacccaatgcctagttctgttgcatccgaatggccagcagatgaacctcttgttgaagatgcccacatgaatgccttccgtgatgaattagctcaagctttattttatggagtgtaattttttcttgtctagcttcatttgtatggactaaactacctatcgcgtatgttgagtgagatatctcatttgtacggacaaataaaatttttcgtgtttcggatgcttggtttgaaatatgatttgtttgtgtcatttgtgagaggaaggaagccacacatgagtcttccacaccaaatccggttggaaaggagccaaatgattggaaaagtatatttattgtcaatctaacccttccatccaaacacctctagggctagagttagttcagggttagttgagagctagaaactaactctaacctctaactctaacccttctatccaaacagggccgatgtgatggaaagttggaagtttggggtagttgggggtgaactaaacacagccataaacttccaactttttttccaaacttccaactttcccaaacttccaacttttttcaggaactaaacatagcatacattcttttcagaggtccgggctagctaattccttggattattgtgagtaattcttcaaaccaccaaatggtgtgtttttttttaaaaataatgcttttttaaaataactttcttaaaagtaaaatatcacaagtttcaattgtccagtatttagagtcaaatttatctttctctaatagtttatcttgttttatgtgtggatgataagctcgactgactctccgaatcaatcaccgccttagaatactttgaagtttgctcgtgataattcatttcctaagatactggataaaaaaaatttggacctctacatctagcacagatgtacatagtcatcctcgtgataattcataagctataaagtatatataaaagaacatgaccttaattttagaattaactaagtgtttttttctttgtggttttacttacagtcttgtcttttgggcattaggacacatggaatataaaaagagcacaaaaaaattgtttatgtgatgaaaaccaattttttttatataaaatccttatttgtccataaaagttgacatgatcccttatttacccctcattttcttaatgacttgtgggttcaggatttgcttgtagtttctttttaggatttgtagttttttccttattattactccctatgtttttaaatgtacgtcattgtggatttttaatcttgttttcttttcatgcatgtacaagcaaacaaattgttacgttgcaccacacgtctatacagtaacatcgtacttctctttctttatttagttttacgctcgctcttctattttttttatttcatgtattatattcgtgtgttttgcttgtctcgtattgcaaacaccccaaaaacctctctctatgcaaatccaatatatttttgagaagactgaccatccactctacacatgcttactaacttatcaatatgtttctaagtcaattgtcgggctggactatttatgggcttgcaactaagtggtttatggaccgaagcatccaagtatccaccaaatagtctagtggataatccgcattcgtaaagtatcagagattctacatctgtacctcactatccgaattcgatcatatatccaccgaatttctgaaaacatcataccatatcatcgttttggagtggatcatatcagcatttccgtaccttctctcggtaaacaactaaacacagaaagggatcatctaacgtgaacttctcactaaatatagaaatggatcatccgacgtgaactttctaatactaatatatgagcctcaccacttacatgatccaggtatacgtgatcacggatcccatacactaaacacgtatccggatccataataataggcgtttgaacagcaggtggcagcatcggagaggagagtggcatttcgaaacggggaggccacgacggtaaaaccgctgcgagtaaaaaccaaaaaaagccgttcttaattgaatcaccatttcctctcacacacttctctcctcctcctcctgtctgtctcctccaccccacctcacctcgccgtcctcctccctacgttggggtcgccatagccggatttgcgcgttggccccccgacccctcccggaattgccaactcctcctcccccttcttcttctctcctctcttctgtcttcccttcccccgcgccgcgcgcacggcccggccggcctcccgaatccccacgcaattcccaaatctcccggggccaaaagctttgccgccgctccaccaccacccaccacttcctccctcccccctcccctccgccacgatcgcgcccagcccgagccccaaaccacccgacgaatccgcccccgcgggattctctccgccgccgccgccgacgaggaggacgccgacgacgacgaggagggggaggaggctagggttccggcggagaattcgcggccgcgggcggcgcgccgcgtagggggggccacccccgcggcgcagctccggatctcgaggcccccgaactctaggaggggtggggtggggggctcggcgatggacgtggactcccgcatgacgacggagtcggactccgactccgacgccgccgccaccgccgccgcctccgcctcggttgctgcgcaaggaggcttagcgagcgagacctcgtcgtcgtcgtcggcctcggccccgtccacgccagggacgcccacggtagctccggctcctgcggccgcgggagccacggggcccaggccggcgccggggtacacggcggtcagcgctgtgatcgagaagaaggaggacgggccgggctgccgctgcgggcacacgctcacggcggtgccggccgtcggggaggaaggcacgccggggtacatcggcccacgcctcatcctcttcgggggcgccacggcgctcgagggcaactccgccacgccaccctcctcggccggcagtgctgggatccgtacgctttctatctagtatcatatatatgcctaataatttctgcttttttcaaatgtcgattggtcgtgtctcgtggatattaagcgacgctcttgggtgatcatgatggcaacctggagctatttttattcccagtttgcaatttcattttgaaatgaatttggaggcttcaggagttttactgagaaatcatttgctattttgtgggtaattcgggtcggtctatacctcgatggctggaagctcatagctggcttgagcctttaccatcagaggatttaaataggcatagcatcatttcagacaccattttgacttaggaattgcgcttgagctgtttctggaaccgaatatcattggttgaattagtgaagatgggtgctgatggctgattccagatgccatggtcatgggagctgaaatgttcgaactgtttcatatatcagtcgtattgcataattttgaattcttatttttgaacgtatcccctgattcactgggcatgcgctttcatggacctctcatctaaagtttctaactatcttcaatgttatgcttagcaagttggaaggaacatttactgcattctagattttgtgtcatcgtgttgcacattgtatgacagtaggagaaaccttttttttttttgtttttccttttggcaagttaaagtaggtgagcggaacttctaaggcacgactctgatatgaaattgaaggttttcttttttgggagctatattattgctgatgtaatctatttaaagcatatatacaaaactagttgctccattgtgtacaaaattgttttcggttaaaaaaatgttatctggtatacaatgctatttttactctccagttagtcacaaaggtggattattcattgatctctccttggtttataggtcttgccggtgccacagcagatgtccactgttatgatgtgttatcaaataagtggagcaggtaggatattccataaatggtttccaccttcttttgagcatttaatcgttgcgttgctactttggttgactttagcaacttttgttttagagtaacacgattattttgttggtagcataaagcaactcagcaaacttatttaattgcgccaccactttggcaggcttactccacaaggtgagcctccttcaccaagagccgcacatgtagcaactgcagttggaaccatggttgtcatccaggtatttctatattttacctgtggtttctgagatttattacctagtgcttaattagtatcagaaacaattacttcccaagtaacctgttttatgtactctttgattgtttacataaattttatggaggtaacttctaaatatggtttgtttttgtttcatcattcgttgcaatgcagggtggcattggccctgctggtttatctgccgaggatcttcatgttctagaccttacacaacaacgaccgcgatggcacaggtaaactattattctgtactgtgagtgtggagttgcatttcttcagcacatcttctgaggtgctaatgtttctatgtagagtggtggttcaaggacctggtccaggtccacgatatgggcatgtcatggccttggttggacagaggtttttgttgacaattggtggaaatgatggtaagcaattgctcccagatgcacctgtcaaattcaaactagagaacctttgcacttggatctatgctgaaatggtttctataatgggataatttttattctctagggaaacggccgctggcagatgtatgggctctagatactgcagctaagccatacgaatggaggaaacttgaaccagaaggtgaaggaccgccaccatgcatgtaagtttgctagctgaaacacattacagtaatttaattattgaggatggtgacgtaaagtttaatagcaattcctggggaggtatccattatattacattacttaccatgtgttgcatgttacttcattaatttaatatcaaattatccacaatgcaaccagctatttactttcttggttcagaataacatacggtagcacagttaacccaccatatttcccaattagttgtcaggcatgaccctcaggttattttcctttattttttttactggaagtagagctagaactaggtttggcatccttttgctaagtatactgcatggtgttgttgttcaggtatgccactgccagtgcacgctctgatggtcttcttttactttgtggtgggagggatgccaacagtgtggtaagtaaaataatcaacttatataaataaagataataaatagtctagtaaatatttcgctgatcaaaatatgtaaagaactaaaactaatggaattagagacttgaatgtataacacttggctgtcaattttaccatctcagtgattggatgtcatactgttgtaacaaggttctatatagcctgtgatgtgaggactgcaattctctctagattacaccttcaaattttgtatctaaaatattgaaacagcagtgatgtggcaattggtggatttccatgatctgaaaaataagaaagctattactttgttatcagtttcatctcatgtagatcaagagaaaatgaacataattatgcatggcatatgggcatcttgtcatgtaacttacacagacatcagttgccaagtagcaaatattgagtgactggaactacaagtagcaaatatttgttttctataacaaagatgtctagttatccttatattcggcaagtaaaatgatactccccctgtttcacattataagtttatagaaaaatttaacaacatctgcaacacaaaattagtttaattcaagctaacatttaatatattttgataatatatttgttttgtgtcaaaaatattgctaatcttttttttataaacttgttcaaacttaaaaaaagtttgattagggaaaaaaaactcaaaatgacttatagtatgaaacggagtatattttagtcacaccatactagttgtacatcaagctattttcatttgagatgtcaatttgatttaaattactaataattacctgtagaagttcaatatcaataataggatttctctaatgtctttgtatacatgttacttctgtaaacccatcagccgctggcaagtgcatatggtcttgcaaaacacagagatgggcgatgggagtgggcaatcgcccctggtgtttctccatcacccagatatcaacatgcagctgtaagctgttctttcattgttttttcatctaaaaggtgtacccactttggctcttatacaatgcttgattcatctgttgtttaggtttttgtgaatgcacgtctccatgtatcaggaggagctcttggaggtggtcggatggtagaagactcctcaagtgttgcaggttctagttttaatcttgaaataactgacatatttcttaaggtattcatgaaataccttaagaaatatcttgcactgacattaaccagaagaataatcttgagatgaaataatgtagctcttttagtttgctggatgctcagcatataaaatacttagtttttgttggtgtatgtgcaatatttgttatcttaataagatctagattgcagaaaagcactcagatacttgaatagtttagttgctttcagcattggccactcatgcaccataactacacttgctaattatgttaatctatatgactgcatgtgagtattacaaaagcatttcctgtctttagcctttttttactcatcactctgtgatgacattgccagattttcttcctttttttggtagcattgagattctcttgtgttgaggtataggtaattgttggtttcctctagaatgacaatatgcactcctataaatttcttataagttgcacgattctatctggttcagtgctagacacagctgctggagtctggtgcgacacaaagtcagttgtcacaactcccaggataggaagatatagtgcagatgcagcagggggtgatgctgctgttgaacttacacggcggtgcaggcatgcagctgctgctgttggtgatcaaatattcatttatggaggtctacgaggaggtaagaaaacctgtttgtttagtattatgctataggctttgagcctttgctgggccatcaagtcatcattgtacagttcagattcaagttatttgtggtgttatttctgatttgatggggataacttggccccactgccacatgatatgcaacttggatgccacatgatatatattatagttggcatacttttcgtttggatgaaaacttttagtggactggaaattgtcaagtttgacatttgttctcaccgttggattttatgcaccttcaatttgctttctaacatcaaacgactgccattgtaggggtactgctagatgatcttcttgtagctgaagatcttgctgctgctgaaacgacaaccgctgctaatcatgcagcggcaagtgcagcagccactaatgtacaaagcggaagaacacccggaagatatgcttataatgatgagcgagcgagacaaacagctccagaatcagctcaggatggatctgtagttcttggaactccagttgcccctcctgtcaacggtgacatgtacactgatatcagccctgagaatgctgtgcttcagggacagaggttattttcaattttttttccctatgaatatgtcctggtgatattcctatggcaagttactattagttttgtaattgctattttcctaaggtttcaatattaatttctctacaggagattaagcaaaggtgtcgattacttagttgaagcatcagcagcagaggcagaggctattagtgcaactttagctgcagtgaaggctaggcaggttaacggtgagatggagcaattgcctgacaaggagcaatctccagattccgcatcgaccagcaagcattcaagcctcatcaaaccagacagtattctctctaacaacatgacgcctccacctggggttcggttgcatcatagagctgtgagtagtctgtatgcagtttgttacattgtctgcagttcatttgtcagtttttttttatgttataatattgctgtagatacttgtctttctagcgactaaaaacaattgtattatctcttcattttgcatcacatgaggtgatatcctctatttttccttttacctcaggttgtagtggctgcagaaactggaggtgccttaggtggcatggtcaggcagctgtcaattgaccaatttgaaaatgagggaagaagagtcagctatggcacccctgagaatgcaactgctgcaagaaagttgctagatcgacagatgtccattaatagtgttcctaaaaaggtatcatggagaatttggtccattcaactgctttggcactaggatttagtgatgcagaagctgaatgcacaatatagccatgattgagaaaagacttagctagttactacgcgtattctgaactacttaattactttgttctatctgctgcgatacttatccaggtgattgcatctctattgaaacctcgtggttggaagccccctgtgcgaagacagttcttcttggactgcaatgagattgcagatctatgtgatagtgctgagagaatattttcaagtgaaccaagtgttctgcaacttaaagctcctgttaagatatttggtgatttacatggtcaatttggtgacctcatgcgattgtttgatgagtatggtgctccttcaacagcaggagacattgcgtgagttcttgctttgagaaactagtaatcacacactttttaaattttgcttcaattgtgatattttacttgccaaattaacttgaaaagccttgttattaatgtgtttaatgaattatcttaggctatctatacatactccctccgtactcgtaaaggaagtcgtttaggacaatatttaagtcaaaccttgggaatataaatcatgaataactctcaagttgttgagtttgaaaatgtaaaaattatatgaatagatttgtcttgaaaaatattttcataaaagtatacatatatcacttttcaataaatattattatagaagcaataagtcaaagttgtgttttggagaccgtgttgctgtccaaaacgacttcctttacgagtatggagggagtatgtacttttcttttcttttttggttcagaaggtatttccccacctttcttggtcttgtgctgatccataattttgtatgaacctgcagttacattgattatctcttcttgggtgattatgtggatcgtggccagcatagcttagaaacaatgactcttcttcttgcattgaaggtattaagctgcctacttaccttgatgccacatatacttactgtgttgtgacgatttattaaaatcgtaatatataaacaattgtacatttcaggttgagtatcctcagaatgtacatttgattcgtggaaatcatgaagctgcagatattaatgctttgtttggcttccgaatagagtgcatagagcgaatggtaatctattttattctgcatctcacgttacaacaaaaccttttcctcttttgcttatgaggatgttatttgctcaaaaaacagggtgagagagatggtatttggacatggcaccgaatgaatagattatttaactggcttcctttggctgcacttatcgaaaagaaaattatatgtatgcatggtggaattggtcggtcaatcaaccatgttgagcaaattgagaatcttcagagaccaattaccatggaagcaggctctgttgtccttatggatcttctatggtaaaacatttcaacaataattgctatttaaccttccatgagcatttatttatgtgccatgttcagatgttctctttatgatgcttataggtctgatccaaccgagaatgacagtgttgaaggattgagaccaaatgctcgaggccctggccttgttacgtttggggtttgtgttccctaaccctaaccttctgaattcgtcttccctttgttgaccccctttgttctctgaagctaacatttgctgttcatacagcctgatcgtgttatggagttttgcaacaataatgatcttcaactaattgtgcgagcgcatgagtgtgtgatggatggctttgagcgctttgctcaaggtcacctgatcactcttttctctgcaacaaactattgtggtatgaattattctaaaatattcttttttcaaacttttttgctggatttctacgattgcttgacatggtatgctcacaggtactgcaaataatgccggtgctatcttagttttgggcagagatcttgtggtcgttccaaaactgattcatcctttgcccccggcaatcacatcacctgagacctctccggagcatcatattgaggacacatggatgcaggtaatactattttgttgcaaagatattcctgtttgtaaactaactggtactaccaccttcctcgtaacacggtaacatttgaaatgaaattcaggagctgaatgcaaacagaccaccgactccaacaaggggccgcccccaagtagcagctaacgatcgaggttctcttgcctggatatagtagagtggccagatattgattaatctgatctatatatgaagtctcgatcggcgcgatcttgctatttttatttttttctgcacagagtaaagtgatttgtgtttgcgagacagtggcccacagccatgccaaaaggtaaacatttaaagtgagcaaggtagtagataagatggatgaacagatgatcatcctgaacagcgccgtccagtccaagctgtttcccgaacacgacagtaaaacaattcaattcacagagattatctggagatcgacgaggcttcacttcacctgtatatactcggctgctggtggataggcagttgtatgtggtttttgcatccaattggaatggcaaaaaggaatagtgttattgtactagctattctttcctctctttttttttttcctttctttttgggatcttgagttctgattttgcaaggtgcttctgacctgctggagagagaccgatggctggtgttcgtggtccagtcgtgtataatagccttccctcctgcta

SEQ ID NO: 6631 - DNA, 586 bp, Oryza sativa
agtccatcagaatcaatatcgaacgacgccgggacgagcgccgagctgcccgcatgggggaaggcgcctcctcgtatggagtgccgcattcctcctcgtgaggcggcccgccccccacgttcacccttggagggaccggttgtagggccttcgttgtgagtctccagaacgtccggtggcccccaaagtttcgccctctgagttcctccagatctacaccacgatcatcgtggcggcagggggcgacgaccgggtcctggcgaattacttccccatggccctcaagggtcaggcgcgcggctggctgatgacccagccccccgactgcatccattcctgggaggacctgtgccagcagttcatcacgaacttctagggcacatacccccgcccaggagaagaggcggacctgcatgctgtgcagcggaaggacgacgagtccctctgatcgtacatacagcgtttctaccaggtccgcaacactattccatgcattctggcccacgcggttgtttatgcgtttcggaatggcttgcggcataaccgcatgctggagaagaacgcctccaaggagcccaagatcact

SEQ ID NO: 6632 - DNA, 8939 bp, Oryza sativa
ttggtttactagaaggagagagatgtggtgttactcagggtgggtgtacaaaaattcaattatatcttgtttggctccgaattgaattcgattcattcaattggattttgggctatatgttttagtgtgcaagctaatgatattggtttggatatcgtagaagctacactattgattcttatgggctatttgacacgtttcattgaaggcgtacacatgattgctccatttctttgtgaaaaagcgcacgatctgaaacaattactctgaccgttcctttgtttacaaacatgaatatgcgaacagacttaaaatttcttaagcaaggtgttgttattagccacagaaatactttgaaacatgaaacagttagtgtgtactaattgtaccatttaaaactagactctgaacatcgaagtacatccaggcctcagtagaaaaaatgtaattgaggctaattcatgacgcacccgacagaaagctagcagtagttaacactaaattattactattttcttacaagatctctcatcaaacaattttgatatcgtgctggtagagccaatacaggcaatattcgagttgggatctagtatccccaaaagccaaaaaaaaataaaaaagaaacagtacaaacaacaacattttagtcccggtaaaagattgttcagtacagtcccttaatccgtatccctagtatacaagaaacaaaatttctttgcaccacttcgcccatggcgtcaatttggcataatccaagggcacagcacaccagggatatatataactcgaggatgtggcctactgactgctttctgcctcagggggtcagaccgctaagcccaagttagatttaagtattgactatgaacgaagacatagtgcgacaagcgagtgccccatgtaatatttggtctcaacgtttcttctgatccttcccagttttgttatcctgagtgagcatcctgggagcgatggccatcgccataagctcctggaacagaagcttacacgcgtagggtatatgcacctgtcagtaggtagcagtgtaattcccgttattgccatagtagttattacttctataaataggctttagattcatagtaattaacagtacagagaagaaggaattatacttacttggacaatgtcggttttgttcttgcaccctctgcactcaaaggaattcttcttgagattagcaatagcaataagcccacacttctcgcatacatggactctgtacgcatcactctggtcaaataacctttccttaaggaaaaatgcagcgccatgagcaatcatacagtccctctccatctctccaaaccggagaccaccatcgcgtgagcgcccctctgcaggttgtctggtaagtatctgcacaggaccacggcctctagagtgaatcttgtcatccaccatgtgcttaagtctctggtaataagtaggaccaaggaaaatcatggcagttaattttcttccagtgtgaccgttgtacatggtctcgaatccacgcatctgataaccacatttatgaagtgctttgctgatgttatccacctgaaatttatgtaacaaattcagattattgcaggtttgaacaataaaagaaaaagtgattgattatcacataatcttgggactataactagattataactgattgcagtaagctaggggttgaacattttcttaaaaacaagtagaatataatcaagactaagtctataaaagattactcacagtaacatcagtgaaaggagttgcatctccttcttttcccatgtgagcagcaactttacccataatacactcaatcagttgaccaatagtcatacgggatggaatagcatgtggattcacaataatatcaggtgtgatgccttcaatagtccatggcatgtcctcttgtgtataagtcattcccacagttcctttctgaccatgcctactactaaacttatccccaatctgtggtatacgaactgatcgcattctaaccttaacaaatcttaaaccatcagcatttgttgttaggagaacctgcacaaaagatagtagacttagaagtctgttgatttcagtgtcataacacagcacagaaacataagaggcggcggagggaataacagacctgatccaccatcccactttcactgtggcgcagcgaagtactgtgatcacgctttgtgtatctagtagcttgcccttgggcatcatcttgtggaataggagatgtcttcccaataatgacatcttcaccagatacccttgtaccctgatacatgaatatatatcagcacatctattatgtcgccatgataaagaaaagcctacaataatgttctctacttactggtggtgcaagtccatcatcatctagtttatcatatgacccatgacgcattccctgcaaggaaaatttcaaaaaacattagttcataagaccgacaaagataaaatcttcaatgaatctaggggagcattaccatagtattctccctatttggacggccaaactcctctttgacaagagtccccatcttcttttcctcatctctgcatatgaaggactgtcaggctacaagcattggatggaacttataaagtatacagtgtaatgtcttcatacctgtatgagcggaaaaacagagatcggaagaatccacgatctattgaagattggttcataataaccgaatcttcttgattatatccagagtagcatgcaatagcaacaattgcattcttcccaaatcatcaaagcaaggtattagtaattacatcacaaaacaaatgcagaacatgaagagaaagcaaacaaggtgtcccgcggttaagattgttcacttacaatgccagctggtaactgtctgaagtgcaaatgttccatagcacgagtagtaacaagaggcttttgtgggtagtatagcacataggccaatgtgtcctgaatacaaagttggatgtttaagaatcaaatctatacgaacagaccaagaaagcagacagatggcacactcaccattcttaactgatagttggtaacatagattcccattgcttgttttcccatagcagactgatatgtattacgaggtgactgtacattcaaaggaatgaattagacatgcttaaaaagatgcagcatacaacatcgcataatgggatgtgttacctggttatgatctggaaaaggaataatcgaggcacagacaccaagtatcaatgaaggatgaatctcacaatgtgtgtaagtttcagagtacgcctcctctggattgtgtcttgcaccaataaggtcctgaaatttatttatttagattatactagatgatgatgatgataaacattttggcccttttcacacaaaggcaaaaggagttcccatggaaggtaaccttaggtgccctacaaatagtcaatttggcatactttgcatgacagatcttacttacattaatggtcatggagatcatagtagtttcttcctcttcagtatctatgtactcaataaatcctttcgcaactaagtcatgccaaccttcctcaggtgtctcctggataaatacaccatagaataatacaagcacataagaaacatagatatatgtctaaactgtagtaaaaaaacctaggatacagtagtaaatgccagaccctttgctgcaacgctcggatatgtctctttttaataagaagcctttggttttcaacaataaacagtggacgactgcaacgcccatagtctgtataaagtctgagttctttaagacgaatatcacgaaccacaccaacttcagtgttgacatcaatctgaaaattgacaaagctcatcatgtaagtctgatctgacatgttctaggttaaacacagaccctcctaaaatagcatgatacaagtaaattccatcctcgacttgtccaatcttaatacactgagcttatatatgtttaaccaactgcagaaagcaatttacacaatactaaaagatgtcaagcaaagtatgtcaaaagaatgcagttaatttcctacacactcatctattcaccaatttattgcctgcagaattcggccccatcttccaaattattcaagttaagcacggcacatacctgtcttctcaaacgcctaagagtcttcaccaacaggtcagggttcctgtgaattccaacccaacaaccgttgacaaaaattttagcagcttgtggaatgacggctggtgatatctcctgttaaaagataaacacagaccaaaatcagtaattgttgcaaaagaccccaaaatataagacatggaggggaaacggagcaaaaccattatgttctgccaaaggaatgaaaacaaacctcaaaattttctgtgccccactcctccaaaaattccaaaataggatttgcagcagaaccaacagtgatatacaccatcaatgcaagatttttaaccaaaccacaagcctgaatacaaggcataataaataaacgtaagcacagagccttcctccaacataccataactacataaatgtcaattacttacttgtccctcaggtgtttcagcagggcacatcattccccaatgagaattatgcaattgccgaggttttgccaatttccctattaagatcaacacaatcctcagaatcaagtctcagtggataagtaatgtatgaaattgagaaaatttgatattgaccttcacgcccaattggagagttaagcctccgcagatgagataatgtagatgcataggtaaggcgattaagcacctatacgcaaaagaaaacaaggaatgaagagcatggattcatacatttgttcgctaaaccatgttggaatcagtgaaataaaaacatcaaatgttcaagaaagagtacccacctgagaaacaccagccctggtaccagcttggttagcctgtccccagtttccagtagcaagggaatacttcaacccactagtaatggttttggctttaatagcaaattgcagattgacttcctttccattatccacacactggattcaagaaaaacatcagttaatagcctccatggctgagtaaaagaaaaggagggtggtttagaaagggaaccttttgcacatatgacctcacatcccttgtcaactttctgaaaagctgtatttacaaggaaaaaaattagaacatttggtcccacttcagaaaagagactcatcactattttagttctgacatatcggagacgaaccattctaaacagtcctccaagcaatggacctgcaagatccagtcttttgttgccataatgatctctgtcatcttcagctcttcgaccaagagcgcacatcagcagacgatgaataatgtacctgcataataagtatacacgaatcagccattctgctttcaatcgaactacagcaagcttttactttcttaaagataattaaacacatgcaatttagaacgcatagtcgcatacccaaagtagtacgcctttttggtttcacagaattcacccacaccaacatggggtaacatttctttttgaagtatctctttggcatacctgcagtagccacgtagtaagtaccaacatagtaatttaacttttctagcatatacagaggtaactctctgccaccacatacttaattctcttttctttagttacaccaacagtagctccacgctttccaatgtaatccagagcaaccttaaaataggtgtattaaagctttagaaagatgaaaccaaaattaagaatcataaatttactagttcatataattagtttagttccagttgaaagctgtatgatgtattcaaacagctaaaaatacctgctgattctgaatgacgaaagcttcctctaaagatgggcgtagcaattccatcatttgtgtatcagagaaatcatagcatatgtgctctaatatatctttatcagcaacaaatcctaatgctcggaacacaatgatgatcggaatgtctgcacggatataaggcaaagtagcacgtatatattgaccagatgaaccctgcatcacaaggaatatttaacaaaaatttagggtaacaaggaaaacactaatgctcattaagaatacactagtaaatagaattacttttgttccagttggaagtcatatgaaaatatttttacactagtgctcattaagaatacagacataaaaacacgtgcacctataacggttaatttcgaagcttgtatatgattactcacccctttcgcgcctgccctagaaagcatccgcacaaacatactactagcaggtctattctggttctctgccatagaacggacttcagccacgtatgcgtatttattaggctgcctcttcttaaacacatagacatggttggtgctcatcttctcctgggcaataaggactttttcactaccattgattataaaataccctccttggtcataagggcactctccaagttctgtaagatccttttcggactgttgaaacagtgtgcaataactagaacgcaacatgataggaacctgcaggagaagaaacagttagaaagaaaactacataaaagggcaaagtatccagatatgttaattacaacctttccaataaagacttttgggtactccatagtttctgtaacctcttcacagtcatgtccttttttcataactctgtatgatacatcaacatatagtggcgccgagtatgttaggtttcggagccttgccgattttggaaataaagtagctgtctctccatcagcttctgtcatcattggtttactcagatagatttgtccaaagctgatcttgtggagtgtctaaagaagcatacaagaccatgataagtatcagcacaaaagcaaataataattgttttcaactgaaaaaaacgacaagattccgtgttgtgacactcgcaatatccaggcccgaaaataagaaacaatattcagaaacttgcataggtaggtcagtttattttattttacttttgtatatataaactctactcagtattgttactttttccccagcatgtgaagggtagcaagagataacattcatcctcagtacttgtcaaacagttttcccttttttgtggatattttttttcttgaaaactcttgtgtggatattttcactagtcattgctaaaatcccagcagagattactatttgtaattctagtttttattgaggttccaatcgcctaaaaggatttcatatgttgcaagaggaatcggagcttatcattgaactgagtaggtcccgtcttgactgcaacaataagattatgccacctatcatagcattctagctaagacataccagttcttttaatctttcttatgacccttgacacttcagcaaaaacagaagtcaaagacagtttttttagcataattcagtgtatagttctaaacagtctgatataagcctatgtcatacaggcagagtgttgcaagtcactctgaataacaaaatacccatatttattacaaaaggagacattcagtttctttccccactccagtatagtcaagtgtcttacatttactggtaagatttcttgtatgatatccatctcaaaatatcaaataggcatgcagtttcactacattgctccaagagaattttacaatagtgtataattgcatatacatgactatacatctcagaaggtcaaactagacatgaagttctacaccactgttcccagaaattttttgaatataatttctgtgagtactatgttatataacaaaactgtttgctgaaagaccacagttaggattgcgattaacttctgtctatccaacatcaattccaaatagttgaacataatatcagcacaaacaaacaacacaagccatattgacactctgcttctgctaactcactagtgataacttggaactgcagcaacgcaaagcaatgcacacttcaaaactcattgtaagctttgctagtggcaacccttgtgaatccaagagttctccactccgacccgcacaaaaaaacttgaacaaaactcctatctcaacactagaataatattagccaagactatttcaccctgaaaatccagctcaaccatcaaccctagcgttcaagttgctattgcattttaaaattcagtctccaatctgagaaagctcctcttaacccttgcaaaaccctaactgccatctaatcaagcagctagccagtgaaagaacaggttaagagacctgccccctcgccattaccaaggtcgccaaaccctagtatgccttaagccgtgcaatcgcccgcccaattcagaggagcaagcaaacagcaaaagtttttttaagcagcaacagcattcgctaggggtggtgaggggggcgcaacctcggcgaactcggcctggcggccggggttgtgctgcgactcggggcggatctcgatgtcggcggactcgtcgacgatctcctgcatggtgttctggatgaactcgtcgaaggagtcgagctgctggcgcacgaggcccttctcctcgaagtaggcggagatgacggcccaggcgtcctcctgggtgatctcctcctcgtcgggggcgtccccatccgcctcctcgtcctccatctcctccccgccgacggccccgtactcttcggcgccgtacccgccgccgtggtgcgggtggtggtgcccgcccatctccatctccatcccctcctcgtactcgtcgtcctccatggcggaaaccctagccccctcgcctcgaggtggtgggagtgggacgcccgccgcccaacaccgagcgagtaggggcggcggaaggaaggggaaaacgagtgaaaaaattttggaggtgatttggtccgcaacgcgatatattggagcgcggccgaagctgggcgtagcgaaagccaagtcggtttgggaattttgggtggggggggggggggg

SEQ ID NO: 6633 - DNA, 1280 bp, Oryza sativa
caaagattaaatcagattaaatcatttatatagattttaatggaattatgacgcaataatgaattatttttgaaaagaaaaaggggattattgcatcagcggctagggtttacggtggaccgggtgcacggcggcggctcacggaaacgaacggccgaggtcgatcctatccaaaacgaacggcgagatctaatcggttcatcgcgggtccacggcgaccggcaacgatgatgtcggcgatgacgtcctcaccggcggcggctcgaacgcgcatgctcgccagcgaacgacggcgcggcggtgcaaacggagggcaccagcacgtagagggcgacgcggcgatccttaccgaggcacgaacggcggcgagcagcgaccggacgatgacggcgacgaggaagaagcggcggcgacggtcagctcgacgacgacggcggccttccaacgatcctcggcgacgacggaggggtggacgaggacggcgacggcttggcaatcacgatagcggccttcccgagcgacgacgacgaccggagcgacggcggtgctcggctaaactcgcggcggcgacggcggcgcacagttgaacgcggttagagcgctacgagcggcggcgagctaaggcgagggtggcggcggagagaggagggctcgggggtccttttatagcggctagggggcggcgaggaaggcccacggcgctagagctctaccggcggtggaaggcgaaggcgagggaaagttagggttcgggagaagaaaacgaatccgaatcaaactcaaatccgatgatttccaaaccgaattaggcgacgattccaaaagagaaaagatagaggagatcaaggggatcatttcccctctattgatttcacaggagaaggaaaggcgcggccgaattggaagggcggcggcggcgcggctcggctagggttcgggcgcgaggaggacgatgggtccgacaggtgggacccacctgtcagcggccaagggcgcgcgcgcgcgggcagctgcgggcagactgggccgactaggccgggaaagagagagagggcggttttgggccgactttcggcccaaagccaaaaggaggatttttaaaaccttttcaatttaaattattcatgaaatgcaattccatttattaaaaatacttccttggttcaaataaatcccagaaaaatctaggaactatagaatcaagcaaagtatttaataaaattttatctggcccacttttatattggaatttattatttaaaattagatcttctcttcta

SEQ ID NO: 6634 - DNA, 4273 bp, Oryza sativa
gcgagagctccccgctcgcaaagccggccccgagcgccgatgttcgcccgcgcgcagcgtggtttcccgcccgagccgcgtcgtctgcgccgtccgcgtcgcccggtcccgctgcccagccgcgccgcccgatgcttcccgcgcgcgcgtgccgagtggtcgaccgcctggtcgccgccgccgtcaccctctgccgcgccagcccgcgcctgtcgcccgtgtcgtcgcgccgctccaaaccatcccaccgtcatcgccgtcgtcatcccccggcccccgccactccgcgcgcaagccgccaagaggcggaagccgcgcccctcctccctctgccgcgacgctcccgctccccttcccctttttcccgaatcggcaaaggggcaagcccctttctccccctccttttcccctttttcctcctcgccggcgtcatcctcctgccgccgctttggctgcaagcgccgagcgccagctcgcgccttgaccgttcaatgtcggtttccctcgcccaaaccgacattgccgcccatttaagcccaagccctccccctccaaactctctcatttttgcctccgcgccattgccgccctctgtttcgccatcgccgatcgtcgttgcgcatgtcggaggagccggcacgagcaaggacgcggaagaggacttcggccgcgccctcttcttcctcttccccggcccgaggccggagagattactcccgcaccgtcggcctctcgtcacagcgccccgtcccgcacggtagtgtctccctccgttcttcctcctcgctccatctcctccccttagatttcggtagtagctcgagtagcctccccgtagttagccggcgccgccccgaccgttgccgtcgctcgccgtgtgctcgccgccgtcgccgcccgagctccgtagcacccgctcgtcgccggcctcgctcggcgtagttccgcccaatccgacgctagcgtcgagttcccgaagccgcgtagatgctctcaccgccgggaatcggcccctcgtggcctcgtcgccgtttccctcttccctcgccaccggttgccgccgccgcaatccgccgccgtcgagcaacctccggcgaatccgagccgttggctcgtctcccctcgtcccgtgcaaccgcccggtgtgctcgcttttgcctgtatcaccgtggttcgctccgccgctcaccgccgccacccgccgtccattcgcggccgggtcgtcgtctacctcccgccggcccgcgtggcagccacgtaggcgccacgtcggcgccagctcagcctagaccgggtcgagccgaccccggtcggtccctccccgtgcgcgcgttccaccgcgagccgtgaggctgcgcgtgggcccgccgcatccgcgtccaccgcgagccgcgcgcgtgcaccgcgtcccttccccgcccgcgcgcgtgcgtcgcgtgctccctccgcacggtgagccgagccgctgataagcgggtcccacccgggaccacgcgtggtgagcccggtccaccggctccctctctctcctccctcccgcgcgcgcgcgcttgggccgtcttgggccggccggtccgttaagctcggccgagccgccccaaatctcttgggccgcaccatagccacccgagaaaagtctatattccctccctcccttcttttctttttcttttccaaaaaaagggatttaaataaatccttttcctttagacaaaaatccaataatcttagaaattcaatatcttcccaaccgtaattccgtttgactccgttcaacttctaaaatttcccaaatcttgagatctatctagtggcacgcttagaggtctttaataggctttattttcgccgtttgttgagttgttccgtttcgcgtgtagttccggagcccgaagacccgcagtgcgaggatttcgagcatcaagctccggatcgcgagcaaggcaagccacctttgaacatcttgagcctatatttgaaatttaattatattgcttgcgaaatattatgcattgataggatcacactaaatctgttgtcccgtctgcaaggcagattgacagacctacctaaattgttgcatttgatcctttccttgttaattgttacaccatgtccccttgtaaccacccagttgcgcctcgatattcgtgcactctgtgcgagtatcgacggtcgccttcaaacttaaaatctgagtaacaacttgggtaaaactggagttttacaaaagacttggaaaacccgacacctgggtcggtgcttgcgaactaaatgaatttccaaaaccgcggaccggggaacgtaccgggtgtacgatttcccgctctcgcacttaaggaccgatttccttggaatttcatccaaacataaggcaagtacgaccacatgggtggaatgggacacccctggctgagtaactagcttatcaggggagccttgatgccgagagacatgtggattcgccggggtggtgtcggggaggacccctgggcttcctggcacagtatggtctgggacctaacctgttgttggtctgggacccctctcgtcggcatatggtaaacctgtatcggctttcgaaatgccttgtcatgaaagcttggaggtctcccgacgtggctgatccccacgggctgggtgatccgggttagtaatgtcgtgtgggtaaagtgtaccccctctgcagaggttaacaaactgttcgaacagccgtgcccatggtcatgggcggatgtgaggtgattcctagcgtagttttgtttgactactgcttgtgaaattgctgttgtgaaaaggggattcgatgtttgaaaaatcagcagctgacgggatcagctaggcccgggtggccgtttgaaaagttgttggcccgggtggccgtttgaaaagctgttggccgggtgccaatcttgtttcaattctaaagattgatgcattgcacatactccgaccggacgagacgcactgtctcatccgagtcgtttgagaagcactcacctagtcgttttagaaaagagttcaaataaaataaattgcaaaaataacagcctttccttgaagcctgcaataaacacttatttcccctggcttgctgagtactcccgtactcacccttgctctatataaataatccccccccagttgctgaagaagatgaagtggatcctgctgacgaggagttcttccaggagcaagtcggctacgatgagttttagggtttcggcctagttcccaagtcgcgcctgtgatgattggtccaagtcctggcttccgctttccttttgtaatgcagttgtgagctcgggatctgtccgcagcccaacatgactgtacttctactctataataaagagacctctgttgctgtgatactctgtctccctgtgataccagcactgtttcctgggactggtatcgattaacaggttaatttggagcgtcacgggctagttccggtcgggactagttcggggcgtgacaggtgtatgcaattgaattgggtgccaagagagccccttgctgctggtgggggagtatttatactcccacccaccaacactagccgttgggggcgaaatcccccaactctgtgctctgccggtctgaccgtaggtatgtggccggtcaaaccgtgctactctgcacgggctaaaaaactagccgttgtagccctgtcagagggccccatcggcctggctggtcagaccgacatggggtggccggtcagaccggcctcggctcggtcagaccgccatcggctcggtctgaccgaatacagctccgtcggctctgtatcggccatcccgagcagcaccatcccggcctccagggggccggtctgaccgcgcatgtgccgccggtcagaccggccttatgcgccggtcagaccgccttcttgcggccggtcagaccggctagggcacgccggtcagaccgccactatgtggccggtctgaccgctcctggtcaggccgaacccagtgaagtgtgtgtgtgtgtgtgtgtgtgtgtgaaatgtgagcacaagtctaaatgcataatgacctaatgtggcaattaaaatcatctctttgctaggtcattacccctcttaatagtacggcgaaactaaaaataaactagcaaatttgatcgccctacacctcgatcaattctaaattaaagcgctagttttaccgtcttctttccctttgctttgcgccgtcaattttaatccatcgataacccacccatgcgcacgtatgacgtggacctaacttaaaatgtatag

SEQ ID NO: 6635 - DNA, 16771 bp, Oryza sativa
tcctgcagcccttccggcgccgatttggatttaggattttgaatctggcgcttggtggttttttatataggcgcgggggtttggcgatccgcgtgatgtggggtgcgcgccgtcggatcgagatgggagggaacggtggggattcgttttgggggggcgatccgtgggagcacgcgacggaccaatcaggtgcgcctgtttcgtgttggtgtctcaaaatggaccctcggtgttggttgggccatgcgactgaattaggaataagttcaccggaggaccctcaatttaacagcgagattttttgaggccttcaaccataaaatcagaaatgttcacccctaaactcattcaaaccgttcaaagaaggtcccatgacaatatttgcgcccggttttgctgacgtggcatcctagtcagcaaaaaatataaaaaaaatatgtagggcctacatgtaagtgagagaaaatggtgtaggccccacatctctcctttcttttctttttctcttctcttctctcctcctctcaagcaggcaaggcggccagcggcggagcaggggcggcggcggcgggagagggggagagagacggctggcacgatggcgagctcagcggcggagagtagcggtggttggggagaggagcggcaggaaagggggcgccggcagtagcagttggtgtcggcggcggcggcggccggcggcgagaagagtgtgcagccgctgcggggggcagtcgaacgaccaccgcgacgaccttgcccggggtatctactgcgctgtaggattgagatgtcgactagaggggggtaaataggcgatttaaaactaaatgacacctaatcaaaactaacctaagttgctaggcttagtgagggtgaactctaactaagcaactgagttatgttttgcaaacctagagtgatagtggctcaactatatctctaggaaagtaaatcacactcctatgtcaatgtttagcaatcctagggtgatacgatctcaagtatgtctctagaaatgtaaattgcacaaatgtaaatgcgacaatcaaatgagacaaggagacaagagatttttcaccgaggttcgaaaactcgtcggtttcctactccccgttgaggcgagcccaactccaccgctcaaccacgaagccaccgcacgcccccttcgtcaaggggtgggcaaggcgggagctggcccacggagaggactacccaagcctcgatcactagggttgttcttccttcactccgaaggtggtgaactccaaaccactcacaaaccggcgccgcgcctcctccacaatcttctcggagaggtcaccaagcaactcctccacaagccgtctaggagacggcaacctccaagagtaacaagcaatgacccgacgtggagatgatcaatcaagtgccacactagctctacaaatggaagcaatgcacttgactcttggctaactaacccactaacacactagatggatgaacacaaagctcaagtgggtgtgagaaaggtgcaaggggtgtatgcaattgaattgggtgccaagagagaacccttgctgctggagggggagtatttatactcccaccaaccaaaactagctgttgggggcgaaatcctccaactttgtgctctgccggtctgaccggaggtatgcggccggtcagaccgtgctactctgcaacggctagaaaactagccgttgtagtgctgtcagagggccccatcggcctggccggtcagaccggcgttgagtgggcggtcagaccggccttggctcggtcagaccgccatcggctcggtctgaccgaatacggctccgccggctctgtatcggccaccccgagcagcaccatcccggcctccagggggccggtctgaccgcggatgtgccgccggtcagaccggccttatgcgccggtcagaccgccgtcttgcggccggtcagaccggccagggcatgccggtcagaccgccactatgtggccagtctgactgcccctggtcacgccgaaaccagtgaaatcccaagtgattgtgtgtgtgatgaaaaacgagcacaagtctaaatgcacaatgacctaatgtggcaattaaaatcatctctttgctaggtcattacccctcttaatagtacggcgaaactaaaaataaactagcaaatttgatcgccctacacctcgatcaattctacattaaagcactagttttactgtcttctttctctttgctttgcgccgtcaattttaatccatcgatagtcatccatgtgcacacatgacgtggacctaacttaaaatattatctcaatagcaacggttagtccacaattagcgtttgtcattaattaccaaaattaacaacgggggacttgatgcttcaatcttcccctttttggtaattgatgacaaacaccacaaatatatatataatcaaacatagatcacatggacatatattgcaatggaaatcaaaagctccccctaaacatatgcatattaatcattgacaacaaatatggagccaatgcacatttcaatttcacattccaataagcacaaacacataagcaatatttcaatgtgaacttcaagaaatattcattcatgagcataagatggtcacatatatagcaatatcgcatacaccatccatcatcgcacaagttcacatcacttaaccaatcaaatcacaaaagtcacaaatcatcctaaaagggctcacaaataaacataggctattacaagaccacgaagggtccaaatgacatagagtttaacaaaacgacaaagaacacacaatatagagtaatagcccatacccatacaaaatatagcccaaaacaccttagcctattagaaatgagggcactatcctcactactactagtcccaacccacaaaacataaatcactcttttctcccccttttggcatcaagcaccaaaaaggtcttcactcttgtggaggagaaggagtacgtgccgaagtggaaggatgaggagcatcacgacgacgatgatacacaaatgcttgggagctctccaacatttggactcgagaatccaatgtacccactctagtgtgcaatctccccacggaagcattcaagtctccaacatccgtgtgcaagccacgaacatcctcatgtaaagcttcatgcctggtagacaagcgttgaatgctttcacttagggtattaatagccccaagtaccgggttgaagtattcgttgggttgcattccaaaataagcatactgtggatggaagaaagcatttggatcatgcccaagaggaggaggaggtgctgagcttgagctagctccaggatgagaggaggacgccgccctaggagcacggggagctccaagctgaaggcggggcttgtactgcttgtgcttcttcaaattttgcccagcagccccaagcttgtcttgaatcaacctcatgatgtaaggggcataatagattccctgagtaaaggtctccttggagatggcaatctcttgcatcatgagagacacaatatcgaactgacggccctgaatgatggcatcgatgacgtgccaagccacccccctaatatcatcattgttatcaaggcgagggaggatggtagctctcacaatcctgttaaccacactggggatagtcctcagaccggcaaccttcccatgtgtgtaccgcactccatcttcataaaactgagatagatagtctatggagagcggattatgggtgtgctcctcatgcaagtcatttccaaagtccaagcgaatattgaggagccgccggaattgcctcctggagatagaacactgaagggtgtcggacatccacttcatctcactatagtctcagccacccacactgtagcatagaactgccggatcaaatcttcattgtagtcttgtttgagagtcacaattcggtcaatgccaacagtcttgaagagatcctgcaagcattcaaactctagagtctcattgatgtctctccaagaaatccacttatgctctgcaaaagctttccctgcataaacctgctcatacacactcttctagaaagcggtgtgaaaacggggatccggggtgtcccgaggactaaaaaactgatcatggtgcctcaagatggtgtactgcgatagattcctcatgttcacaacaaactggatggagagatcaatgtgcatatcatcacttccttcatcctcatcctctccacttccactgtcatcatctccactagcctcctcactagccccttcaacattggcctcaacctcttcatcactttgagcgtactcatctccgctcgattcctcaggctcactcacgggatccggagtgggtgcacgacgaccatggcgagtgcggggaggcatcactgtcaaagagcaaaggatgatagatattagcaataattctagaaacaatttggagaggtgaaaatttgcctatatcctatggaggggtggtcagaccacagccagtaggacggtcagaccgacagcatcaggccggtcagaccacccatggggtcggtcagaccaacggcatcaggccggccagaccgcccgctggtggccggtcagaccgacggctgccggccggtcagaccgggcgcacacaccggtcagaccggtggctgacccacggtcagactgcctgtggctctgggcagacctcctcccacaagttcaagcatccaaaaattttcacatcttcacatttgagtctaaaaattgctagaacaatatagctcaagattggaactagaacatcaaatggtatggcctagttcatcaagattggaataactacccatagccctagggtgaaatagattgatttgagagaatgcacaagagagagagtgatttaccggttgaaggggatgaatcacaccaagaaactaccctctactggtgcaaatcaaagaacacctcgtgcttcacctagggttccatgccatggatcaaaaactcaacaaaaacacgaactaatccatggaatagagagaggaagcggaggagaatcacttacggtataaccggagagaaatccgcggtcaaaccgaggggatttggtggaggaaagagttagggtttgagggaaggtgagagagagagagagagtttttcgagttggggatgaatggggatgagatgggagagggtaggtgcgggatggagaagaaaaggggcaaaaatgcctgggtccacctcggccagtcagaccggccctattcgaccagtcagaccgctgcacctgccggtcagaccgtgcatatagcgccggtcagaccgccaggcccccgccggctgtgcacagcccttgcacaagccggcaacccccacacaataaaattcaacaaaaatttgatttttggagcaattttgaaatgtgtgaggtgaaatattgccaaccattcataacatttgaaaattatgaagatttgcaacaaaactcacttaagtgctaggaggtgaccttttatggtctataggggtttttgggcgaatttgattttcaaataacttttgaatgattaggattttgaaataggtttgaataccaaaaacatatcaaatcttcttctctaccaatttgttttgaaacttttctcaaattccttctcaatctcattttggggataaatctcattttggccaaaactaagaatctagtttcttcaaaatagggccaaaatggcatttttattcaaaaattatttttcttgcaatgtgaggcttggaaaacatataggaaaccttttgaaacattttccaagaaatagttttcaaattacattgattttgcaaaagttttgacttatgttgacttgggcattttgaaaatactactagcaccactagttgatttgctcacatataaaaggaagtagagcacatgtaagagtgcaaaactcccccttaatgtgacatgctccattttcgcaatgaagaaccaaatggcaataaatccaaagcataagagcaaatgagagcaaatatacataatgcaaaaagaagcaaccatggtgcaccatctcaagccacattagagaaatctatgacatttaactcatttctcaatttgaaaaagcgggtttcatcaagtggcttggtaaagatgtcggttagttgatcatcggttcttatgtggctaatgactatgtcacacttggcagcatggtcttttaggaagtgatggcgtatgtcaatatgcttggttctagaatgttggaccgggttattggctatctttatggcactatcattgtcacataggagtgggatttttgtgaaggatatgccatagtccaacaatgtttgtttcatccaaagcaattgggcacaacaactacccgccgaaacatattccgcctcggcggtagagagggctacggagttttgtttcttggatgaccatgacacaagggatctaccaagcatttggcaactaccggatgtgctctttctatccactttgcaaccggcataatccgaatcggaatagccaacaagcttaaacttagcaccttttgggtaccacaagccaatagtagaggaatgctttaaatatcttagaatccttttcacggccactaagtgacactccttaggagcagcttgaaaccatgcacacatgcaaacactaaccatgatatccggcctagatgcggtaaggtaaagcaagctaccaatcatagaacgataaaactttaaatctaccggtttacctccctcatcaaggtcgagatgcccgttggttgccataggtgtcttgatgggcttcgcatcctctaagccaaacctattgagtacatccttgatatacttggtttggctcacgaacgtcccgtccttgagttgctttatttgaagtccaaggaagaagctcaactcagacatctcaaattccctagacatcatatcaccaaattccatgcaaaatatctcattagtagaaccgaatatgatgtcatcaatataaatttgacacacaaagaaattatcaccaatgatttttgtgaaaagggtggtgtcaacttttccaattttgaaatcctttgacaaaagaaaatttctcaatctttcataccaagccctaggagcttgttttaaaccataaagagcttttgagagtttataaacatggttaggaaatatgcaacatttggcttcctcccaacaattagctcataagaagtctttttcaagagacgatgcaaataaagcctattggttgcatggcaagcggtgtttatggcttccgcccaaaaggaatcggaaacaccatattcatcaagcatagtccttgccatctcaatcaatgtacgatttttcctctccactacaccattttgttgaggtgagtaggtagcggaaagttcgtgtttgataccaagatcatcacaatagtcatcgatattggtattcttaaactcggaaccattgtcaattctaattttcacaagagtgcaattaaattcattttgggccctttttgtaaatttttgaaaagctcagcaacaatagacttatcatgcaaaaagaacacctaagtatagcaagaataatcatcaacaatcacaagacaatgactattaccaccaatgctcttataggttgttgggccaaacaaatccatatgcaatagctccaatggtctagatgtggacatgatactcttagtaggatgagaacatgcaacttacttgccggcttgacaagcactacaaagcttatctttctcaaacttcacatctttcaagcccacaactagatcacgttttgaaagtttgctcaattgattcatgccaacatgtgctagcctcctatgccaaagccaacccaatgaagtttttgcaactaaacaagttttcaaatttgcttcactagaattgaaatcaaccaaataaagatttccatatctaaaacctttgaacacacaagacttgtcaagaaggctagaaacaataacttcttgcgggaagaaagcacatgacaagctaagatcacaaatttgagcaaccgaaagcaaattgaaatttagagatttaacaagagagacattatcaattgacaaatcattggagatagcaattttacctaacccaattacctttcctttgctattgtctccaaatgtcactttctcttgttctttccctcctacttcaaatgtggtgaacatagccctatcacaggtcatgtgttgagtgcatccactatcaagcacccaatgggtcccaccggtgcggtagttcacctacaaaagaagatcaagctcttttaggtacccaaacttgtttgggtccttggaggttagagaccaaagctttgggcacccaaatggcattctttttaccatcgagtataggggaacccacatatctagcaacaatgctaccatcatgagccttcctaagcatataatgagaatcaaacatgcatgtcttaggaggcttaccaccagggcaatcattcaccaaatgcccaacctcacggcacttggagcaatacttaccattgctcttgacaaaacgagtggcacggtgagaaggtttcttacccttctttggaatgaatccaagtccctccttgttaaggatgcaccgttgctcactcaaaatcttgtcaagagtgttcttacccttgaagcacctctccaaactcttattgagcttggccacttgctacttaagctcattgttctcaacaacaagtgaggcatcacaaatggaaatacaagagctagagctagagctaggcatatctacaagatcatcacaagaggtagaaatgctagatgatgcaacatgagcaatatggcaagtagcactatcatcaagcaaatcacaagatatgccaacatcaatgagagctctatgttaagtagtggaaaggaggttgtcatgagcttccttaagcttctcatgagaaatggtgagtctctcatgagaagtctttagctcctcatacaaagcctcaaaagaagcatgatccttctttagggccttgaacttgacaatctccttctcactataagcatagagctcctcaaacatactcacaagctcatcataggaaacatcatcacaatcatcatcactctcactatcactaagagatgttaccttagaggagccctttgccatgagacaaagtggagagaagagtgatggagcctccttgatggcaacaacggccatcttcttcttcttggagcttgcatcatcaccaccttcttcctcagacccggatgaggcggagctctcctcatttgagtcccattccccgatgaatgcctcaatcttcttgccttctttcttaagcttcttcatgagcttgtagcctccactcttcttcttggatgacttgtctccatcatcatccttggaagggcacttggaagcaaagtgtcccttctcaccacactcaaagcacctcaagttggagagagtcttgttgggtcttctatttcttctcctatttgagttggagccactttctctctcctttctccttcccaagagatcattgaaccttctagcaagaagggaaatctcttcctccaagtcctcattgacttcattcaccttgcccttgcccttatcttcaacttcggcttggagagcaatgcacttcttggaaggtgaggcttcctccatctccttcttcttcaacttgtacatgtcattggtgttgatcttccccaagaggcttgcgggtgtcatccttgacatatcggagttgatgagcatggtgacaagggtctcatatttctccggtagagccctaagcatcttttgggcaacctcaagatcggtgtagtttgccccaaaccccttgagaccattcacaatgacattgagcctcccatacatgtcattcacactctcatgaggcaacatggagaatgtctcatattggatattgaggaaatgaagcttggcatccttgtactcgcttgtgccctcatggatctccgtcaacttgttctaaatctcatatgcggtctcaaggttgctcactctatcgaactcctcttggctcaaagagttgaacaaagcattcatggcttgggcattgagtttgaggttgcagtgatcaatctccgtcaagggcgtgccggtgatagcaaagcctacatccacaatactccaaatatggaagctcatagctttgaggtgagtagacattttaattttccaagtggagtagtttgtgtcattaaacatgggagccttccctacatggttcacctcgttcgacatcttctctctaggcggtgaagcctaatcaagagagatcaagctccgataccacttgtaggatcgagatgtcgactagagggggggtgaataggcgatttaaaactaaatgacacctaatcaaaactaacctaagttgctaggctttgtgagggtgaactctaactaagcaactaagttatgttttgcaaacctagggtgataatggctcaattatatctctaggaaagtaaatcacactcctatgtcaatgtttagcaatcctagggtgatatgatctcaagtatatctctagaaatgtaaattgcacaaatgtaaatgcgacaatcaaatgagacaaggagacaagagatttttcaccgaggttcggaaactcgtcggtttcctactccccgttgaggcgagcccaactccaccgctcaaccacgaagccaccgcacgcccccttcgtcaaggggtgggcaaggcgggagccggcccacggagaggactacccaagcctcgatcactagggttgttcttccttcactccgaagatggtgaactccaaaccactcacaaaccggcgccgggcctcctccacaatcttctcggagaggttaccgggcaactcctccacaagccgtctaggaggcggcaacctccaagagtaacaagcaatgacccggcgtggagatgatcaatcaagtgccacactagctctacaaatggaagcaatgcacttgactcttggctaattaaccctctaacacactagatagatgaacacaaagctcaagtgggtgtgagaaaggtgcaaggggtgtatgcaattgaattggatgccaagagagaccccttgctgctggagggggagtatttatactcccaccaaccaaaactagccgttgggggcgaaatcccccaactttgtgctctgccggtctaaccggaggtatgcggccggtcagaccgtgctactctgcaatggctagaaaactagccgttgtagtgctgtcagagggccccatcggcctggccggtcagaccggcgttgagtgggcggtcagaccggcctcggctcggtcagaccgccatcggctcggtctgaccgaatacggctccgtcggctctgtatcggccaccccgagcagcaccatcccggcctccagggggccggtctgaccgcgcatgtgccgccggtcagaccggccttatgcaccagtcagaccaccgtctcgtggccggtcagatcggccagggcacgccggtcagaccgccactatgtggccggtctgaccgcccctggtcaggccgaaaccagtgaaatcccaagtgattgtgtgtgtgatgaaaagcgagcacaagtctaaatgcacaatgacctaatgtggcaattaaaatcatctctttgctaggtcattacctctcttaatagtacggcgaaactaaaaaataaactagcaaatttgatcgccctacacctcgatcaattctaaattaaagcactagttttaccgtcttctttctctttgctttgcgccgtcaattttaatccatcgatagtcatccatgcgcacacatgacatggacctaacttaaaatattatctcaatagcaatggttagtccacaattagcgtttgtcattaattaccaaaattaacaacgggggcctagatgcttcatgcgccgacctgcgctctcctcctcttcgtccgctttgtcttctccttgcactttaaccatttgtctaatgcagtgatgttgtttccctcatcttctgtgatgcatgcgcgcacttggaagaactttgtgatgttaattcttctaaattttcctctatggttccgatccagtagtagagttcttgttcatgaaggattgtgttcctctgaattagttcctgtaagcattattcctctggaaggaaatccgaagcaaaatttcacaaatatggccatggaaatgaccgagattaggaaaaattgcatcacgggcagtcagatctaagaacctgggaaagaatagaacttgacggagtggtcgatggagccggacgctagcgacgcgactgaattgatgtggaagggtgacccagcccaccaactaatctggcccacgaaattcatggcggtggcacacaggcaaaaatacagtccattttgcctccctcgaacatccattatattgcattttgccttctgagcggttttgacgatggaatccaatgagggctttgtacagttttggagtttcctttaattctaattcaggtggggagtccccccccctccccgcgcggtggtggcattcaaaaaaaaatccagtgagggcacgatgtcttgcaagtagatcgcagctgcacgaatctaacggtgaagacaacactgtcaaaggtgctctggttgaatcaagaacgtgatgatgatatgtgaacaacggtacacaagaagaggctcgtcttcccgatgaaccgttgcactactgttgagggtaaagattatgtgtaccatggtagttctgcaagaaactcaccgtatagagagagccacgagggtggagtttgggatggcgtcaatggtgaccacaatagtttgggcgttcctggctgaccatgtaccatgtgctccaacagccaagcctttcctctacaagtggtgaagaacctctcgagaatgaactcctcgagttggtcgggttgaacaccacgaaccctgtcaaacagcttggagcagagcttcaggacaatgtggcccggagagccactttcatgaggtaagacacgaatatcctgaatctaccacaggtgttgaagatgccgccaaacacataggtgttaatatatacgacaaaatagaggaggggatatagagaagatggaggagaaactaagatgttttttcctgagtggaccgtcaacataataccatgcacgacaaaatcgctttcaaaagcgtttgaggatataaattaatctcgtagttgagggagcttttatactgtgttttgtggttgtgggatatgaattagaacgtatatatagctaattgagtcaaaatggactttttcccaacatgcaatggtttgtcaatttcatgccgtgttcgaggaaccaattgtaggggtgtggaaaaataactaatacgaaccaactaagaccaatactgcaatgactaagaccaaaaatttcaatcattaactctaacttaagtagagatatacgaaatgtaaacataagtttttcaaaagaaggcaaaaagaaaaaaaatgatataagctatctagttatatgtttttcattcatgtccagtaaaggtgagaccaccaaaggagagaaaaccgataagtgagacgacaaaagtaaggagcgattcactcaagacattttataaacggttcaaggtagttatattttttttctttttccactattatcttactggcataagtaacatagacaattagtttgagagtcaaatagggaagggaggtaaaaaaaaccaattttatataaaatagtaaaagaagaaggttcaggcttgcgttattacatatctgttaacgacttaacaaatttggtaagtaatggaccaggttcggcattggaatcgaagtggattcggcaaaggattgtgatcgaagaacagagtgcgtatcggctgcggaggcattggctagagtctgcatcggttgagatagatcggacaagggatagccgatacaaccgattctattaagatggctgtgggaccgtgtttgaagtcgatcaaagtgttacgaaaggattgccacgatggggataagctctcagataaggcaattgtatctattaattagaatattttgaatagtttctttagagatatgtttgggcaaaagtctaccgtaaagacttgtatcttagaatttgttagagataaggaacttgtccggcatggacttatcatgtatctcgggtataaatataacccgaccccatgtaatttacaacaacagttcaataacactttcggcgcatcgccacccttttcactttcttctatttcgacgagttcttactttcgggttgagctgcatcgattccgatcttcaactagaggtaaacttgtcatgacggcttgcgttcttgggattagtgcttccatctttatgacactctaatcctgtttatgtaattcgtcgagttatcttatacactttgcaatctctgttagttgcgctatataacttgttatcggttgttttatactactagaaagtagtcaatagagttatgtctcgttattaatctagattatatcgtgtatcaaccatcttttagaggttttcatcatcctgcctagatctcatatttatctttatgcttaatgctgcatcggttggattcgatctattaagtaatatccataattataatatctggcttgttttaagattatcgatagagatagtgtcggggtttcagccgatcttacctgatttagcaactttatatctcatatgcttgattgatatgctaggtctgccctttatgttaatatcttattgcattaaggtatattaggcttcttgtttaatatattttgcatgttttaatatcttagtataaagtggtatcggagtattagccgatacatgctagatctatctgatcggctatgctattaaacgtctatataatcattgctttaatgtatctttcgacttaagtgatttatactgtctcggcatggtgaccgatctatcccaatcacttagtctaaatatacatcgaaggaatgattatatgtcgttaatatctacagccgatcgagtagatttagtcttatcttatttattcatgactgtcgatcaattccaaacatgacatcggcttgaagataaatgatatatcatcggcaactagccgatcggctatcgtttatggatttaaccgtgtttctcttgtctttctttcttgttgattgcaggatcaaatcaactggcacgctcacgaacctaaaagcgaaattttggacctgcacaagagttaagcagatcttccaggccagtgtgtgttttttgcatcaacaatatcctatcgaataagtgttagggaaatctttcaaaagaacttttccatagataggtgtactatggatgaattcccacctccttggaggagtgaatgcaaggaccactaaaaaatggatactttactgaaaggcaagtgcttatttatgctttatgtagtggtcagccttcctaccttcatgcctctagaagcttctacaaagctttgcttccggtagaagctagtcgcttcggtagcttgcctgccaagccacctataggcgaagggccgaagcattgattttgcaaaccattagtttatatttaattttctcgattcccttccgacggactaagaatatgagaaagttaccagccgagacaccaaaggcgcgttgcaaaggattcatttgaaacttatactgcgaacgctttcctcagattcaggagatgttgtttctcgggctgagggataataacaatatcatcaatgtacaccaccaattctcgcgtacctaatcgcacttatcgccattctggttgcccttcggtttggcctaagagttgggtccctgtctgtaattatgtgggtaggtaacccatttatgacttgtagtctttctgcttatgacgtagcactattctggcaatgcatcatgaaccgatatatatattgtttgctaatacacgaccaattaatgtttataaaaaaaagtttttcagtcatcccattttaaggactcacagaaatagcttggatagtatcacaatctcttctatactgtagtactggtaattcacgttaactgaagaggagttattgaaacaaaaaataggattaaaaaggtactcactacaatagtcgttctattttttgcacaatcatctcatcggagtggatagtatagccttttttaagtaaagattttctttaagacagtgtaaaaaattcctggacagggccttacagacaagcgcgtgcacacgtgtccccttatccacccggatgtcatggagtatatataaccccctccctccacacactgcgtcaaccgtcaagagagaagtattcggaaagaagagaaggaaaaaaagaatttttagagagaggaggaaaaaaaatatccccaatcccatcatcccttcacccacccgcacgcgtctcctccgactccgatccgagctccagatctgcggcgccggcgaccaacctctccggcggcgggggcggcggcggagatccacgatgccttcgtcggagcagggggcctcgcccctgcgccgcctcctccgcgtcgacgccctcgtcctcccctccgcttgctcccaccgccttaagccttggtctctccatccccacctcctctcatcctcctaacgccatccaatctctcttctccccgtctctttctcctgctccccgttgccctcccatttcttccccttttcttct

SEQ ID NO: 6636 - DNA, 4287 bp, Oryza sativa
taaggtaattggtgaaatctttcgcacttgtgccgcagacatgttccgccaatcaaggcctcctcatttttcatccctaccatgtcatattctgccccatgttcacactaattgctcattttatacccatgggggagaaatcgctgtttggtgtaaactgtcagactaatgtagttacctgttatactgtaaatatattttacatttcaattggtaactcaagaagaagtcagcttggaataggacaaacaaatggtccactatttttgctctctaaaagtcattcaaactaggagtacagcctaactcgatgatgtcaaatcatacaactctgaaagagtctgctctggaagaaccttctaatctcacatttaaacaaccacctactgtgcgctctttttctacgatattgccatgctgcatcaggttcatcataacttatgttccatttcttttttcttcaaggctttttatagtttctgtctgattttctacgattgctctggtcgaacctattcgtttggtaatgatgtgattacgtctgtctaaatagctgggatatttatatccatggaatacaaaatattgacaatgatttctagtgttgccaattcttattgatttttggtgggccaattgggtcctatgatctcttttgtgcagttaatcattttttaccttcaaaatttgacattttttcagcttgttcctggatttctgatttcattaactggacttatattgaaacggaattaattacgaacctttgtactccatcacaggttgttgccatggctcccgctgttgaagccgtggagaagaagacaggctcagcccccgtcaaggcccctgctctgaatgaaaggatactgtcatctatgtcccggagatctattgcagcacatccatggcatgatcttgagattggtacatgacatttcatcttgacaaaccatcaattttctatatttctctcataacttacttataggttcctgacttcttcctgcaggacctggtgcaccaactatattcaactgcgtaaggccaccataacagattcacatttgttttttctcccagatttagtttgatacatgttcttattggaaacttatgtcaatagcatagcccttttgaagcgcctctcattttgaacttttagagttaatgtgctggctggtatttcacattacaccaagaatttctcgaccaaaagaaaaaagaaaagagaggaaaaactctaacaaattgtgtctcttttctgtcacttgtcaggtcattgagattcctaggggcagcaaggttaaatatgaacttgacaagaaaactggactgatagtggtaaaacaaggcgattcaattgattcatcattttttttagtgaaaccatatttttccagtgactctaaaatgttttgtacatcatttggttgtatgcacatgtaaaggtggaccgtgtgctctattcatcagttgtgtaccctcacaactatggattcattcctcgcacgctgtgtgaagacagtgatccgttggatgtgctggttataatgcaggtatgtctttgtattttagttggtactagaatcctattgcttgtactcttaagaaaaacagtgcacaagtttcttttcccttcagccattatgtaaattctggtttacttttcttgatatagccatgtgaaatcatgggctttggcttacctcttgtccaataatagtatcattctattaggttatattcacatctcactccttttgtttggggaaccatattaaattctaatttttgttcaaacaggagcccgttataccaggatgcttcctacgagcaaaggccattggtctcatgcctatgattgaccaggtttggcttcattccaacatttacaaagtccagcgaaatgctattctgatccccatgtttctattctgaccccatgtttgtttgaacagggagaggcagatgacaagattattgccgtttgtgctgatgatcctgagtacaagcattacaatgatatcaaggagctcccacctcaccgcttggctgaaatcaggcgcttttttgaggactgtatccttttttatcaacttaatatcaagttctgcattctaaatgaattctaggcaataactcatgtcctaaccttgaactccaccaatatgttgttcccatatgtgcattttctgaaagccatttggcactattttatatctcaactgtcttgtatcatatgcacacatggtcaaccacacaccaacttaaatactcttgggagtcccaggatcatgctaatttcaaaacacttgtcacctcttagaccgaatggtttctttaaccgagacattcagacaagaagaatgagaacaaggaggttgctgtcaatgacttcctgcctgcaagtgctgcttatgaggccataaagcactccatgtgagtacttcacttgcataagtactacaacatactgtacatgtttgtgtaaaatcacatcaagctgactcttaaccatgttgatgttgccattcagggatctctatgctacttacatcgtggagggcttgaggaggtagacttgtgccgcttcctggaccgagaggatggatgttgacgaaaattgtggagatattatcaccttatgaacaaatactattattttgttggtgtgtgatatacaccggtattattcacatttcaagtagtaacagcacaagtagaaactactagtagcacaacaaagagtgatattccttttatggccctcggtgccactacgatatggagtattggtgaatgatgatactttatgctgattctattgatatggttcgagcaaagatttgcatatttttttcatttattatcaagtactacatctgtttcaggttataaaactttctagcattgcccacatccatatatatgtctagattcattaacatatatatggatgtgggcaatgttagaaagtcttataacctaaaacggaggaagtaatttgttatttatagttattacaaatgtgcctggtcatatgtgaaccgaaggaagaaacagcaaaacttggacccatttgattgcatgcatgtatggaacagtttatgatttgttcacttcattgccaaaataaaccttaccatttgttggtaaagcaaaagtggcaatgccaaattttgatacttaccaagtgttgatgaagttttgtgagtggaagactctacaattatcaaattctgtttaagtttggaatagtaaaaacttgtttagtttgttactctacaaaaaaaaagactaaaattaggtaaagttcattttggaatgaacaagtcctcaattcccaaaatgatgggaaatctcatagtatcccagaagggcacatcaaagtaactgcggtagcaatatcatcaagagttaatgcttttagatcagattcacaatcaggctattaaacttactgaacacaaacaaatttcaattgagaaaccacatattgaagcacatgggatccagaagacaaagcgagacacttcatcttctcattagaactaccctagtgtcttgcaagctaaaatcgaaaacatccagttaaatgcctagtgatacgaactaatctcgaatcgaacaaactaagtactgcatatacagtgaccaatgaatggaaggacatgaagctaggagcgcgcctgcttcttgggggacttggcggctttgtccttggacgccttggccggcttgtcggccttctccgcggtcttcttcgggagcagcaccgggttgatgttcggcagcacgccgccgtgcgcgatggtgaccccggcgagcagcttcccgagctcctcgtcgttgcggatcgccagcagcacgtgcctcgggatgatccggttcttcttgttgtcccgcgccgcgttcccggcgagctccagcacctgcatcaacaacacgatcccggtcaaccatgctgggtttggaaggatttgggagaggaagggataaacagtggcttgcctctgcggcgaggtactcgaggacggcggcgaggtagacgggggcgccggtgccgacgcgctgggcgtagcggcccttcttgaggtagcggccgatgcggccgacggggaactggagcccggccttgacggagcgcgacaccggcttcttcttcggcccgcccagcttccgccccaccgccttcttcgccgccttgccgccgacgccgacgtccatctccgggaaacgtgagggtgaaatggagcggaattcgggggggatttgaagggattt

SEQ ID NO: 6637 - DNA, 725 bp, Oryza sativa
cgacagcagcaagtgagctcacagagacatccagagctattctatagctgtaccaaagccacacgacaggatgaggatgatctcaccatgagtcggccaccggcgtggtctgcgcggcggcgaggatggcctgcaggcagtcgacgtggccgtagtacgccgcgtggtggaggcaggtcctcgcgtgcaccgagtcgaacatcaagatctggtgcgaaatcgtaactgttactgattttttcaaacagaattactacagtattatcagtatactgattttgcagttcttttctctcacatttgcgtcggcctggaggagcttgagcacgcagtcgatcttgccgtgcatggccgcgagcatcagcggcgtctgcagcataagcagaagaagagcaaagcaaggtgagaaaacaaaaggacaagacgagatctttctttttcattcaaaatcaaaatatgatattttcaagcagatactagtaattcgaaaaacagtagcaaaaaagaagagagattttggtggggatctcgcacctgcttgtgccgattcaccgcgtccggcggcgccccgcgatccaagaacatggagagcacctggaagaagaagaagaaagaaaacaagagagaaagggtgagacaagcaagtcccggagaccgagggaagaagaagaagaagaagcagtgaggtgagcgacctcgatgcggccattggcggcggcgatgtg

SEQ ID NO: 6638 - DNA, 11267 bp, Oryza sativa
atacaaacagagaaaaaatctcaactatcctacgcttcgcctaacagagcaacaaaaaaagggacatgctctgatagaaatagaaaagctgatgagacaagctggaaaaacacttgaggaataccctgatatagagctaccaaaatgtgctgaactacgggaacttggaaacagacttctgaatgaagaaatgagctatgacaaagacaagcagaaagaggaacatgatagcatatttggtaaacttaatgcagaacaaaaggtagcatttgattcaataatagagtcaaccaacaaggggttgggaaaactaatgtttgtcgatggctacggtggaacaggaaagacttacctgtggagagctatcacaaccaaactacgttcagaaggaaagatagtactcacggttgcatcatgtggtatagcagccttacttcttcatggggggagaacagctcactcaagattccacatcccactaattgttacagaagagtcaacatgtgacatcaaacaaggatcgcacctggcggaactacttaaaaaaacatcactcatactgtgggacgaggctccaatggcaaacagaatttgcttcgaggcgctagacagaagtctaagggacatactaaggtccaagggtgaagataacagcacaaagccattcggcggtatgactgtggttctaggaggagactttcgccagattcttcctgttgtgcgaaagggaagacgcacgcaaatagtaaatgcatcaataaaacggtcctacctatggcagcacttccacatcttcaaacttacaaggaacatgcgcctgagctgcatctcaagagatgaagacgagcaaaaaaggactgcagatttcgcacaatggattttgaacattggtgatggcaaaacaacatcagcggatggagaggaatggatagaaatacctgatgacctgatactgaagaaaggaggtgatccaaaggaagaaattgtgaagagcatatatccaaacttggtacagaattataagaaacgagatttcttagaacagcgagcaattctatgcccaagaaatgagacagcgaggaaaattaatgaatttataatgaacatgatagaaggagaggagataacatatctgagctgcgacactgtatgcaaagcaacaactaatgacagtgaaaccgatgtcctatatccaacagaatttctaaatagtctaaacttccctggaatgccaaaccatgtgctgaaactgaaactaggccttccagtgatgctactgcgaaacattaaccaaagttcagggttatgtaatggtacacgaatgaccattactcagctcgggaaaagattcattgaagcacaaatcataacaggaacacatgtaggagaaaaggtatatatccctagaataataatgacgccaacagagtcaggatggcccttcttgctaaaaagaagacaatatccactcagtgtgtgcttcgctatgaccatcaataaaagccaaggacagtctctaaacatggtaggactatatctgcctaagcaagtattcacgcatgggcagctctacgtagcgttctccagagttacaagacgagatgggctacggataatgctagatgacaatgaaagcccaggtgaacatatggtcaggaacatagtgtacaaagagattttctagaaggtattatatcattctcattcatctatattgatcatacaaactatgttgcaaactactcatgggtaccttatcattgtaaatattcattgcagctgctctattcctgcttctctccagtacaacattgattgtgctacaacatactctagcgaaaggctgcaattcaaaattaccatttacagtgagtatttttaccagctgaaataggatgatatttcaaacattatatcttcctttcacaaacaatatatttcatctttgtactatattcaataattactacctctgttttcaaatgaatgacgttgattagtgcaattttgaactaaccggcgtcaaacaaaaagaaatggagagatataaagttataggataattacattttccttctattataacatttttccccagaaagtaaacatccatgaaccatttatttttttagacaatggattaaacaggcttaaacatccaaaatacatgtacacagccaatgagccatttaatcacatcataattccgcaatctttcgtattatgcacataccgtctttccatagagctgtgaacaacaactccatcgctgccaattgtcccctggcgaacaccccagcagctgatgccaaatccactaatcaaggaaaatagagaggacataaccaatacagacgaaggaagatagagaggtcgacacaccgcagccgccaacccacccactgagctaggagataattcaaggaggatgttgaggtgaggacggaacatgggaggtggatatggacatggcgctgcaagcctgcaacagccactggagggagggagacgggaaactacaggagacccacgccgtccccgccacccgctgctctccgcccgcggaccacgccatccccgcctcctaccatatgaagttttgtgaaggtctggtatggtaattatatataaaattatcaaattgaaagcattttttactttgaagttacaagctttttttactacaattagttaactacgaaagctcaattatacagagccatacagacaccctttatgatgggccaaaaaatctcaaatatgcagtacaagagggataacttgaacgtaaagcagagacaaatcgatacagagcaaagacatgggaacagagcaacaggacattagtgcagtacacattgacgatgcagggatgcacgatgcaatacctgaggacagcgcctgttgtacagcccaatcgcgagtgaagcggttggcgatgcagtagctcggcggcgcaaccagctcggcctcgcactccacaaccttgcgggagcgcacgtcagatcgagacctccgtccccgccacccgcgtcgccgtccccccgtccacagcgcctgcagctctccgctaccgctctctgcccgcaacccacgccatccccgccacccgccgccgtccccgccatctacgccagcaacccacgccatccccgccgtctgacgccgtccccgccgcctacgccgccaacccacgccatccctgccgcctgcgccgccgtcccccctgcccaaagctctccgctcgcacctccggcccgcgccatccgccatccgccatccgccctcctcgtccgcccttcccctcagacctcatcctttccattttcccctcttctgtcactctctccttgctatccatacgtatactcgtatagcggaatagaaaagaagagcaaaaaaaaatagcttagacagagttacagagtattagttgcctactactaattagtattttagtcaaagcaaagtgatgcaaaatttgtttggttaagtgcagtttttttttcacaaatgcataattatttcatctacatagattaacaaaatttaacaatcatctgtttttcctgtacttgcgagacgaaacttttaaaactaattgcgccatgatctgacaatgccgtgctacagtaaacatttgctaatgaccgattatttacgcttaataaatttgtctcacagtttatatgcggattatgtaatttgttttgttaataatctatgtgttaataattcagataaccacttttctctatcctctattttacacatgcttctaaaaaatcctacgctatcacatgatttaaaatcttagacatattattttggaccattacattatatcttttcaaaataaaaaacatatataaaatataagaaaaaaaatatgaccattgtaactttaatcggtaaaacaattatttacatccgatagaccaatccttaaaaatacaaatccattccacctctctcccatacataatcactcgtctctccacgatatctgtacgtacatgcaagatatatatcttgcatataacagaattttaaaaaattaccatcgagacaatcgtcaagctactaatgcaaaggttgtttgattattatttgtccagatgataatttgatctaactgggttaatacattttaaattttttacactctatccaaacatccattctattccatactatattttaaacattcatttctatcatatttatataccattttcttttcttttctcaaaatcatttatataccattttctattattttctaaaaatcctgtgttacaaaggaaaccctaaattctttctaataacaacaaaaattatgatagtttaaataatatgcccgcgcaactgcgcgggctaccttcctagttattaactaaatagtaaattaaatacaccaccaacaaattaaaccagaacaattaagtgctgcttgtattgctcgtcagatggtgggtcacgaaactcaattgaaaagaagggtacagtagtgttccgctctactctcagtaagaagatggtaattaagtgtgatggatttgatcaagtgagattgtgcttgaaacttactgacaacaggcgatggcgatcgagtttgacctgaacacagttgatgatacaaatttggcatttcacatgtgagacttaatataacaatcgatatattaatttcacttcatcactagctacagggcgtcacgacacgtcgtaattaaaattaattagaccagctcgctaattaactatactcttcgatacaaagtcaactccatgcgcacaagctagagacgaatgcgaagaagaagaagaaaacttagaagatgcaactatatatcaaacatatatataacgagatatatatagtattagcaaagaaagagagataaattaagggatatatagatatattggtagatccttttgcaaggtcaactccataaacaaagcattgatgcaatggcaatgtcaacgcccctccctcgccgcccatttttgccttctcccgccgcgccgccgccacttcgatcccccctccgatcgatgcgcgcatcggatcgccgccgccgccgccgtctcgtctgagtcgtcctcatcaccaccatgggcaacagcttggcgagcctggcgacgccgtgcttcgcggacgccgccgccggtggtgggcgcgggcgcggtcaccacgccgccggcgacgacgccgttgcgttcgacgacgacgacgccgcggggggctgcaacagcatcggtcacattctgagcttcgatggacgcgatgcgccggcgttcgccatccatggcgtgttgctgccgtcgaacccgtcgacgatggcctccaccggcggcggcggcggcggcggcgcctccgtcctcaacgacggcgcgctgtccatcgggtcgtcgtcgttcgacagctccaactccttctcgttccggacgctccagccgcggcagtactccgggccactggagtactgcaccacgtcgccgtcgacgtcgggcgcgtcgtcgtcgcggcagctcggcccgcgcaccgacaagcagatcctcaacgacatctacgccaaccggcaacgccgccggtgtcaggggtccaaggggccgccgctcctcggccgcctccgcaaggcggtggcgtcgctgctgcgcgccgggccgtgcggcttccccgagcaggaggagcccgccgccatgatcaacggcgtcggcgtggtgaggaacggcgaggagagcatcagccggaacgtcgacgcggcggcggcggacgacggtgcggagagggtgcagtgggcgcgcggcaaggccggggaggacagggtgcacgtggtggtgtcggaggagcacgggtggatgttcgtcggcatctacgacggcttcaatggccccgacgccaccgactacctcgccgacaacctgtacgcggccgtgtgccgcgagctcaacggcgtgctctcggaggacgagccggatccaccggaggcggcggcggcggcggggcggtgcaacgggtgcggcggagcggcgcggcaccgcgaggtgctcgacgcgatggcgcgggcgctgcggcggacggaggaggggtacttcgcggaggcggaggcgcgcgcggcggagtgcccggagctggcgatgatggggtcgtgcgtcctcgtcgtgctgatgaagggcgccgacgtgtacgccatgaacgtcggcgacagccgcgccgtgctggcgcaccaggccgagccggacctgtcccacgtcgtgctgccgcggggcagccaccacgatggcgacggcgacctcgccggcgtgaaggaggcgatcaagcggcagttcgacgagtgcgagatgggggagctggcggcgctgcagctcaccatggatcacagcaccaatgtgtacaaggttattatactccctagtattcaccattgcattcagggtttaatctttcggtttggacgtttctattgaagggtgctgagataccaacattttgaaaaaaaattacacaaatttaaacaaaatattgccaaattcacaagaaaaaaaataaaaaatttggctgaaactatatcatattgtggggaggggtctgaaatgaccgaaattttgaaactctgattgcattgacattgtattggttggttctgatggaactaattgattggatcgccattgaaatgtgtaggaggtgagaaggatcaggagtgagcacttggatgatcctggctgcatcaccaatggcagggtgaagggttgtttgaaggtgacaagagcgtttggagctggctacctaaaagaggtgtgcatatttgtatctaactaaattttattcttaaaccacatattaatcctttagtgactaactatatcaagcctaactatagaagaaactaactgtaatgactagcttgcgtacatttcaagttaactttgatcaaagtcaaaacaacttataatctgaaacggagggagtatttggtgttgcagccccgttggaacaaggctctactagaggtgttccaggtggattatgtgggtagctcgccgtacatcagctgccgtccgtacatccgacaccaccggttaggggcgcaggacaagttcttgatcctctcgtcggatggtctgtatgactacttcacaaaagaggaggtggtggcacaagtggaggccttcaccgccggctaccccgacgaggaccctgccaagtacctcagccaccagattctcctccgggccgccaatcaagctggttagttttactctctatatataaactccctcaatcttaaaatatataacaccgttgacttttcgtataacgttggaccattcgcgttattcaaatttagtaattctctcagtatctccattacaagaaaaccgacaatagaaaaatgtgatacttccttaataaccgtaaaatcactccttctatatatgttgctatttagttggcaatgctgtttgttgttgttttaactttgaccaataataatcgtaatagtgcttgtaaatttactaaaatgaatggtcaaagtttgaatgtaaatgatgcttgatgacaaatttttaggaactgaagaagtaatagaacctttctttctcatagttattgtagaagaaaacatacctgaaatagcttgttaattttctggttacctctatcttgttagttgcactctaatcaagtcttcatttttttttctttcagagtcaagaacatgtaattgtttacttattattacttagggttaatattgattttaatttttttgatgcattatttgtgtagggatggggttccatgagttgctagagattcagcaaggagatcgacgacagtaccatgacgatgtctccatcattatcatctccttggagggaaaaatttggagatcatcacaatgaactaatcctgtccatgtactagtgattaatctctaccaccaatattgcattggtagcatacatgatgcaatctacaatgtacaaaggatcaatcaatcactgagggggagtagcacatgcaatttttttcccctcttgtaagtcaaaatcaatcacaaatcaatgagcaagttttggcggcagtttattttttaatcttgcttccatcgagttttatgaagggattatacatgatacttcattttaggatttctgttttgattctctgtgtactaggttaatataggttgcgtttagttccgtgtcctaatttttttaagtatatggacacacatttgaagtattaaatatagactaataacaaaacaaattacatattccgaccacaaactgcgagacgaatcttttgagcctaattaatccgtcattagcacatatgggttactgtagcacttacggctaatcatgatgtaaataggttcaaaagatttatctcgcgatttacatacagcctatgcaattagcttttctttttatttacatttgatgctccatacatatgtccaaacattcgatgtgatgaaaaagttgcaagtttgaagaaaaaagttaaaatctaaacacagccgtagtagttttttttatctcaccttctatataaaaaagggaaacaaacaaaagagctttatcaaaatgacaataatttgtatgtaagcagaagacagaaagacacttagattttatacttcggagatttgatcatataccttcttttatatcgaaaaggtaggcaaaatgtgagaaaaatgaaccaaaaagcagagctgttcccataagcagttttccctcattggcctaaaaaaataagtcaaagctaaaattttaaattttaaaaacttaattttgaagatgtttttaatgtagtttctttttagcactgacttatagatcaaacacgtgtataaaagttttacccacattgttttgattgctaataaaccgttacgacttgggtaactgacgaggcttaaaacctatgttacttaaataaaaaagtattatgttttcaacaacatataggagggagctatgtaaacgggtttgatttgaaattaattcatctaaaaatgtttgaattcctctaaaaaacgaaggagtttgaattgagtgcgagcagctcacttggaaattggaatgtcccaagctaaaacaaaaagagtgaatccactagtgtagtgctccactacactcttgcaatagcagagcagggtatataaaatctggcgaatcgagaggaggaggcgatcaattcgattaaattcactaaaattcaattcgaattcagatcgaatcgagggatcccccatccccatggcgtcgccgacgtcctccgcctccgcgccggcgagccaccacctgcgcctctggtggcgccgccgcggccgcggcggcgccgtcggggccaccttcaccgtcgcgctcctcgccgccgcgctgctcctcgccctctccttgtacgcctcctccctgccccgcgcgcctaccacgccctcctcctcctctaacctcgtcggcctcaccctcgtccgccgcgccaaggagaagggcgcgggtcagtagtcctctcacctcgatttgatcccctttcgtgttttgcaacatagttggtcaggtggagtgtgtttatgcttttgagtgtgattttgcagtgtgcttggatgggagcgcgccggggtaccatctgcagagaggctccggcactggatctcaaaactggctccttcacttggaggtgagcagccttttggatctagttctattgatttagatacagaaccatgaataattagtttagtttagaggacaatgcatgtttcgtgggtttcaaaacccttgaaatttaagcgctggaataactgcactttcgagtaagagttgctcatgttgttcatgtcatggtatgatctataaacactccgattatgatagcctgacacaaactttaggcatgatttagctgtagctgactcggtgttgatgaaacaatgggcctagaatggttttgcagaaaactaatgtttggagcatatcagcgtatagcaatgcgctggtaatggcacagttagattattcatgaaatgatagtgttgtggtatctagagggcttcttatttttaccatttttaactaatggatacttgctaattgatgctcccgagcttcagtttcttgtctgcccagtttttcttgtttgcgttattgtctttgccattcttgtcagcttttcaatttcctgaattatcgtgttccatgagctttagggcggaggctggtgccggaatctgaggtcatgtgcttcacgtcaaaaatcggtgttgggttcatcgcaatacatggaatgccagattgagtttgctgggatcttgagtaatgacaaatttcaaaacccaggtagctacattttatttttatactagctgtctgctccttttattaataatgtgatccagtattcaaactgctgtattgcatcattagtacaatctacagtgtgtacagtagtcccaggtagctacattttatttttatactagctgtctgctccttttattaataatgtgatccagtgttcaaactgctgtattgcatcattagtacaatctacagtgtgtacagtagtcgtgccttctggtaaaataatcatgtccaaataactcgagttctgttgttgcaacagtttttttacaacagtgttttcagcagcatgaacaagtcctcattgagactttgaaaatttcttggatagttatttacttactgtattttgcagcttaacctatcgtatcatattttactgattgtttctgacataaataatatatttcaccatcatctgtatataactagcagttcatgcatttgtatcatgtgttcaaacagaactatccatctagtatttacttggtgtgagatcaggccaattgttgactacagaacaaattccttgctcctttcaggagtaatatttttgaactcctaaatactggtagtctcattcagcttgccttccatgtgcagatttttacaattggaataaagttaagataaggtattgtgatggggcatcattttctggaaacgtcaagaacgaattgcaggtctgatttgcccttttttttttcaatagatgttcttagtaactcagtatttgttctgacatccaggtattgttaatcattgcagaatggcacaaaattctttttccggggccagcgtatctgggaggcagtaatgagcgaacttctactaaagggactcaggcatgccaaacaggtaattcctagcaa

SEQ ID NO: 6639 - DNA, 14212 bp, Oryza sativa
ctcggtgtggtttggtttggattgtattgggttggatcggatcggattagccgcgctatagcgtcaggggatcagctcggctcactgtggtttttgaggtgttagggtttgagtgctaggttgtttgcttgatggatggtcattcctgtggtgatctcgggagagtgtcggaagtgatatccgacggcacctcatcgggtagcgcagacggcggcaagagcctgcctgagaagcattctgcgctggctgatgctacttctggagtggcggcggagaatgccgataatttgtcacaagctgggaagtacatggatttctccagtaccaccagcttgggggtgaagaaaggcttccagaagtgcatgacgtttccgccctctagcggcgaggcacaacagcagcagggttcatgctgtgatgcagataagaatcccaaggatgtgccaacctatgagcgctccgtgtcactgcccgtgagtatctaatcttcataaacagcatatcatatataagaaattggttatatgttcggactaatagttatcttcttaaccttcattaagtgtatttgaactcaattctaggatgttgttcttatagtgatagttgctgcaaaatggtttccagctgctgtctgggagtagcttatgtctactttaacttaccaaatttatgtttgatttatattcattctgaacacatggtttgatcgaaacgcttcaatatcgttaatatccatacattattatcttttggttttattctcctgtcatctaaaagcaacaatatattgaaccacttgaaaaaattattggaaaaagctctggttgtttttgcactatccgtagagtgtctcaagtccaagacttggaattgcatagctggtctatattagcaaatgccttctttaaatgacaccaataacagtaggattgatgttaacactgatcaatttgttgcatgtcataataatataaatttggacttaattgcctgagttgatatttcttgtggtaatgtaaatttatcgcttattatttatgctatatttagaaagcgtgcatcagatatgaatgctatgatattcttccattctttcctgttgctcttattataggtaagagatcaaataagcataatgttattggtatattgctgagatgaataaattgctatgcttgtccttttgatgttaccacatccatagtactgctgaaggcatgcgtggtatacatctctatgcatatatatggttatagttgggatttgatggtgcaagcaaccaaaccaacatttcttttgcatttgaaattgattagtatattcttctcctcacgttggcctatttctatttgtctcgtggaaccttgtggctattaggaacgcttttgttgttattctgttattaacgttgcctcattttccttcgcaacagccaactttgaagatcatatctgctatgaaaggaagccgccaaaagaatgggatggcttcatcaactgaaagtcgccacgtcaaatgggcccctgacgtgtatgaccccccagtgacatctgtatgtcattcagtgaataacagctaccagcgtcggtccaaatcccggaagaaggacaagaataagcagaagcagaaacaaaagcaaaagggtaggtccaagaaaaaccaccagaatgctatccagagttcagcagtgctccaagctcctgggtaaaattgctttcttcactgctattttgtcatcatcacaaaacatgcaagtaaattctaactgattcatgcacagcgaatttgataggctcaaggatgctgaaaccacaagtagtaattcagcaccagacgatctcaacaaacatgagaccgatatattggattatggcatcagcagtcaagacgccaaatgtggaagcagctttttgcgtgaatcggctgctaaaatgcatttctccactgctgaggcttcctgaaagaaaggaaaatgagtcctgcggattctcccttggtatgtaaatatgatggatgtgtagataaataaaatccagtttgttgttgtgtttcctgctgtgtgaggcgttaagagaacttctggcgtgctttgatttggagcagttaccatgactgttggactggtttttgtatgtattgatggacaaagctagtaagcattaatctatgagctgcagttgttttccttgatcaatgattatatatcagctgctgttgtattggttatagtggattctgactttctgataccatttcagtcttcaccaaaacagcaggctcaactacacttctcctgccatttcatcatcagaggaaaaagggggaactatattctccctgctttatcgttacaattgacccacaaggttggcacgcttccgagttctcgttgatgatcagacaaaattatctcaaatagatccgtatgttcaaagaggatccgtactccaatttaaatttgatactagagatatttcggtaaaggcggaatcttacagaagaattgcatcattcaacataacagacgccagcgagaaagaatcgaacagcgatgagatgtcatgatcaaacgcagaaaggatagccttatcattgcaccgcacatagattacagccttacaccgtcccttagataggagtagtactaagatgataacaaagtcataacccattgcctcaggggagctctctaaattctcatctgaagctcatacttttataggtagcagcatcaaaacaatgctcagtttgcacggcctctgatcacgtcgaggccaacctcagttggatcggtcgcctggagctccacctgaatgccgtcgagctccctcttgaacctgtccttggagctcgcgtagatcatcttgcttctcacgcgcgatgtatcaggagacctttgcattggcatataaaatcaatcagcgagagtttctactacatttcaggtgatgttgtaatattgtgagaagccgataagagagatgcggaagtagtaccatgcaatgaagaatatcttgctcttctggcagttctcctcggtcacgaaatcgtagtcgaatatggcgtatctgcattcgttggcagggaggctagcggcaaaatcgtcgtagttcagtacgggctcgccaaccttctccacgacaaccatcttcttcttctcgtctatcttgtaaatgatgaagcggtaggtcctctttgccttcagctccaggaacttgagcttgcactcatcgtccacagccatcccagatgctgcattcgcctacaggtaacaacaaggcagacagtcaagctaaataaattcaacattgctcgttacatatattaatattgcagttgatacatttgtggaagtacatgatgtgagagcaactaattaaaaacaggggaggatgcagaaagcagtaaatgatttgtccatgactatttatagtaagattggctgtaattggttggctgaaatattcaatctgaattaaaacacaattcactgcaaatgcctggcaggataaaggctgtctaacaaactgaattccgtgacaggatctactatgttgatcgcaagctcggctggcgagatgtccatatatcacagcctgataagtaatgaacacttcacaggtccacatcagacaatgataataatgcttatggagaacaaaaggttgataacgtgactgaggaccaaacatcagggtgaaaatcgcataaatagttaataacaacatgatgactggtcatgcatattccctttcacacatctcgtcatcagttaattaagcaagcctttttaggcatgtcgtatgagcaacaatcaatagagacatgcgattcacatacgactagtaggcaagatcccgattcttgcttgtggactttccatacctgattactagagcaatgctgtgtgacaaaacaaacataactccttcaaataaaaccaataagcttttcaagaatgttaggtgccctgacacctacggcccgtttggttggggggagtttttagaagggattgggagtttagagggatgaggctattaactgttttgtttgattgggagacatgggaattttggtgggatggggatggggaattgaggaaggaactccctccttttcaattcctgggtaggggcaggtaattgggagggaattcctcctttacttcgcctaaacaaatctcagccatccgttttcactaatgacctaatctccaactaaactccctgtcaatttccaccacctctaccaaacaagagactgggatgaaaaatcaaatttccatcttaatctcaccatcaattccctcgtgtaaactcccaatcccctttcctcaagatgccaaacaagccactaagggtttcctgaagaagcaatgggagccacaagccaggtagtcgccaactacggccgccccccatatacaaaatctttgaaggaccagctaaaggttaggctcagctaaggctggatataatccaactatatactctacccaacaaaaataataatcaagaactctagctgtacggcctgtaccatccatggcaaaattgaaggcacctgcttacaactccacatgttcattcatcactatgacaccgaatcgatactaaacttcgcgcatttggaacagatctttgttgctagggaaaaactgccaacactctagccgaatagtagcactaaacggatgcaaggaaagtacccaggcagcaataatttttcttttttttttgaaaaaaaagcaagaacacttgtggtattgtgaatatctcaccaacgaacacacactaagatctacaacaaacgtgtgacgaacagattacgaatctaagatagaaactactgtgcgcatacgcatcaagaaccagcaggcgggcaaacagtcctactatgtacaagatgactagctggtagatgagatgagatgagatgaggccggagggggtataccattgcgggcggcgcgaaggggacggattcgccggcgacgaaggaatctaagcaaagcgctcgcgcgtcgatggatcccttctctctctctggagctctgcgcttggtgtgggtgtgggaggtggtggtggtatttgtgttggggagtcgcgtggaatggacgctcgcttgctcgccgcatctccttttctttctcctcttctattattttcttttcggtggcaccgaccgaccgcgggcccacctgtcatccactcaccacataacctacccgtgtgttgggccccaccgcatcttttcatgggccgccctttcttccatcgggcctccccaatacaatccactcatttcggcccatggtggtggtctcatgttacatactatacgagtatgagagtatcccaatttcaaaagcaaagtacacagttcaaattaatttttgaaagtaatttgaagaacgttatatacaaattacaaacgtgtaaagtacttaagcttgcatgatactactagcaaatctggcttattttaaatttttttctgccattcgattacaagctagctaattaaacaggagtaatttatctttatcaccatcgtcgtcatcatcctagctagtgaatgatttttctgtgtttttatggctcggccatgtccttgttgccgccgagctcgccgtcgtcgtgggcgtggccgtcgacgacgatggacaccggcagctcgtcggcgttgctcatgtcatgctgctgcaccaccagcaccgacgacgtcaccccgtgccccgccgacgccagcgcgtcgccgatgggccccagctccgggtgctccgccgcccggacggccagctccgccaccatcgccgacggcagccgccccttgccgaccaccaccaggccgtactcccggctcttcccgatcgacaccacctcctcgatcacgttccccaccaccaccctctcctcgtacctcaccatggcccccatcctctgccggaattccgccaccgccgcctcgtccagctcctgcaccgccgtgtaatttcatcaacctcattagctgttcatgatcatggctgcgccatggatgatgatgggatgtacctaccttctccttgtgggtgtcgacgatggccgttgagaaggtgtagctcttgtcggcgttcttggtgttcgacgggcgcagcgtcacctcggcgtgctcctcgctaccttccttgccgtcgacgaaccgcacgacggtgacctgcacgccggggtgctcggccatcctcccggcgagctcgagcgcctcgcggtcgtccggcccgccgaagaagacgacgcagacgccgtgcgcgacctgctccgagctgacctgctcgccgccgccgaagccgcggtcgacgaggacggcgaccgagcagggcgcctcgcgcaggatcctccggttgacggcgcgccactcggggccgaggtcgtcgccatggccgtggcccgggtggcgcttgtggaacgggagcacgacgagggagacgcgcttgtcctcggcgacggcggcgacgtcgtcgtggatggtgtggagcgcggagacggcggtcatggggcggacgtggacgtggccgagctgcgcgtaggtgtcgaaggcgacgtcgacctggtcgccgccgccgcggcgagggcggaggaaggggacgccgttgcggcgcgcggcgcgggccatgaggatggaggaggtgcgctcggtgagctcgaccatgcggaggatgtagagcttgacgaggcggcgcggctgggtgtggccgcggatggtctcgatgaggttgatcagcgccggcacgtcgtggccgccgtgtatgcaggccagcacgcgcagctccttggcgccggcggtggcagccgcggacggtgaggacggcgcggaggggccatgcagcttgcggtggtgcaggcggcggcggccggcgttgcgcgccggcttgtagatggccatgactgtgggggtggtgatgaaggtggtgaccagcgccattagcaccaggatcgcaaacgtctcctcgtccagcacctgtgttacaccaacacacaaaacattactcattactctctccattttttattgtaagacgttttaactatgattaagatcaaattgttttaattttaactaaatttatgaacaaatatagtattatttataataataaaatagtttcatcagatcaataattaaatatattttcataataaatttgtcttaggttgaaaatattactacttttttctataacttggttaaactaaaagctatttgactttaaccaaagttaaaacgtcttataaattgaaacggatgggtaataattttgcactcgttttggatgcatttttattggttcaaaatccatatcttggatggagccaaaatcaaaatcaaaatgcatagttcccaaaaaaaaaatcaaaatgcatggcattgacttatttagtgctacgtcgccctcggttgcatgactgacagatggacggcggagccctcaagccctgaatggagcccacctgtcagcgacttcacgccgctcatcttcaagctctgaatggtgcagtttgaagaagaggctgcttttttactgcacctatacattgcaactctggatggtctacggatggcaagcatcatcaaatgcaacattgaactttgaactcttgacaacagtgtggtcagtgtgtcccacttccctatgcactctattcagaaaccagaagagaagattcatgtggatcagactacctttgttgtttgcatctgtgaaattcattcatacttccaaaaccaagaaaatttctcaaaagtcacaggaaacagcacgtctcaaaaaaagaaaagaaaaagaaaatgaggaaaaaaacagtgtagaacagcaacaggaagcatgtaacaggtgacctctgcttttgtcctcacaagagcctttcttttggctccttccatttctcattgcagggcaactcaacaataactttgactctaaaaatggagaactaattcaacaaaaatacctcctctaaaaagatacttcctgtggttctatattaattgacgttttgaacaagattgaggtcatttttttataactttgaccatcaataactttaaaaatatttagtttaaaaaaactaaaacaacatataaaaatttctctttcaaagcactacaataaaagtaaaaatgcatttatttattatatatattataatagaaaaataaggtcaaaaatatatcttgtagaccgtgtcattatccaaaacgtcaattaaaatgaaactggagggagtacggagtatgtaattcagctaaaacacctctaaaaaaatcaataaaaaaccctctaaatttaaaatcaacaaaaatatctgtaaaaataaaatcaacaaaaatacatggtacttactgctagtatttttttagataattgtattatacttggtattataccagtaggtaaatttgtacatgtatgagtagaagaagaggaaaattagaggcaccttgcgttctctgccaatgttgaggacgatgagctcgacgaggcccttggtgttcatgacgacgccgagcaccagcgcctcgcgcgccgacatcccgcacgccatggccaccgcgaacgtcccgacgatcttcccggcgcacgccgtcccgatgacgagcgccagcatcccccacgccccgccgccccggatggtggcgacgtccgtcttgaggccgctcgacgcgaagtagagcggcagcagcagctccgacaccaggtcctccaccctctccgtcaccctccccgcgaactccccctccttgggcaccgtcagcccgaacacgaacgccccgaagatggcgtggatcccgatcatgtccgtggcgagccccgacgccagaacgcccgccagcgtcgccgccacccacacctcgccgccgccctgcccgtccgaccgccgcgccacccacgccatggccggcttgacgaacaccatccatattgtgacgaacgccgcgcccgacaggagcacccagagggagacgatggggctccggtggtcgccgctgcccgagatggccacggccagagcgagcagcacccacgccgccacgtcgttgaacgccgccgccgccagcgccgtctcgccgatgggggtggtgagcagcttcagctcggcgaggatgcgcgcgaggacggggaacgcggtgatggagagcgcgacgcccatgaagacgaggaacggcgcgtagcccgcccgcgcggcgcccgggagctcgccgcggaggacgaaggcgacgccgacgccgcacgcgaacgggagcgagatccccgcggcggcgatggcgaaggcgcggcggccgctacggcgcacggagcggaggtcgagctcgaggccgacgaggaagaggaagaagaggaggccgaggctggcgactgactcgagcacgggcgcgctccagggcgggaagagcgcgcggaggtaggccttgttgcggccgagcgcggaggggccgaggaggatgccggcgacgatctcggcgatgaccttgggctggcggagcgggcggagcaggagggcgaggaggcggctgaggaggaggatgaggagagcttggaggatgaggagcgggaaggcgaagtggagcgggtcgtccccctgccacacgccgttggacgacgtcttcaccgtcgccatctccgcctccgtcaccggcgaggacatccccatcggcgaaatgcggcggcggcggcggaggaggaggcgaggtcgaagaagaggaggatttgagtttgtatgtagttgaaaaaaaaatgagagcgcgcgggtgtctcgtgcatgtgatgtgacaatcactgcctctgggccatatatatgtaagcgactctgtttttttttttcttttttttaatctatacggtaggagcttgtcgaaagtcaaaaaaaataacttaaaaatggagagatcaaaatcagatagctttttttttcgttagagtttttacttgtttatttaaaattaagagtacttgcgttgaaagtaagtgccacatcgaatgataaaagcttattataaatcgtaacgactaaatcattttttatctcttaaaaagttaataatgaaaaaaatcacattaaaaacatcaaaattgctaaatgttagcttttacttatttttatttctttatatggcaatcgactagccctaattctacggggctgttcaacgatatatttaaccatattattttttttgacaaaattattaaaaaattcttacatttagtttgttgttaaatttttttaaacacataataaattatgttaaaattttaatgatattgtcaacttataaaaatttaataagatttattttgacaataatatgaacaaccttctccaactttctcaggagtcaaccacaaacaagcaacaggttaataatctagtattctagtaataggtaaaatgggacacgtggcacgccgctatagctctctagactagagttggagacgttgcccagttcccctgcaccaccggcgccacctcctgcttgaattttttcgtcgccatcgcagtgcgccatctatccatctatcgctagccattgcttttttttctttcaaaaataatagaatagaataaacctacagcctattattataacgtagcactctaaacaagtgtattttaaataaaattaaaaacacccaactaaaataacaaataaccaatataggataaggagtatatatttattgaagtatatttgtgaatctctattcataattagcaaaagttgtataatcgctatctcaatcttatgacatacaatcatagacaattatgtagatttgtagcttagaaatgcttatagttttagaaaagatgagtagtggctgactttatttttttttctaaatagttaaatgggtatacataaatggatgatttgtgatcattgttcaaggggttaaacgaatgaattacttcttataaagtttttctttaacaatggcacaatttaaaagggaagcatgtttcagacgttcaataatccagtattatatttgctcgaaaagaacatatacctggaaagcctgggtttaaatcctagtacctaaaatatcacacttatatgtggacttttagcagaatttaaattttactaatattgattaaggatatgccactgatttccgtctttttgaacatgtgttgaaaggtgcgagcgtagtgttacggtgtaatggtttgcgtgagtcggtgagtgtgcgtctatcatgtaactgggaaaagaaaatgcaccgatgattcctttggaatacgttggttttacaagattttcattttcgtaaagtttactagtccaaatctcagaaaatctgttctagatgacgccttggttcacgtaggagagcatcatcaccaaactgttagtattaatctagttaactatatctgccaccaacagtgaactatatccgcttgtatctgaaaagtaatttatcctgcatcatggagcagattgtatactaatattgctcaccgataagattatccgattcccgaaattaagtaagattaaactagccatgttattctggcgtcgatcgaccaattaaggcgtgattaccaaattgttgagtgacgatcgaacacgagaagcatctgtccacttccaaaatctattcattcaaccatatattcatgattgtttcacttcaattttcttttgacctcccataaaattaattaaagcgcagcaccattcaccaaaagcaacatgacagggctctcttccacagtaaacttcagactttcagactataccatgattccctcaaactgcgtcatcacaataattaataaataagaataacaagactaagcactaactagcatgaagtatcttgatcgatgaacacttgtcatctttctcagccttgcaatgtgggacaaaataatcgtgccttggaagttaattactttggaaattactactttatagctagtagatgctaatagcatttgacttcacttccaattttgttgtagaagcaagattctagctagctagctggagcatccaacttgatttttacacacatgatgtatttaatttcttgaagacataatcaaactgattaacactgcctgagatcgataagcaacagattcagattggtgagcaaagagattcatgttaacagtgaaataccaattataattttgtgaattagcctagcttaatcaagagtccttgcaagtattgatgaagtacaaacacttgatgcacatgaagaagcatgcatgtggcgttgaacaactttattaagctagcacgagatcgaggtgagatgccacggaaaaggggtcggatcagagagattacaagttgagtagcagtaaagcaaaatctagctacttatgtgaattaataagctccatggaatcaatcaacatctcaattacctgcctaatcaacacatatatctgtcgattgtcttaagcccatttcagctgcagctaactgttgttacatgtgatcattcacgggatagatcaaattaaacgtcgacatactgcctacgctccaaccatcttagagttcatgagattcaattgattgttcgtcttccacggaatgcttttcccatgattccatctcgactgattcctaaaaaagacaaggaatcaaggatataaaaatcatagatcatgcatatgctggatatcatatctaaactctgtatgccatgctgcatatgcatggtcaactgctctctctgatgaacacttgtgcattccggtttcagacaagcatggcacagcagaatcaacaatgagtgaacaataatgtggcatgtttatttcagcagagggaccaaatcaatgagttgaacccatgtttctcccatctgtatataaattggaatgcacgagtgaaatgtattatgcatattaagtgctaatctaattggttgtgtttaaattttctgaagaatttgttgctgcagtagaaaactactgagtattggggtttggagctcaaaattattcatagacgtgaaaaacaaggggagctttaacactaaccaaatcctttccaatgatattttttttatataattatcatttccgacagctagtttgtgctgaggggctctatatttctggatcatcgtagcaagcgaataactgacaccagtttcatgattaatggcggccatcttgtcctcaaaagctttaaactctcagactcagcacaacacctgtaaaacaaacgaacaaaaaccagcatgttaaggggaggaaacacaattagtgcaaaaattatccataattcactccagcgctcttgattttgtttccttaagatgcatatgcatggaggccacaaaatcaaactcgaattaaaaaaagaaaagaaaaacagcggaagctcgagtttgctccttttgccgatcaccttgcttgatctctcactctactgaacaaaaatgggggaaaaaatattggagatggttaggaacagaagctaatgaatgtattaatgggctaaattaattaaggaataagttcactttgggtccctctatttgtcgcctagtccaattttcgtcccttgaccgcaaaaccggatacaacgggtcccccaacttacgaaaccgtttaaattaggtccctcggtagtattgtgtccggtttttgctgaggtggcgcctacgtggctccttttgattaggtttttgtccaacgtgtcattgacgtggcgcttatgtggcattaactagataaaaaaactgtgggacccacatgtcagtcacacacaaacaataaaaaatggtgggcccatgaggacccacacgccatcctcccatttctctatccctctctatcctctccctccctcttctctcgctctccaaactggcggagcggcatgggcggcggccggagcggacgacggcagggtggagcggcagtcggagcgggcgacggcggggcggatccgaggggcgaagtgggtcgggcggcggctgatcctcgccggcacctcgatcagcagggcgggagagtggaggcggccgttccgcgatctgccgaaaccagcctggcggcggcgacggcgccaccgcggagggcgatgccaagggggaggacgatgaggaggacatcgccggctccgcgtggttcccctgacctgcgctggcccccgccgcacggaggatgggggc

SEQ ID NO: 6640 - DNA, 1042 bp, Oryza sativa
ccccccccccccccgaaattttttatttttgttttatttgtttgatatttttttcacgcttagggacacacaagaaccaaccatacaaaaattgaactcaaatggacgtaatatgtgacatgtagaatttttcctctcctctcctctctccgaactagtgcaaaggagagagatgtgcaacttttttatttttattttatttttttgatatttttttcacacttaggaactcacaggaaccaaccacgtaaaaaataaactcaaacggacgaaatatgtggcatgtggaattttccaaagctccaccgaaaaacttctctcctcgaaaacacaatcttgcaagcggaatttggaggttttaatatcgccgaacccggcaaagctggggagaatcggatgtaacagaatcggatgtaactttttctgtagatgtccgtgcatatattatttgcctgattccgagtccgtatgagaaagttacgcctattttaatacatggcatattttgtccgtttcggtagagttttggaaaattctacatgtcacatattttgttcgtttgagtttattttttatacggttggttcctatgttctcctaagtgtgaaaaaaatatcaaaaaatgaaataaaaataaaaaaaattacatctctatgtactgtttaacttatatatgtcatttcatgtggttatattttgaattagattaagtaatttcatatagtggtagagtgcattatgtttaacatgctgatcaaagggttttactaaaggagttatggtctaattttagtgaaggtgcaaagtagactaagtggtatgctagatattttcagacttagctaagtggtagttcgagtttaaattttttttgtggttggttgtatcgtgatcctaagtgtgaaaaaacatccgaaaaaataaaataaaaatgacaccgttgcaactccatacagagaaacaggaatggaggcggcggcgccagccatgctggcgccctcctccctagggcggcgccagcatggctggcgccctcctcctg

SEQ ID NO: 6641 - DNA, 4519 bp, Oryza sativa
cattaattaattgtgcggctgacgtgcggcccattttagttggccgggatgggcttctggcgcaatcgaggcccactttactttgcttttcgttgggccgaaacgggagcccgttgtaatcatcattgatgcatcttactagtagtacctcgttaatacactactccctccgtcccataatataagggattttgagttttacttttactgtttgaccactcgtcttatttaaaaaatttgtgcaaatataaaaaactaaaagttgtgcttaaaatactttggataataaagtaagtcaaaaaaataaataataattttaatttttttttgaataagacgagtggtcaaacagtacaaacaaaaacttaaaatcccttatattatgaaacggagagagtactatcttgccttagccatgtctaatcctcacttcctcgcccaaatatcacgaaataaagagcaagcatgcacctacaccacacttgatcttgaaccacttgattatcaaactagtagtactattttttttattaatagtttcaggaaacaaggacagtactaatcgtcatgaactagaagtccttttgttcttcatcttagtattatattaggtccacggataatcatatctatataggatattgccgacttttgtcttggataatcccaataatagaacaactctggcccagctgcaacacgctagtagatatagagtcgcggctccattcctaccctctcccatattaatcccaaattaaggatatatacgcatccaaattccaattatggatgcaacttggccagcaatttgcctttttttgtaaacaacaacaaatgatggcccgtccacggttcaggtatcgccgtctgttcgtctttcaaaaccaccagctgctaaacaaattgttacatgaatcatatatctatttactctcacatcaccattataccaatatgacattgaacacaatgatatcactaaacctgattgattatccaaaacagattaacattactacaaagcggtccggatgaacaaagtctctcaccagacaagacgggccagaattacagaacaaggcaatcattcggtggatcatagatatccagtggcagctgcgaatgattaattactgatcaaattattcaggtgtttggttcaaaacaatgtacacgagaatagtggtcactagagaatttcatcgagtcatttacaaccagatggtacatatatttataatatgcttttgcattaacaaactagggctctaagctctagaaactagcatgaatgctgacaaagtgacaagtacaaaccccacatcagggaacagggttaatctactcaagaaatagcaatcatacaggaaggtaggaaggaggcaggaaagcaaggcaggtgaggcagatggcacatcttgcactactttacaacaagctcatgtatctgtgtcagcatccagtaataccctggccaaaacaaagcacaataattgaagctccgatttgctcctcccaccaaacatatgcctttttcctctctttctttctctcttcatgacataacatgtgagcaacgtgaaaatggattggaattgggagacggagatgcaattatgctcatttgtcattttcagaaaccatttacaacagtgctcagagtatgtaactccaaataacatattctgggtatgtcatccgctcctttgttacacatattgccagctctttctgaagatgacaagcaggcgaccttcataaagatactttcttccatcaccactgaacacgatgagttggtcacaaacccgtaacatatccttcaatgacatgatgacatgaacagaaaactggcaattgtaggcagtgataccagccagttatggcagcaagtttatcaccggcagtgacaaacctggagtagtcctagtctgagcgttcgcctggtaattaactggaacagtttggatactgactgtatcagttgtctttgagctttggattggtggagatagaaaccaagtctcagttgtaacagcccagcagcgttttccttaccctgtcgacaatacggttcctattgacaaggctgtttgacaatgggaactcactgctatcatccaggaggaatctgtagacctcccattgacgctctgatgctgcctgcctcccaatttcagcctgaaatgcataagcaagagagtaaatacaaattcattttgaaccctctctgaatattctgtgattcttacagagaaaatgcagatcccaagcgctttcagagcaaatgtagcatcgtagaatacacgtggtcgtcccttcccggatagctcaacagggttagcaacaaggagttctacatcgggaccccggttgacaatcatcaccctgagaggatggagcatctctgacctcaggcgtgagctgagaacatcctgtttctcaggatcaataatcttctttccatccgcttgcttgataaaaagatccacctctcgaaaacctttcttgtctgaccagaatcggccatatgttacctgaaaaggtattgagttatggtacattcaaactatatactagcgacagctttgataaacaactattgtcccctgtaagccatgactagataacagataacagatcattatgtagcatttgatggttataaactttcttaacaagaaggtgggaaacttgtttgttaatatatcttagtaatttctaaggtgacagtaccctcagatgtccagaacatctaaatcccccagtcttacttttgcaaaattatctgaatgttacagattaataagcattcatggcattagttatatactacaatacaggcaatatatctccgtgtacctgaatgctgcagtccttcattgttctcaaaatatcataaaggagccccttttgatcagcacagttaatttggagcagtgtgtgtgcggggctcagggtattgtcaaagttgatggttgctttctgcactcttttcatctccgcacaaattgaccttgaacagttgtcaccatcagccagttccaacctgaacagctcctcagagattgtcggtgggagagaagagaatccttgctggaacccttctgctaataggatttcacagcttatggaaggacctaaggtagcaatcagcatcgaacaagtctcttcttgtctttcctttgtgtgcaataattcccttcacatataagtatcaacagtcatataatagaattattatgtgttgcagctcggcagcatattgcacaagcagcttgttcaaagtggcaacataaccaaaggacctaaactttaacaatgacaacttacatgccgtcggtgatgaagaagaggtcaataactctgccatctggcgtggttgacaccttcactctgtggattataagctctagttccgataatatatgcgtaacatctgcatatcatatggcacttgtaattatatcacagcttggtctacttcaaacattgaagtttggaaggtagaaagagatgctcaggttctcaccgtgcaatagccctttgcgatcagctgagaaaagcttgagaaggtagaactgggaggggcctggctgggtgatctcagggtagaaagtcattgggtaatttgacgggcacattgacatgaggcggttcttgagattcgcccaccggaccttgattgatggcgtgcggggcacgacccagaacacaacgaagcaccattgcccatccgtagacacatctgctaaaattgccaaagaaacgaatttcagatgttgacggaaggattaaaagaaggattgaagaacatagttttgatgaagcagttgaaacagtgcacagcacttgcaagtacatagtacatagtttttttgaaactaaataaaagaagtttacttatcatgagtaagtactagtagttgcaagttgcagtggttcgtcaggttatgatgcagtacagaattaatgttttaagatggaagctccaatgattagtaaggccgacatgaatctgaaatgcagtgagcacacagcaacagcgacatgaacctagacggggacttggcgtaggtaaatccgataacgatgagattaaacaaaacaaattggaactgagctgtgtctaactaatcgatacatatcttggaacggaaacagctaaaaagtttaactgatcgatatatatcttggaacggaaacagctaaaaagttggaaatcttttccgagaaagacggcaccgcacagaaaaaagaaaagaaaaagataaaaagagcaaactgatcatccagattccaaagacagagaaagagaagcagtcgggcaacactaaaactcaaaaaaaaaaaaatctctcacgctcaagaacaccagcaagccccccaaaaaaaacgaaacatcatgctaaaataaataaataaaaaatctaatgtctccaattctttgactgcaattcagattttggtaaaacctaggctcgaacaagcagccctaattaagacaggaggagaa

SEQ ID NO: 6642 - DNA, 12583 bp, Oryza sativa
  unsure (1)..(12583): unsure at all n locations
cctcgaggctagtttcctcttaagaaaactcgattttattttcgctttcttttttcagttggagaagaaatcggggggcgtttgcgatgcgagcggcgggggaggagggggtgttatctgaggaatgcaggtggggcccacatgctgactcagcttaggtatcaagggggtggttgggcccacttgccattgaccgttcgccgcctaggcgggaacgaaaccaccgggtgcttttctctctctctcttggtccccccctcctctcgcatttttggtccccgtttagtcaaccttattagcgagaaaaatagaaaaatactagctatggacagcattaaagctattactactatgttattatccagcataacattttctcaagcagctctatttttcaaacaatttactattggcatcccttttaacggtaaatcgattttatatttacgatgctaaaaaaaagaaacaatttcctaggtataaatttgagcatgagactgttcaagatatagttagaagtcttttttttaagacaaagaaggtacttatattcatataaatacatcttttttatggggaaaacatcaatattgttatgatagagttatagttgtatcactcgattcactacaaataacatgtttatttttaatagaattttaccaagactatagattcaccgttggtcttcgtctatttaagcgtatgctacatatgtgttcatagatgtgcgagtgtatattacgctggagtggtgcgcatgcgtatacgtcttctacgttatcgtaaagaaaaggtattatgtaattttatttgttaaaaagatgtagttaatagtgccaatgtaaattggagtaagtggttaacataaagatgtggcgagaattgtccagaaaacaaaactactccatccggttccatattaattgacgttttagacaagattaaggttaaacttttataattttgaccatcagtaacttaaaaaaatattaaatttaaaagaaatagaacaacgatttgtcttttaaagcactataataaaagtaaacatacatttatttattatatatattataatagaaaaataaggttaaagacatattttgtagaccgtgttattatccaaaacatcaattaaaatgaaaccggagaaagtactcgatactacaaagtggatccctagatgttgtgtgctactgcttcgctgtcaggtctcgaagccacacgttggggtgggttccgttcgaccagtagtagacagggtttcccttaccgccggtaaccgcacggttaccgggcttaccgtggggtacggtaatataaatactgcggtaacctccttaaattcaaataaatttaaaaaataatttaaatttttgataaattttgcacggttttatacggtttttcacggttaccgcgataaccgtgcttaccgctggggcgcggtaaccccggccctggcggtttgggaaaccctggtagtagaccgatcgctacgcaaccgatactcacctttctctctctctcgtcttgtgtgtccctgttgctcggccaagaattactcacctttccttttctcctcggacagccttgcaattctcgggatgcatcatcaggcggccaaccttgttgtcatcagctggtacctgctccagattttgcacgcatggcaaacagtgagtcattaatgctactaattgtgtgtgtgtgtgcccctaattaggcacagtttaggacagaagatggcgtgtagccaaatttaacaggggccggattgaaccggcatatgttgtttttgttatcccttgtcagacatctggggaggataagatagagatatgtcaatcatcggcctgatattttgaagtactcccaggagctagcatgcagaagctgctggaggctaccttagctagcttctgctaattgattgaataaatacaagaaaaaccatgtgttgaatttacagtggagtgcaatgctcttgtttctatggattcaatatttgattaggagtaaggtactatgtaatatttcatttagattattgagtgcagtatctacttaatggtaaataaatcaattttaaaaacaagtgatctgagtaatgcggtagaagtttcatcagaaaacatatttttctaaatgtgaagtaaataatctgttttactaacacgatgaataaaccgaaaagaacacggcctaaaacacacggcgtgtcgctatctgattgttaattattgtctgtgacaaactagtccctgtagaggtatcctgcgtgcaatcagggcagatggttaccttggattggaaaggggcctctcccagcatagctgcctcttgctgctcctcagctcttcatcatcccatccccagatctatctatccatccgtctatcctgttacatgatcatggccttgttagctactactccacttttcataagaataaagccatgcatcatggagagcattaggataacaacagtagtgctgaaaatatacggttgttatcacgattagagagagcagcacccctcaagtaacagtattcctgaccaatgcaaccagtagccacactgaaacgcaacaaaaaaggccccctgaaatcaacctttctttttcgaaatctaatacagtagtagagatgaacattctgcatggatggaatccacagattgcattctgaacatcaagcaagataaggtttggattctcgattctcttttcagatatacatgagcactgctatgaaaacagctggcggcataaaggaggttctgacttctgacgcgcctccagcctcctcatatctgcactgatacaacatgacgaacaaatttcagtgagttaatacagtgttcatacagatgtccatgattgtgtaattcattttcaaaatatctggcattggaaatacaagaaaaaaaaggaagagaaaataaatcgcaatgatgtaactgagaaacttctgaagcatacatttcttaagaccatcaggtcagaagcaccgctgaaagcgaatatcatgaaggatggagggaatttacaggagcatgatgaattcaagcttcttcacacaaacagttcagcatgatgttgatcaccaccctacttcagcttccagttaaacgccaccttagtgcttgctgacctcctttttgaacaaaattattgcttgcctgacctcatagatctgtttgcataccatttgcttgcttactgaatttagtcgttgcaatagaaagaatcctgaatgtcttacgataacaacttctactgctcatttggttgtcttacagaagggcataatcctggatgggattccaagataaacccaatcagaaaaaaaaaaaaaactaaccagatcaatacatcgtggatagctacactgtctgatcactaaaaagaattgaggtaagtaactaaggagaaaaaaaatcctaattgactaaaactaaaacccacgtgcctatacttttcgtatatcttattagggcaagttgcaagttgcttatggcaacaaaggaaagttgtacttattgcaagctgacatgaccagacaatttgcagggtgccctgtcaccatttgcgataagatctaaacatagatcatgcaaattacttatcacaaaaatcgctttcatatattaccaaaggtattccatgatcacgctagaaaatgtatcccgtgtggcctcctgatccataaaacttctgggatccagcgacaggtgcatatagttggtcatggctaaaccatatactgctgcctaaccccctaaaaaaacatctagggatcagtgaacaattgtgcccaagcctaatccaaggaaacaaaatagggatcagtgaaacttacaggctcatggaatgtaccatcttctgtatctcagaacagacgcctttatgtgaatgtgacctgtaccctcggtatttggtgnnnnnnnnnnnnnnnnnnnnnnnnnngaacataacaagcagtatcaacatagacatgactccaataataacaatcagaagctagcttagattaaactgagtaccaaaattcacaggcaaacacaaccagtctagaatatggagtaaacaaaattgcagccgcaaattaatgaatcaaacttagtctgttttacagaaccggtgagcagtttacctactagataacaaagccaaaaactgtatgtttcctacaaaaataatgaattgtatagctggtttctctaagagaagaaaatagtcagaatttcataggtatgaaggtgcaagagctcattgcaagaccatcagtttattataatattttagggtattatctatggaaaaatcaaaaccataaacctgggaacagcataagtgtatctcagaataagtaactgaaattactctgacataaaattatttgaaaatgtaactgaagcatcaaaatataaaacagacattatttattactacatcagttttgaaatgaagttccttttcttttctaagtagaccaaaaacgaactcactacataaacattgtgtgcaggttgctgttcgataatgcaaaaaaccgaagggaaagctacttaaatatgcaaatagatacatcacgaaagaatccttagaagaaatgtgctacattggaatatcaagttatcaccccgggtagactcctgaatatgatggtattaaccttttctgtcctgcctaaaataattaacagccccatcaaggtaacataaacctttggatatctgtcagccgggctagtctatatcattcttacatgatcagatcaactctcgataacctacttaaccttttttgggtggtgggagggtgtgtgtgtgttgggagggcggggataacatgcaaaaacttgcatatcatgtcattagaaagagagctgtccccaaacaaagtctggttacatagctacccaacccaagcggtgaaacagcagcacacaggctctgaggaaaaaaaaatcaaaggctaatatttcacaaagaagttttgaacttccatgccactttgtctcgccacgcttgcagcttctgtagcccagaagtgagcatggaagacgacctgttttcgaacacctttgccttgcttctttccatactagccagaggatgaatatcaggattgtactgatagccttttgggcttgactctaaagcatatagtaaatcattttgatcagtagaaatcagttcctagacttgatgaacccttcatctgagggacaagcctactatttagcatctcataaatttctgtacgttgtgaatgcatctggtcccttgagtagaaaacatggttccttgcgtttacttcaatctggctaaaaccaggagtcttcttgactttgcttcccttcataatcttccacacacttgccacctcattccacatcccaccagatgcaaaaacattggccaaaagcgtatagcctcctgaaccagaggggtcaattttgacaagatcctcacccacagctcttcctacctccacctcattatgtgtcatgcaagatcccagaagcgtccctagaatggcctcatcacacatatcccgctgcataccgtcaaccacttccttggcttccctcacgtaccctgctcgacctaggagatccacaaggcaagagtagtgctcaatggttggccctagtccataaacatggctaattgatttgaatatttttcggcctttctccactaatccaacatggttacaagctgacaacacagcagtaaaggtagttgagctgggcttatatccacaccttaacatttgggcaaagccctgcaaggcgcaaggtgcacacccatggtttgctaaagcttgtatcatcgatgtccatgttatggcatccttctcgttcaatctcctgaaagcaagccatgcagatgacagatcgccacttctagaatacattgaaaccagagtatttcctaagttagtttcgggctggtaccccagttttgtggacaacccatgaatttgtctaacctccattgtgctctcagatactactaagacactaattaatgtagtgctgtcaggagatactgctgagcggagcataagaagaaacaacctcaaagcttcgtccttcagattattcatggaatacccatcaatgatgatattccaagtcaccaggttctttgaaggcataatatcaaacaacctttgtgcatcattcacttggccatcattggtataagcagtgatcattgaattccatgccggaatatccttctttggcattctgtcaaagaactctcttgccctagaaacaaaaccattctgtgccaagccagtgaccattatagtccaagagactacattcttatgtggcatcttatcaaacaactgaaccgcgtcatccactttcccagcactcataagaccggttgccatggcattccaagaatatgaattcatctgaggcatcctgttgaacaactccaaagcctcctgaatacaaccattatcaacataggctttaaccatcactgtccaagcaaccacgttcctctctggcatcttatcaaacatctccctcgcttcccgtagcatcccattgtgtgcataaccctgcaccattgtcgtccacgaaaaaacattcctgtatggcatcaaatcaaacaggcggcgcgcttcgtccacaaggcccgcacggcaatatccagagaccatgcatgtccaggcgaccacgttcttcaccgccattccgtcgaacagcctgcgggcacggtcgacctggcctgccttgacgtacccatcgagcatgacagtgtcaagatggatcccccggcaatccggtggcgccgcacggtagagcgcctccgcgtggggaaggtcccggtcccagaggtggattccgaccatcgcggcgtacgcgacggcatcgtcccggcgcggcattccgtcgaacatggcgcgagcggccgccgccccacgctgccgcgcgagggagacgagtttgctctcatcagaatcggggtcccgacggaagcgtccccgccgcggaggatgagtgctctccgcggtgctgagacggcggcggcggcggaggaggaatgcggtgcggagaaggggacggaggaaagcatcggagacgccgcgccggagagcgaatcgaggaaggcgtttgatacaggaaagcctccccattgctaggtcgtggcagcggtcatgggcgggagtaccgagaggcaacgacgatggccgccggccgccggagaggatgttcggagtcggagacgacggaaggaatatgggttttttttaactatttgccactcttacgagtggcactatcgagataccactcttctaatttttttattacggaaacaccatgggagagatagcttttttcctatttagagtgtcatgtcagcgagagtgacttaaaatgactttttcacctctagtttgagaaatatgagagattatatacaaacctatgtaagaaaatattatatattatatctaaaaagagttattacaggcaagtgaacttggtcaacgtgtatttccaagtttgtgcggccttttctcagaaatagccctcgtatttatgtttcattcgaaagacagcccctaggtggatcgctaccaatccaactcgggaaccaatgtgagtaatccgattgagtacgcgcaacgccaattgggtgggaaacaattgtctgtgagacttttcgctggaggaattttttttttcagataatataaaaaaatttcggcatttacttcaaaagaagctacaaccgcttaatacaaaattctctcaagagagcataacaatccgacaacatcgaaacaaaaccaacacataaggagtaaacaattattgaagtctatttgtaaatcttcatccgtagttaacgaaaatatgtatgaccataacctttaagcttcgacatgcaaatagtatgaactccttactctcttcacactttttcgctgggagaataggaacaggcaagatttgaattgaaaatttcttcctcgttcgatcaacacatacttctggaactggaacgatcaagataacatcaaccaaactttcacacacatatatgttcagagaattacagattaagagaactgtgtgcattaggctcccacttttgatttcagagcccaaatgttcagaaattaagagagttgtgctatcgatcagttacagtgttgcatatttgatctcagcaatattggctgtcttttgcaagccccttctcctccacacgcgcgtgcaattatgttcatatcaagccctgcaaataatctcacctagacttatctatcaataatacagcattcagattatttccccccatatatgtaaactttgctcgtttgtttcttcagacatatatactgtgcatgaaggtaatgcaaatatcttacctgaagaaatccagccagcaccaccagttcttcagagaaatcaaggcctttctgcgtgcagaacaaaatagcagcaacgcaaactaagagcatacattgcagaacactgcaggcagctaagatcaaactaccatgctagtaacttgaaatgaaatgaaaatctccccgggtcagtgaggaacttcagtgttgctgtcatacacaaaaggtgagagagtgtttttcccccctattgacagttagattaattttgttcctacgaaaacagattgaagcttcttgcttccagaaggagtaattatcctgcgatctgtttgagacagagagattaagatagtgacttgagcgagtgagtggcagactggtaaaactggcgacctaacaaatgtctccatcgctcgttagcacatgcaattaagcgggatagtctccacatatatccactaattaattaataaacgttgaccagtatgatgtcgccaccgatatggacacagatcggcgtcgtaactggtcagagcaagcactaataattacgtcctaattaagtgtcaacaaatgctgcattatttacttggtcagtagaccactagaagccccggcctaagtactactggtactagtagaaccaaggtaacaaaattcttgaaattaatatcaaggtaacgaaaatggtgatcaatgatcaagtgccagcatgaatggttcgtacaacacttgcacctgctacgtatatactccattttgtagagttgcttgcagtttatagttcctctagaaatgcagacctggttggtcgagttgaatgtgtacaagtgttaattacctagagatcttgttgctagagaagaggtcgtcagagatatactactgcaacaataaatgtacatctttttgaagagaaaattagttttatatattcacgctagcaactgaagtctaaaatgtttgaccaaacatatatactctagatgtatatatagtagccaaactatttgagataaggatatacttacttggcaatgcataatttgctctactagttactctctttcttaaaaaaaaacttaattaatttgctagttgaccatgtatgtcgatggagaccaaaatgagtgagggatctagaagatgacacatgtgcatctctgattaatttcagcatgcatccaatgggtcgaaatgaaatggttcgtcagtttgtgcatgagcctgcgttgtcgcagccaaaaaatcgacgaggcaggcccatgcactagctaccttggtcaaccatggctgcagcttcaccttcactagcttggaccaagctaagcacagccatccattccattccatataacaagctagcgatcgaggccactcaaatccaccaacaagctagctgacaatcaagtcatcagtccatcaatggcgatggcgtcgtcgtgttcaccactagtagccgtgctggtggcgctgctgctcgtggcggcgactgtgccggcgccgtgcgccgccgtggacccggtgaacacgtactgcgccaggaacctgagcggcgcgccggcgcaggcgagcgtggcgcaggtgctctccgagctggtgccgcgcgcctccgccggctactacgccacggccaccgccggccgcggcggcgacggctccgccatctggggcctcgcgcagtgccgcggcgacatcccggcccccgactgcgcgctctgcgcctccgccgccgccaggcagctcgccggggcctgccgcggcagggccgacgcgcgcgtctggtacgactactgcttcgcgcgctacgacgacgccgacttcgtcggcctcccggacaccggctacgcgctcatcctcctcaacacgcagaacgccaccgacccggaggcgttcgagaaggcgcagaggaaggtgatggcgcgcgtggcggcggacgccggcgacgcggggggcggcgggctggcgagggagaccgcgaggttcaaggacggggtgaccatctacgggctcgggtggtgcacgcgcgacatcacggcggcggactgcgggctgtgcgtggcgcaggcggtggcggagatgcccaactactgccgattccggcgaggatgccgcgtgctgtacagcagctgcatggcgcgctacgagacctacccattcttcttcccgctcgacggcggccagagcgccgacgcctccgcctccgccgccggcgactacgacagggtcgtcttgaatccgtagattatttcaactctctataatggccatatatataataagggtatcaaaaaatcccatatattactactaggagacgcattgcaggtttatatgtttacggttgtaatccaatttatctcataattaactaaataaataattcgccagatgaacgaaaaagtctacttcctctattttttttaaatagatgattcaattgacttttagcatcatacttgattatttgtcttattcaaacaaatttatattttaacatatttatattaatgttttaaatagcatgaatgatccaacgttatttcaaaagttaatggtgccatcgccctactctaaactgaataaaaaatcgttgcaacgtggacgtgcctatagctgagggaggtaaaatatactttttgttgatgaataatctgcttcacaaggcccacaaataaatcagatggaaatgtgcctcgatgaggtccaacccactaccaccggcccaagtttggtacgtaggcccaagacgaaacgtcagcgtctcagcgaggtgcccttaggtcgggagttcaccagcgccgctgccgccgccgcttccctccgcctggagcgccgctcccaacgacggcgacgacggtcagtatatctccgacctcacctcgccgcacgccgccttctcgtatctacctctccgccgcttggcgccagcggattctggttccgagtccggccttgcgagcacgccgccgcttccggttttttttttttttttactcataaatcagctctccccctgcaggatcgccggcgggtctctcatttcatctcctcccatcttccgacgccgccgtcggtcgtctgctggtggcacgcgggttctgttccgctcgctactgaccggtgcggcaccaacctattccccttctctttctttctttcttttttctttttctaaattagcagtttgacattaattagatgcgctaattcatagaagaaacttgaatttgatgcactattacatgtactgtgttcaaattccgatcgaaatcatctcgtgtacggagtaaattctcggtgcctttcggcctcttcgtgctttttttgcctactaaacttctgctcgatcttgacaatataagtttgagcaatgatcctattttgcttctgacatgggttcctatgtttttagctttaatggtgctaatgtgatatgtatgtatatttctacacgaatatttccctgcttttgacatgggttgttcaaggaaatcaatgccacattgcatgactgagcactatagcttctatgctgtatatatatgctccctataattgtgtcaattttgtatattctagttctaacaaaacatttctgcctcttgaataaaaatatagggctagttctacatgctgttactgaaactaaaactttgactaggtagttaactagtactggtaccaacatatatgactgatagtataagtttccaatcatttgttagcaaataattcttgtgcgcgtggttcatttctttcttgttctgttgagtcagcgcatggtggagttagttggttgtgcacatttgtagctcgaagcatgcatgttcatgctggaatgggtcattagttagtgcatggtgcagcacaccccgacgtttgggatggcagaagaagtggatgggcgtggcactcgtggcatcaaggacatgatctagtttctgttttgtctatttaagttgcaatataaggtcaagaaaagctgctgctttgcagcaccaaaaactctccttgtgttcaattcttttcatcaggtgttccactgatcactatgtgtagttttctctgacatcattgtgactcttgagtttttctgtgttgaatcattgtgaggtgttttacaaggcgagaagctcatgaggagaaataaaatgtgaatgtggaacatgct

SEQ ID NO: 6643 - DNA, 6045 bp, Oryza sativa
ggatactagatagtttttgaagatttaaatgttaacaagttgtctctgtacctttcctctagcacagcttgatgaattgctagctccctagtcactttacatgctgaaatcttggtcggctttggcatttcataccaattccaccttgcattttttaaatgtctgatgtctcatgttagaatctagaacacatgggagctaaaaaatttatggtgaacctttcattgtgctgcaggttaatctgttgtcagaccacacaaaggagagaggcactgcagtaccaatgggcatgaagttcagagttgtttgcaggaagttgtatgattacgtcagatatgatctcaaggagattgcttttccttcatccttgccagatcctccacacatcaagaagcggccaaagctcaccttgaaagacaagtggtgtattctgaaggaggcaaccaggctgtacggggcttcttgggtcagagacattggccctgatctcagaccgaatgactacaagaaggtcaaagaggaacccgacatcaagactgaggagggaagcagcgagcctaccacggttgaggaccttctcggcgcattaaagggtggagcagagaaagccaagcctgcgttacagcggatgtacatggctcgcgcctcaaactacacagatgcactgaagaactatgtcgagtcctacaaagaaggtctgaaagagcacttggaggaagaagctatgggtaaaggacatcggcaaggcaatgacgcaacaaagccaccacagtcaccgtcatcatgattttgtctgaacatcttaggtgtgataccacatagaagtttcagcatatcttgtgtatgtaatcaacctgagttgatacattgccttctattgtagtaagagggctctctaggctgtagactgaaaaacggcaaatggacaaatggtgcctttgtctttgccaaaaagaaaggaagaagagagttcttcatcatttggttgtctgatattttttgcctgctgaatttggtgatgtgtagtgtaaatatgggctatgggctaagtatgtttctatggagatttttatttttcctgtttcaattgttgttattggttgctacgtgctgattgtctgtaaacttatatggatgtcgtgcagttgctggaaacacaggattatctcctctatttccatgcttatacggtctgtttggttggagagagtttctaggagggattgggagtttaaaaggatgaggctattaactgttttgtttggttgggggacatgggaattttggtgggatggggatggggaattgaggaatgaactccctccttttcaatacctgggtaggggcaggtaattaggagggaattcctcctttacttcgcctaaacaaatctcaaccatccattttcattaatgatctaatctccaactaaactccctatcaatttccaccacctctaccaaacaagagactgagatgaaaaatcaaattcccatcttaatctcaccatcaattttctcgtgtaaactcccaatcctcttccctcaagttgccaaacaagccgataaggttatgtaccattaccaactgtggtacacctgtcaatgcaacctttctaagtatctacctctgctctgttctgcagattgctatgtcattaattgaaaacgaaactggagcaatgccattggaacctttagtatttttattcaattgattgaaacgttctgactagcaatttttgttcccctttaccagctgattgaacaaactagcattccatcatacttctaaaaatgtgttttgtactcaagtccgaaactactttcaattaaagtttaggagtcttaaacagctttcactactatcagtgtcaagagactatacaccagccgaaaggttcagttcaaaacaaattcgatgacaagacactgcagtatcagagggagaagttgtatacatgaggcctgcaaatctgaacctcttaacatgctttctttatatcatcaggtctgttattctgctgtgcttataattatattagtcaggtagtattagctagctcgttgagatagatgtttgcttgcctgagttgagtcgaaaaaatgtaactagttgcattgtagcaactgagtctgagaactggttgatgaatggctttgacgatgtttaccgtagttcaaaagtaataactgatgaacaagtaattaactaatgctgtacattgcacaaatttgattactgaaaagaaaatttgatgtcagtaaatttgtttaaaatgcagaccaggaaaccttgatgagcagcttaattccgcagatgctgacttcaaggctctctgaaccacagatccttggagtgaattcgacatttgtgcgataatgtggcagtcagcatcgcctgcagcagcaatgagcgtcaagacgagctcgtcggccgcacggacggccatgacgcggcgggcaagatcgacggcgacgtctccggcggcgcctccagctgaagaattgctggtcgcgttcactttgctgctgtcgtagagcacaatggatgcatccgggatgctgctgctgcacgcagtgatctgtccatggaagcagcgacgatggcggccggcgccggcggcggcaggcaggcgcagggtgacgtcgacggcggcctcgacggcgcctccgatgtaggcgtaggagagctcgaccgtgctgagcctgctatccagcgtgctgcagcttccgacgaccacatcctcgacacctcttggcatgctcaggcttctaaattcgattagccctttgctgaattctctgtcgtcgacgacgacatcgccgtcatcctcctcctccttcaacttgagattcacctcgaagaaccggagtcggacacctcgattgatcgagttggtccggtcaaaaccaacgtttcatcctatataatcatcatcatcatcatgcaatattgcaattatgcaagaacaagaagtgatcaatcgatcgatcagctagattagataatgatgatgacgtacttgccttggaggtgatgagctggggattgtcggtggtgcggcggaagaggtagaggcactttcgatcgatgacatccctggcgatgacggtgccgtagacgagcacggggtagccgacgtcggaggagacgatgttcacggcgaggacgttcaacgacatgcgcagcctgctgtcgccggctcggtggaggggcggctggccgcggtcgacggttcggcacaaggggccgatcggcgactcctcgtcgaggttgaagaggatggagctgcagaaccacaagcgggtgtaggtgcggcagccatgcttggggtcgtactcgaggatcttgtccctggcggcgtcgcaggcttcccgccacgcctggtgctccgcctccttccgctccttctcccgctgcctctccagcgctcgctcgccgtccgctctcgccaccgcctcgtcgtagaagaagggctctaggccgctccactcgtcgccgccgccgtcgtcctccgccatgagaaccagtacgtcaactaattttattaccgaactaacggatgttacgcacatatatttctttatctttacccatgtaatatatatcggatctaagagttcttattattcgtagcgacgtacgatgcgtggacgttacttttaattatatatctatctctatctctactattataaaaattaaatatgtttccgctgatattttgataaattatttgtatttgagtcggttttcaagatcgtttacttttaaaaatacataaggagtcgtataataattcttttaaaattctaattgctttagaattcttgtcagagcataagatagcaacatacaagatataaccatcatgccaataaaagttccaaattagatatcaatactattaaagtaaaaaaccggagaaggctacagctcggacgtccgataaaactcaaaagatcggaagccctacccgttgcaattctgagcagataacaggattcacgcaaaccatgcactatgcaccatctctttcctactatatacatgtacactctttagcaatttttgaaatgatttttctcctaacctatctatatgatctatgatctaattatatcgttgtaattaaatttttataacaagatctcacatgagtatattacgttgaaaaaacatatgaaacatttttataccataaataaaacagttgagttataagtactgaaacatcatacctatttactgaaacatcaaaagaacgctattgcaacatttgcaaataaactagtgaaacatttgaaaaaacttattgaaatacctagataataggatgtgcaacatttaataatctgttgcaacacaaaactttaaatgtgcaacaaagtcgaattaaaaattgagacatttgtttctcatgcgtgaaacatttgattttaacggttgaaacatatgtatttttttatcgaaatatattcatatgaggtcttgttaagaagatttaattgccataaatacaacagatcagattacagactagataaatagtttaagagaaaaggaaattttaatgtttcaaatggttgttggttgttggctttggttgaaaaaataactattctattgtgtgagtcctttacacatgcgtaactaaaaagtttgctgatgtatgcttctatcgagtactactttgtttctctgcttagttaaatgtgagggtcccgtccggtatattcttccgggtcggacgtcttaaataaagcatttctggtaaaaatcgtcgtcgtcgtcgtcgtggtggtcagttcatgtggatggatggatagatctaagcgctcgcccaattccaactcaccggatgcactctgcttttttttttcctccctttcttcctctgttttttcttgatgaatcagaggagcagagcacaaggtggcacagacacgcgcacacacacaccacgcccacccacccctctctcggctcgggttaccttgctaaacccaaaacctctgcccttgtgtcactgacaatgtgggcctccttgaactacagtggacaactttttacctcccctagttgagtttggatggtattaattagccacataaatgaatacactacttaataatactaaaaaaatagtattaaggaagcaagcagcaacactaaccgtattactccactagttaattaatcaatcaaaagcaggaagaattaaatgtcctgatggaatattatgacgtcagccgcgcgtcactttacgtgcccggccgatcacatgcatgcaagcatgcacacacggcgcttgtaataatatactagtccgtcaagtgcttttttttttccttttaaggggggacgtcactagttttgtgcatgtcatttaaaaattatcaaaaaattcttaaaaaaattatcaaaatagatcaatatatgatatatcttttcgcaaacatacaaggcaacattctacttatacaattcgaaacaaaaataacaaatttgaccgtgaactacacgttctattcacggtcaattttattgtttttgtttatacttgtacaagttgaatttgaatatgcatgcttgcgaagttaaatatcacatattgatctatcatactaaattttttttaaattttttttgataacttttaagtgacatgaaaaaagaggggatatcccctaaggatgaatagagttttcctactagtccttcgtttcatattgcaagtcataatttgattaggtttgacaagatttatagaaaaattagcaaaatctaaaatattaaattagtttaattaaatacaacattaaatatatttataatatatttgttttgtgttgaaaatactgctatgttttttttatataaatttggtcaaaccaagtttgattagaaaaggatgaaagagacagagagagagtagctggatttttcacattttgatccttttaaaaaacttatttcgcaaatagacccctgaaaaaacttatcccagaaatggtccttttttgggcgccagagtggctg

SEQ ID NO: 6644 - DNA, 10637 bp, Oryza sativa
ttaattaatgccagcgcatatatgcatgcatgtcctggtcctggacacgtacgcccggaacgtacacgatcgagcagtgcatgcgcgccggcgacgtactggctttcgttctgcacgcgtccggaacgagattgctgagggacgatcgatcgcccctagcgatcagtccgtctcccctccctttcctccacctgattttcttttttatcaagtttacacatctaaagtttaaaaacccaaagtttataagtcaaaggtttatatattcgattcaaatttaaatttgaattaaaatgtttttttacatagtatttctatacatctaaagtttataaacccaaagtttataagtcaaaagtttatatacccgtttcaaatttgaattggaatttgaattcaaatattagtttatagacccaaactttataagtcaaaagtttacaaacccgtttcaaatttaaatttaaatttaaatattttttatatacagtatttgtatttctatacataaattttttcaactttgtctttttattttttttaatttttatggtgtactgtggtaggaagagaagaaggggaggaggaagggggagaggagggagcgtacaggggaggggcgggcggtgatcgctaggagcggtcacccgcctattagcctcccccgtgcggaatgcgatagatcagtgcgttcggccggcatggcggcgacgacggcggcagcatctcctcaacacacgaacgcatgtagagctgggacttgaactagcaccatagttattaagaccggaccggtaattgaaccagcgaggacgtcggttcactggttcattggttcaaccgccaaaaaccggttcgattgttttgaaccggtcaaattgaaccggccacaaaccatgtcacagtacatgcatttgatcttttttcccctccctgagtaatatgcgtgcaataggcccaagcaatgtcagtctttcttcttgtctttggttctgatgctgattcttgagcagtagatgtaggtgtactcccatcaacaggagttggagtatctgaagaatccattgctgtcaaaaatacaaataattactaatattgatttatctaaaaaaaatcaaagcttcagtaaaacaagtatatatgcattatatttcttcagtacaactagcaaagtaacaaatttgtgtcttctaaaaaatcaagatctgaaataaaatcgtcacaatagatcttaactagttcactaccaacggaactggcaatagcatagtagcaatttcagtagcaagttaggaacgtaccatctgccatggatgaagcttgcgtcgatggagagttggagactggatttggagcttggaagagctgagcgctactcgatggagattggagactgcagaacaggagaagtggagatggtgccgccgctcgccggagctggactgccgtgcgcccgtgctgcggtgctggtacagcagttcgtcgccgccgccgccaccgaaggtgaagggacgagaagtcgagaagaatacgccaatgtgaatctaatcctattccccacgggctgtaaccctaaaaattgcgtgtttacaatcttaccctttgcctttgttgtgtcacactgagaaagatgaggggtaactggtccaaatgcaaaaaccgcctggttcagttaaaaccgtccggttcgccggttccgtaaaaaaccggccggttcgagcgttttttagcggttcgattgcacagacggtctttgaagtgaaccgagccgctgcactctctggttccggttattagcggtcgaaccgccggtccgatccggtcctaataactatggctagcacgacgcggcacagcgtgcttcgtgccaaatagagccgtgccgccccgacatggccagcacggggggcgctgatacgtgatcagccgcgtgctcccgcgcgcttgcggtcagtcagccccctctagtctctagtctatatgtatctatacatcatatgcatatactatatatatatatacatacgtatatacatataattttttatgaatatgtttttaacacataaaaaatatatacacatatatgaagtttatatacgacgtatataaagtttatataggatatatacaaactttgtatacgatatatacaaattttatatacatacgtattaaaaaaaatacatcacgtatacaaagtttgtatatgcttatacaaactttacatacgcgtatacaaactttgcatacgtacgaatacaaattttgtattcatgcatcttaaaaaaggggaaaaaaaccgaacagaagagaaaccagaaaaaaaaaagaaaaaaccaaaccgaacagaaacgagaaaaatgaagaaaaaaagggaaaaaaaaagaaaaagctaaccgaacagaaacgaaaaaaggggggacaggaaaactcgctactccctcctctcgcgcggcgcgtctcgtgccaggccgcctcttcagcgacgcggcccaagcacggcccagtggtctgatgggcctattcgtgccgggccggcacaagcacggcccaaaagaagggagcaggccgtggtggcgtgcggcttcgtcgtcccgtcgcggcagtgacggccgcgcccaccctgctcgtcgcggcgatgcggcccaccgcgcggcggcgtcaatcagcgaacagttttgccaacggctggtgctggccttgctgctaccagctagctaccgatgaggcaatgaataagacgagcaagatgacaatttctctctcccttcatggcatcatcatctccatcccattgttgcaggcgtaacgacggcggcggctgcggcgccgcgaccttccagtgcctgccgtccgcagtggctagctagcaggcgtccgtcatccctgcaagttagttaattgcagcggcatcaacatgcttggtgatcatcactactgtaacttgccctgactttaacatgggggtgcaagtatgattgctaggggatgtctctaaggattatgatctggaagtttgtcttgttcaaagtgattattttaaatattgttctcgctctttagtcagtataacatcagtcatatggctcttcattgcaacagattacagactgtacaatgatctttactagtcagtgtacgattaattgtctaacttatgttatttggaatttaatcttaagtctaacgatcgtctgcttggtgctagctagctgatgagcatgtagacgacgaatgtgatgcaaagtgaaacaagaccttgattatacaggactccatcgtaatggcattgtgatccagggctttccacggatctcttcaatggtatagtatgggcggcacggcccaggcccggccgttcctgggccgagggtagtcgggccggatgccggcccggcagccatgcttggggtcgtactcgagcgaggatcttgtccctggcggcgtcgcaggcttcccgccacgccttgtgctccgcctccttccgctccttctcccgcggaataagtccactttccctccctcaacttatggccgtgtatgaatagcatccctcaaccgcaaaaccgggtataacccatcccccaaccccgaaaaccgttgcaaatcaactccccgaacggttttagaggcggttttgtcctatgtggcaattgacttgcttatgtggcagttgacttgctgagtcatcaagcgggacccacatgtcagcagtctccacctcatctcatcttctccctcaccagtcaccatgattcccttcaagaaacgggaaaggaaaaaatcaagaagcggaggcgaggcgacagaatcgagcagcaagatcaacggcaagacaagtagcatatgatggttgccgaattcagagaagacgctggcgatcacgcgaaacaagaaaggggaacgaacagaacaaatcagagaccatgaaatcgtcgaagaacatgagcaagcagcaaacaagctagcggagttcttctagcgtgcacgcgacacggagcgggtgtccgccatgcgcagctgctggcaatgccaccgtcgtccccgtgccggagcctctccgtcctcatgctgcagcacaacccggcgctcggcgacatccccagtggcttccttctcggacggccggcaagcttctcccgcgcgcggacggccggcgagctatttccccgtgcgcggacggccggcgagctactcccccgcgcgaggacggttggcaagatcctccccgcgcgcggacggccggcgagctcctccctcgcgcgcggccggctgacgagatcctcccagcgcgagcactgccggcgagatcctccacacgcgcggacggccggcgacttggaggggttgcctcgtcctccacgaccccctcttagacgatgccccggcgccctcccgcctcctctgcgtgctcgagctgggccactccccgcgcgcggcgtggccaaccgacgagctcgtcccccttgcgccgtcgtcgccgccctgctgatagaaggtgagaggaggaagatatgaaagagaaagaggggaagagatgagatgaggtggagactgctgacatgtgggtcccgtttgatgactcagcaaatcaactgccacgtaatcaagtcaattgccacgtaggacaaaaccgcctccaaaaccgtccggggagttgatttgcaacggtgtttagagttgggggatgagttatacccggttttgcggttgagggatgatattcatacacggccatgagttgagggaggtaaagtggacttattccttctcccgctgcctctccagcgctcgctcgccgtccgctctcgccgccgcctcgtcgtagaagaagggatctaggccgctccactcgtcgccgccgccgacgccgccgtcgtcctccgccatggtgacggctaaaattaaaaccagctaggttaattaattacctgattagttaatttcttcgtaattaaacaatgttttatatggttacatatgaccttatacgtttataggttggtgaaaatgatttttttagctgggctgacttgggccagaaattactttttattcgggttgaaattgaattgtttatcaagcaaacgagatgcaggttctgatttgattttcagcgtgatactggtttatggtttgtgtgaattctatagttttttacttattattgtttaatgaaaaaagtccgaattacacccttgaactattaggtgagtacgaattacccctcagacctaaaaaccagatatttttcactctcaactattaataccggacgaattacgtccttgacttaaaccgtagtggttttggtcctatatgccagtccgatcagcaattcattttttaaattgatagacctcacctgtcaatctcatcctctatctctccttctctttccctaatcatctctcttctctccttctctcaatcagagcagccggtggacggggagccgtggacggtagcgacagacggggatggtggcggaggcaacggcggagagggagcggagtaggtggtaggcggggacggggacaggagggggaagcagcaatggggtaatggagcacaagcgacggtcgatggcggaggtagttgggagtggcgagcgtcggacgcgccgctgcacagcgacggggcgacggaactcgagcggcggaggcggaggacctattgggctcccgttccccgccgccatggacgcctcccagcgagctcccccgccaccacgagcgcctcctgtctcccctgccaccgtgatgcatcctcgcgaactcccattcggtcgtcgccgtggacgcctcccagcgagctcccccgccgctgtgtacacctccctgagagagagcaggggagagacgttaggggaggggatatgttgagggagagatgacaagtgggtccatgtttttttttctgtattttttagttgactggattgtcacgttgacgtcatgtgtgcaatctcatatcaaaatcgcgcttagggaaagggcgaaagatatctggttttcgggtcgaggaggtaattgtacccactcgatagttcaggggtgtaattcggacttttacctggtttaatcctctgtttggaggactggtcgatctatcttatcctattgaaaaagatgtgagttgctcgatccatttttttcagtattaattactgcattgatactgtaattttgggaagaaaatggtatgctgttcttgacctactgtcgcttaattttcctatttttcttagcgttgagcactactacaaaacatcaaataggcgtcgggactataagtgccggaagtgttaaaaccggcacttataggtctttttccacttcggcgggttgaaatcgtaaaaaaccggcacctttatcaattataggtgccggttttaaagaaaaactgacacctataggtgtccgttttttaaacaaaccggtgtcgattttgttaaaacccaaccctataataaattataggtgtcggtttttgtaaaactagcacttataccaagccgagccgagccgatcgagtggtcttatccatatgaccgcacccttatctgtcacgcccagaaatttagcccaaatttccagactattttgtttattaaatccctatccaggaccagccagggcacacaaaacgacaagtaatatacagttccaaacgtaaatacttacagaagaggcacttagtcctcacaccgaaagagaacggcagcagcggaaaaaggcgatcctagcggggcttcagcttcagcttcactccacaggcaaaactcaactggggtctgagccttggtcttctaacttcgtcttcagctcagaagcactacacttctgaaaagggggaataatagcaagactgagtacaaccaccgtactgagcaagccacaccaacgatgcagacgtgcaaggggatacaaggaggggtttgtggctatttgcataaaggcagttgtaaaacattttattgagcaaaacagtaaaacaattgagtaattaaagtaatattgaatctccactgatcaacaggcccaaccaacccacctggactacagtgcattgagtcgatttattaaggtgggactaatcacggtgaatctggtcgaccgcctataattgcgggcacggctattcgaatagttttactctgatcagaggtgtacaactgtacccacaagacacagccccacgacacgttaccgtgcgccgacatgtcaccacgacataccggaaagaggccgtgacaggacccttcgcataaccccctctaaccaagcacaccacacctcaggtttcacccccgttcccagcgggcaacgggcagtcccctctcgtgcctaggtgaatccggaagcgacagaggccgtcgcagggcccgccccgctccatcacgcccacccttgcctggatgcgtcagctagaggaaagctacactacaagcccagccgttgcccacgctggcttgtggtaagtacgataagttcttccagggcatcccgcgagccggtccttaattgccatgggtgcgactagcaaaaccatgcacccacagcccaccattcagtcgcattttagttggataattacgaccatgaagcatggccagatgtctcgagcacgcagctcattctgatactaaaaaggtctaatactgtaattatcccatcaactgagctagtggtaattaagcatggctaagcatatagttctagctaggttacataagcaacatgagctagtcgattcattacccaaggttgacaaagaacagatatcaagtaaacatggcacaagcgagcagataggtaatacccggatcccatgtaattagcaaaacatgcatatttatttgtaacgagtaaaacatttataaattggtatcaacatgctcaaggggaatgtgtgacttgccttgcttcttcacttggagcttctgaactcttatccttgcgaacgcgatcttccgaaacgacaggaactacacgctggcacgcaaaacgaggaaaaactctaataaaaaccaaggaaacagtacataaaaagtaaacaaacatgtagagctcaattttagatgaattttgcaagttgaacggctcaattcggagttcgaatgaattagatatgaattttagaagttttgagccatttaaatgaatttctagaattattaacgaattatgacgcaattatcatttatttttccaaaggaaaagagggttgctgacgtcatcaaaggggaggggcggcgccggcaagtgggccccaccggtcagcggcacaagggcgccggtccaccgtggaccgggaccaccgaggcggtccaccgccggtccacgggaaccgacggtccggatcggcccaagccgatcgggcggccacggggtggcgcggctgggcacgggcacggcttaggccggcccgacctagcgatggcgcgcggcaacgcgaccaccggcggcgacggcgcggggagtggcggcgcacgcgagggaggcgcggcaaaggggaccgatcggcccgggcgagcagggcagcggcagccggccggtcgagcacacggcgcggcggcgacgcaccggcgacgcacgcacagaagcggcagcgcacggcgctaggagggagaggaggaggaaaccggggtgctcaccacggggcgacgccggagagaggcggccgacggagggaggcgagatggcggcagcgcgagagaggtggtgcgcgaggcggcgatgttccggaggcggagaggggagatggagtatgggtcggggtagagctcggcacagcgatgccgacgacacaaacggcacggcgcggcgacccctagggcggcagtagcgggcggctggaggcggtgaatggcggtggtttcggcttgcacggtgggaatggtgctgcgggggtggaaggggaggacggagtggatgccggggtgcggtgtgacgcggcgaagccgttggaggcaaaagcacggccgggcgagcggcgctcgccggcggggagcggatggaggcggctaaaggcgaaggtggctcggggtggcggtggaagcggcgttgcggcggtggattggggaagaggagcggtggacggggtgcgcacggcgactgcggtaacggggaggcgacggcgcagtgcggggtggacgggagcggcggcgcggcgcggctggagttcgccggagagcggcagcgcgtgggctcggcgcggggagagcgagagagggcgcagcggcttggggaaaatgggggaaacggatgagggaaggcgggatcgagcccgggagaggcggcaaccggcgacggagtggggcggcatcgtggcgggtgtggcggctcggcgtggcgtcgattccctcggggagagagggggagtggggcgggatgtggtcgcgaggtggaaggggtctcgagtccacgccggttgggacgaggggaggtgcgggatcggcggagggagtgggtggcgtggccgacggttggagctggccggaggttggggatgacaggtggggtccacgggtcccacctgtcggagagagagagggagggagaggccggctggggaggcggaacagacttgagggagggagagagctgagcgggccgagggaggaggccggcccgagagggagagaaagggggcgcgcgggccgcgggagagaaggaagacttgggccgaaaatggcccaaagagaggaagggggattttctttgttttctttttattttaattgattcaatgatctttgtgctattaaaattatttctcgagctccgaaaattcgcgggaaatttcagagagtattttagggcacaaagaatattacaaaatattctcggccaatgatttttaaaggaaaattttaaattccctcattatttcacttgataaaattgctttagcttttatttaatttctagaaaatgcattattaaatgatttttaatcccgaacgagaatcggggcattacattatcctctcgatctctctcgctctccgtctctctctctcgctcgctcgctccctatcgtctctctctcgtccgacggagtggcggtagcggcggcggccccgcggagggggccgcggcctcccctccaccagatccgaccggataggaggcggcacacctcggcaacagtagcggcagcggcagcccgacggaagcggtagcggctgctgtgcccctccatcctcctcgcagcctcctcgccgcaccacgctggatccggctgcctagatgtcaggggctgctggatccggcctcctagaggcggcgtcggcggcaatttgatggtgagtcttcaatttctgtgatttgtgtggggatgctgtggttgatgaatcgatggtgatgttgatgaattaatgctgatgttgaatttatgtgatggtgagaagtgagatgttgatattgatattgatattgatgaattgatgttgatgaatttttgtgatgatgaatcatgatttcttgtatatgggatggggagctgctcgatccagagccgatgcatcgagctggttttttttggctcctgtgcgtctcaaaggtgccggttatggaatcggcacctttgaccctggctaatcagtgccgccttccgggtgccggttg

SEQ ID NO: 6645 - DNA, 6264 bp, Oryza sativa
tgctggtgggctagccactttcattcactgcgataatttccgtacactgctaccaaaggattctagggttaagtgtcttgcggatggtggatttttcctcgatgtgtatgtttccaaatcacctttgcacgtgctttgtgattttcaatatttttttcatgcatgcatgaagtacttgctagatattctgtgtcaatctgagtatttgcagctgtaggcacaaatagtaactagaagacttcaaacatccaaactatttgagtgtatgaacattgaaaatcttgtactgacgtatatataaaatgaaatcgtccaacgagatgatattgtgttattcttactccggtgtcttgttataaaatcattcctggactgggccaactcgaggtggtacatatgcattcattctgacctttcagattagatttttttggagtttgcacttcctctacggcatcacctaagtcactagttcatttcaaggcattaattgtcagcaagcaaacatgttgcacactccttcagcactagctgatcaggaataagaaagtatattcaatatgccattttttcagagagaaaaaaatatactgtaatagaaaattgtactgcattatcttcagcttctatctatctcattatgtttttttttctccattacagagaggacatttctgggcaaaggaccatgcgagcattctacaacgatgttgtccgtcttcaggtctttcccttccttcctcctataaagttatctgtttccaatactcaaatctctttctcgaatgtccttttttcaggatctgcgtggaaggtttccccattgtggtccaaacatggatctgggccaggttagtcatggtatgcatttatatcagtaatcttgctatccctgatcttatgctttactaaatcctggccattaactttgttccagtgcttcttcccaagtgaagttgtaaaggacatcatcaccccagtatttgttcttaatccagcgtatgatgcttggcaggtatccttatttccaccactagagttctccagtgttgtgtaaaactatcagtgtcaaatattcttaaaaattcccatttcaggtgcaacatgtgttgagtccagtagcatctgaccctcaacattcatggctagaatgcagactggatattagcaagtgtgattcgaaccaacttgaaattctccaaggttgagtcaccttgtgtcttattatataattaacttatccgcctttcaggattttgtagtcatgtttttctatatgaaacatactttgcaggttttaggaaaaagttacatgatactataagtgaacttaagcacaaaaaggactggggcttttttatcgactcatgctttatacactgtcagtcgttgaactccttgacttggcattctccatcttctcttagagtcaacaacaaggtaatgctttcatcctctaaaaagaaaacagaaagaaaaaaaatgtctacagttcaaggaacattatatattatgtcaaattgacaaattgtaggttagcctgtgttgagggctagcctttgcaaatttatggtgaccgtcagctgacttaacatctagtatttacagtgatgatgttcttgagattatttatgtgttttaaactattcgatgtacaagaaagaaaggtgtcctgttagtcacaagataagagtgactctataaatagtttgccgaggattcagcctataaaaaaacaggaagaagctcctcagcagtcagctgtgctactgctgtacatgagtacatcgtctaagccccataaatatattatttaatgtaacatcacaggacatccctttgtaggtcatctgttgtagattgcatgtctccactacggcattacctcatgttagtttaatttcctgcacatgatacttactgagctaaccatgaaggtgtcagtattcctccaatcttcttggtttacttcttcaatattttgctcgtggtctaacgttgaatctgctgaatagaccattgcagaggcggttggagattggttctttgacagaagagaggtgaaggaaattgattgtgaatatccctgcaacccgacttgccacaacttggtttttgccaagcctttcaaggcatgatgaagttctaaacacgtttctctttttgccatgatattgtaaaacaggaaattttatatcaatcatcggtcatcatgtaatcttcagactcgtcgggtgtttgacacccaaaatcatacatctgagatagttagactggccgaattttttttccacgcaatttatgtaggattataagtagtttattcaaaagtagaattgtatgtgctgtacttcacaacttgttttctataaaataaacaaaaagtgtatttcttgtactgttgtagtattgcctatacatacatgtctggtcaatctaccctatcataatttggaccctgtacctgccatcaatcagcttagatattttaattttccatacgattaacgtaatgatttctagctcttgaaagcaaacatgtcgttttcttctgaccttttgaccttgttctaataatatgcgtggcatattgattaattgaggagatgatgcaatttaactgacaattccatctcacgaaaaggccagccatgggctgtcatttgagatagatgggcatctaacctgtcattatccgttaagcagtgggattactgatcgtttccattacagggacgcgcacgaggcagcctgagaaaagagaaggaagctaatgaaaacgaaagcggccaagaccaagaaaacgagtcgacggtgatgccgcgttaggtcgctcatcaacagttgtctctctttccctccatttctggtccagccataaacaccattaataccgtttttttatcctctttccaaaggaaaatttgctcaatacttgactgaagttaacatgacattgttcatcactcgttttcagaaaagaaaacaaaaaaaaaagagaggggacattattcatcactgtagtggtagtgtgcctataggcacgtcactgctctccaggaacaaaacgacacaaccattgtctcctaattcagcgtctattgggacccaatgggagcacaagtaaaaacagccattggggctgagtgatgagccatcagagagtaattaatcgcactttgaaattattagttagtttctgtcacatgatgaggtgtggcaccaagatattttttgcttgagtgatcatatggactatagaatggccaaagcttcacaaatatctgtccgtgttatcgtcagttcgtcacaagaagcaaaagaactactaggtcgatcaccaagcctgacgtggaattgcagccatgacttggaaggtttccaaattccaagttgtgtgctgtgtcctggtcaaaacaaactacagtagcacttggcttgtgtctcatatagtcatctcctagtccttaaactctgcataacaacaaagcttttgccacaaaaattcttgttatctccatgaatttctttcaatctaaacccaatccacacggcagacttcagtgttaatcagagttggtcctcagtctcacctaaacctatgatgctaagtccatctttccaagtgaaatgtagtggtatgatttgtcgatagaaaaattatgctactcctggatctcacaatatcactgcaggtaggagcacaagagaaggtacagatcgcaaggacaaccatacagctacaggcaacaacagtcttcattttatcagcctgaagaaaagaaacaatctgatgctgatgccatcacgaacgaacgaaggaagccaattactagcagtaacaatccggctgtaacagccggacgacgatggacagtggcactgacagagacagtgacacgccaccacagttcaaagaaccggtacacactggagtacggtacatacaatgtcatcacataggcagagaccgcagctgctgaattcatggcgatccaatggaccaccctgctgatggctgcagcatcaccaggacatgaactcgcaccattataacacgagacaagggccaaaaatgggggcatgattcatcacacagaggaggaggggtcaggccggcgcagagctcacatgccatggcaggctaactttagaggtgacgaacatgaaccccgtttcacatctctgctgcatgcatcccttaaccacaccaacactcactgtgtgattgatgatgaattgctctcactcactcactcactctctctctggtctttcagagctcctatgcatatgctaagcttaacccggcaagccgaaaaatagggtgggcacacagacaatggggagtggagggttctacttatttagtccctatctatttaactttccatggatcaaagttgctccaaattagccattggattttcatctgggtttctgataccaacggatgttttgaggatgatgcggcgattgtccgtgcgttgttctgctttcatagatcgtgctcaggcttgtccaggttgctgctgtcactgtccgccatgcggctcgagccacggccaagctttgagaaggagcccatggccgaaggtagccctttgaagctgctgctgccctcactgaggttgtgagatcgacgcgaccgcttccgggtgagctgcagggatgacggcttgtcaggatcacaagcagaccttgtttgggccaccaccagccgtgagatgctgccccggcagaatgggcaggccggtgagggcggtgtcagggtcgtcggattgggtttgttgtgacagcacagtgccagcgtgcacggtgcacacatttgatgtccacagtcttgcacctcaatggtgcaagcctggtcgaagcagatgcagcaaagctccgtgtcgctcacctgtgcccaaatgatcaacacagccattcagtcatcatgcaaatgcacagaaagctaaattacacaatgtgtttatgggatcccaatctgacagataacactgaaattgttcagcactcaaatacctctgagcatgcatcgtcatcggcactgtcatcaccgggcgaaggggatggcagggagtactttgtgccattcaggattttcttctccctctccctgttggcttccatcagagctgcttccaggagagccttagcttctggttcaagctcactgatgaacttaagtggggatggccacaccatgggctctgctgatgtagggttcagcaaagctgcacatgctccatggttccgtttcagcgcaacagaatagggaattctcctggggaaacaaaaaccattaaaattaaaatcagtggcagagcatgggcaattcagcaaaaggacaggtcaagtttgagaagaacagcaagctcatgtgaattcagcaaatggtcagcgagttcacctgttactacttgctagactgaggtctactgtctaagaactgcagggattctactaagcacctaaattcaacacctgaacttcactaacaactatgcttgatagcacatcaatgttttcttctatatgcgccaagacaaaaactgaagggggaaagatctagttctcacccagccgaatccctttggagccgatcagctccccaggcaagcagcttcctgatgcaatccaagttcccgctacgagcagccaaatgaagcgacgtgcttccagggaagctgcatcaaacaacaccaccacacgaatcagcactggtagcaaggaaccaacagagctgaacagctgatcaccaaacattaatttgggatgccaccaagatcagcagcattacccatatgatcctgtcaaagccgacacaatggcgccgttctccagcaacacctgcacgcaccccggccgcccctgcctggccgcgagatgcagcggagtggcgccgtggtcgtccctgacgttgacgaaccgggcgaaacccctgccaagcttcgacagcagcaagtgagctcacagagacatccagagctattctatagctgtaccaaagccacacgacaggatgaggatgatctcaccatgagtcggccaccggcgtggtctgcgcggcggcgaggatggcctgcaggcagtcgacgtggccgtagtacgccgcgtggtggaggcaggtcctcgcgtgcaccgagtcgaacatcaagatctggtgcgaaatcgtaactgttactgattttttcaaacagaattactacagtattatcagtatactgattttgcagttcttttctctcacatttgcgt

SEQ ID NO: 6646 - DNA, 2506 bp, Oryza sativa
aggtagtagagcccaaaaagcaccacacctaactcacaaaaagacgcctccttttcgcgggaatcgaatcgacaaaggctcaagaacgagaggccagcacggcacagaagccacaagaagcgatcagaacagctgaaatcgaatcacgaaccaggacacctgctctcctctccggctcctcaaaactaaatcaactacctactactcctcccaatcctctctctgttcttcttcaaggagatacgagatagagagatagaaatagatacagataggagatgagagggaggggagcaagagatttgtactatggaagaagttgggatgaatggatcaaaggattggtgggagaggagattaaaggggatatgtatctgtgactctcgtgcttgcctgccttagctgagggactcaactctgttgaccttttgagcatgagagcgacgcacagcatgcaaccatcagctgctgcctttcgatttctttctccttcttctagaattctactcgaaagaaagaggaaggaggagaggaagatgaagaggaggaggaagccattaatggtggttggggaagaaggaaaaagcctttgcaggcttgtagccgccatcctcaacctcaacctcttgtggcgtccctacccacgctctatgacatgtggggcccactgcgaagatgccgatggatctgagcgtcggatgggcatccaacggatggattcgtgttcttttttttttctgttttgcttggctgcagggagactggagggacaggtcatgtatctaggcaacatatcctatgcacacaggccctcacgtgtacacacgtacacactaactaaaaaatgtcaccaaaaaatctagaaaaaatcatacacatactttcaattgtattacacctagagttaaaatattaacgtcaaatttattatattttagccgtaacaaaaaaacaaaaaatctgacagttttaaggttgtaattttatcagaattttatattttttgttattctctatgtagaatgaatttgaagatgcgactttgcacgtagatatatactattgaaagtacatgtatgaattttcctaaaattttttttgataatttttagttggtgtacacggtgtgtacacacgagggcctgtgtgcataggatacgctccacgagggcctgtgtgtataggatacgctcccatgtatctaacctgagttgagtcagcattgatatgatcatgtgtacacacatgaaaggtttgtttcaacatatttttgtattctaataaatgtgattcaattctatcggggtagcaacaagtaaatcggaacaaaacttggcatttcggcacatctaccatatcacgcggaaagggacgatggatgagctacctgtatatcgactagaaaactaacaagtgtccatagaagtcacgtgcaccattctatttttaaaacgtgattatttttcttattgaaaattagtttattataagcatatgtggtatatcaaaaatgtaaagaaatttttttatgacaacatttttgtattctaataaatgttattcaattctatgaggctagcaacaaataaatcggaataaaacttagcatttcggcacatctaccatatcacatggaaagggacgattgatgggctacttttattcgactaaatcaacaaactgtacatagacgtcacatatatagtcatataccattcaattcttaaatttgattttccttattgaaatttagttaattataagcaagcagtatatcaaaattgtaaaaaaaaaagtttatgaaaacattttcgtgttctaataaatgtggttctttgtaacgtggtaacaaacaaatcgaaataaatagcattttgtcatgtgtcctttgagaggtgtgattcatgcaccaacaaatacaggtgtttatacgttgtacgagttttaaaagtatatatatttcctatatgcatgtatatataaggcacatgtcactcatgtatatagtatggagtaggtgctaagtgcaagttcacacctatgggagggatgatgtaacgaatatatgggatagaatttattcttgcattataagtatctgtcgcacataattttaagtttcttcttgtaaagtactccctccattgattttaaggggcacattttgatttcaatagaccaaagtatgttgattttgattaaatattagtaaaattataagtatatttagtatataaaatttgcaattgattcatatttaaaagtggttttacgtatatatttaggttttacagcttactaatgatatagtatactacaacaaaatagttacaaattttaatctccacacaacttttaaattaaaatatgccttataaaaatcaacacaatagcagccactactactctttacaaacgttgtactatctttgtgtgggttgttttaaaaaaaactgctagaaaaacgtaataatgaaaaaacctctcaaaatcagttctaaaatca

SEQ ID NO: 6647 - DNA, 15756 bp, Oryza sativa
  unsure (1)..(15756): unsure at all n locations
ctatgcctacaagtttatgggattgcacagcagttggtgcatcgtttccactggcttgtccctggttacataatgggtggtgagaacagagcaaaagaaaaggcaagattgcgaaaaggtatatcttgttcaaggacatattttgtatctcattaaatatacttttatatagcatcatatattgaggacatgtttattgcaggaatatcaattctaattgctactcctgggcgtcttctggaccacttacaacatacgtcatcatttgtctacccaaatatgcgttggatagtttttgatgaagctgacaggtctgatagccatacattcattactcggtttaccctatttcttagaaggtttttaagtgaacataactctttatgttattggtgctcatattcttgcagcattcttgaacttggttttgggaaagcactagaggatatactagagcacttgggttcaaggaatgatacttctaaccaaaataaaaacaaaatggaacctatgaaaaggcaaaaccttctgttatctgcaactctcaatgaaaaggtgaatcggttagccaagattagtttgaagaaccctgtgatgattggtcttgacgaacagaactccagtgcccatgggaagaaccacacttctctattatctgatgatgaagaggaaatactggaaaagcacaacgttacagtggaacaagcagttgacgatttcaagcttcctgcacagcttgttcaaagatatgttaaaggtagcagaaaattgcctccttatatcattttaagtcatgttttccctttgctcacttagtttttatatttcattcagtttcatgtggttcaaggctcgcgattcttcttaccattcttaaatctctgtttgaaagacaactgtctcataaggtaaattctctatatccagaccagaagctgcttcggtttcactatgttgtaacttttccacttcaagttttgcttgccaccaataaatactaaaagtcatgtgagttaaactattctgcgtttgtttgtgtcttctttttgcaggttgttgttttcctgtcaacatgtgactctgtagatttccaccatacagtactcagccagcttgagtggagccctggcctgcaactggatacggataagaagcaaaagtttattagctgcaaagtgttccgtttacatgggaatatggaccaggatgatcgcaagaaatcatttctgggattcagttctgagaaatctgcaattcttgtatctactgatgttgctgctaggggcttggactttccaaaagttaaatgtatcatacagtatgattcacctggggaggcttctgaatatgttcacaggtacctgaagcatctccctgtctaaaacatttatttgtaggtttctgatttattgtttccaacatagttataattgtattatttgattgtatacgaacagacaaaatgtattgttgcagactaaagcactttactctttacctggttcctttttatgtggtagtattgttcattgatttcctgttacatgagactgtttttgtcaaaactctgcaaagtttttagtcttttgagtgctattctgtcatgtaatttcttgtgaagatgttaaggcatttgatgtaagctaagctatagagacactttctcttgtgcttcccttttgctatttatgttcttttttttgtttatttcaagtatcagcaactttattcgtttattttagggttggaagaactgcaaggattggtgaaaagggggaggctctcctgtttctccaacctattgaaaccgactacttgagagatctagagctacatggtgcatcacttacagaataccccctccaaaaggttttagacagttttcctgtaaatggacagaggcttcacaaaaggaagcaaatatctttagatatgcatccatggataatgtctttacagagagcattggaaagttttgtcacatccgaggtaatgtatagaacacattttcgttctgtttcttggtatcatatttggctactcatgcacaatgagataaatagtgcacaaatatgattccgttgatcgtctattgtgaataccatgagcttttgaccttttgctgatcttagcaaatgcattgtcatgtgtcctcttatccaggacacgacgaagaagcttgcaagagatgccttctgttcttgggtgcgcgcctacactgcccaccgaggtgaactgaagaagatttttatggtcaagaagctccatttggggcatgtagctagaagctttgggttgaaggagcaaccctccttgttgggaaggtcacaccaggtgcaactcaagaagaggaagaaagaacagaagcgcgaaaggcctgcaaaaaggaggaaaatcccggccaagagatgaatctccatagcagaaatgcttgtaactcgaaaactaatggtggatcatgatccactccaattttgtggaactaacagccgcagcttgaaggtgaaaacattgaccccatgaagctttcatgttttggccagaagcctagagaagagctagtgtactgcctgtaatctgaaatgtatcaaaagacacagaatgttttgctcagtttgggattatctactgctctgctagttacccattttaatcagaaatataatccatgtgtttcttccttacgatattgtttgctcaaaatattatccatgtaaaaactggatttgttagaaaggcttattggctggatgcaattgaatgatacagtacaaatgttctaactcggtaagcacgtttttcagacaagcaatgttctacctcattgagttaaaaccatactatcaaaattacattgggactctgaaaggaaacaacattactgcctttaacggttttcataatacaaagtttgctctaaatggcccccttaatctacactgttctggtgattccttcctgaccaaacatggtgcacaaacttccatccatgggcaacatgtcatcagaggagcttctcaaaagtgaaccaaactgtatatgagtgtccatgaaagctgcagcaaaaagaagcaaattcagtttcgaaccaaaacaaacggaaacagggtagttacagaaattggttatgtttttctttttaccaggaaaagagtgaaagaggcaaacattccctcctgaagtagtgctccatggcctccaaagtcttcctcatcaatcttcaacaggtatgcatagtaccagtaaacgagcccagtagaaatagtcacaaacctgtgtacaatatatgtcatatgttaagaggaacatatcaaaagctcagatgctggtattaattaacgatctttacagagttcactgtgccatacagaagaaagaaaacagtaattactgaaagtataataatgaaacaataattacagtaattctgtgcaaggtattgcttactagtgtcatataaacagaaataattactgataattctgcataaattttcagggtactcagctaccgacaggttcgataatcatgcttgcaatgtactccaggccaaattaaattgtattgccaaaagctcatcttaagtgatacagcacatgaatctaaagaacctagtagcattcacagtttcacacactaattatactaaattcaagatggatgtttgcgcatgcttgcttatagcttcagggtcttctaattatcagcaattaaaggttcaacgcacagttaatcttcaccgaagataacctaaatgcatctagggcagcagatgtgcacgtatcatcgagctaagatcttgcagttacaggtgtcaaaacaaccaaaatccacaccaaagcaaaaggtggattttgtagacaatgacctcctgtagcgcagatcccaattcccaactaaaaagcagaaaagttattaacatatgataaatctgatcccctatctgcactacaattgaactcctcaatgtgaggaagagactcaacaagacacatctgactacaaatccacgaatccagcatagggcgagatgggattggaggcgtgagcaactcacagtgcgatccagatggcgccgacgagggggacggctccccagagcaggccgcaggcgaggccgagcacctgccggatccagtgcacggcgtccagcagttgatccttttgcaaaggagagcccagccaagcaagcatccatcaggcaaggagaatccggaggccgccattaatggcggcaagaaggaggaggaggaagtataccttgtcccaggaggcctccgggtcgaagtacctggcgagcttggagtgtccggcgccgccgttctgctgcgcctgcgcgcgcgactgcttcgacggcttcgtcttcctcatctcgctcggcggcggcggcggcggcggcggagatgggatcgcgagggagcagtcaacaagtctatggatggagctggtttggttggtggcgattttgcagatgcctccttggaaagtttggatattgcatttacgtccctactagtgatggtcggctaatgattggtccatcattaacatgtcatctcattacgtgcaaacatagaaaaataagagtaaattttataaagctgtaactttagtgacaaaactatcagtttgctgcaacaatagcgtcggaaattatcacaaagctgtaacttttacgttatattgtcacctatatgtactatagcagcatataaggtaaaagttacagttttgtnataatttcccacgctattgttgcagctaattgaagcatgtcactaatgttgtagcaaactgatacggagtagttttgttactaaagttatagttttctgaaatttactctagaaataaaaataaaaagctctttatcaaagcctaatttcgagcatgagaattattccagattacaaaattacagagtttcaatgaattttctactatggatcattggagagcaagccgagaggacacatctttcacaaaatcagtgggcgaaattacagcagttcacctcttaaaaaaaagagagagaaaatcccataataacactataacagttcagtacattggatagaagtacaccatgagatcactgctcgctaaacaagcgattcatttgataagggaagtactaacacacaacgccatcaagtacaagatctgacaagataatttgaatcatacatacaaccggcaatgagttccctgacagttgatgaattatttgaagatattactttagttactttcttggatctacaatgcttgatcagttaaagagccagtctgctcaggtgacaacaaattgcctcagctgacaactcacctgattccctgcaggaacaatgtgaaaattgtcaagattcattatccgcctttcactgtgattagtagtatcacttatcattcatgcatagaatgcaaaaaaataaataaataaataaataaataaataaaatcacatatccatgttgttgtctgccttgaaatatgatacatcatgcacataaatttggaatgctcgaaatgttatggataggataatggcccgaaaagaacttccaataagcatggtgcaaaattcagtgacagttgttcatctaaggaattcatatgtaagattgcagattgcaattcttcctgacagggtactaacccagtagtaaaaaccatccttgactagcctaaaaggtgtaaacctcaatgatcattcgtaccaagttttgaatcgcctgaatgcaaagttcacaagagcctaggaaggaaccagcaaagccctattaggctattactactaaaaactcaacttgtgcaaaagagcaaatgtgcatcaaagcaaaagggcatattgcctccatgaatatgcataatcaaaatggttctcccactcagctataacatctgtgggaagtgagtagaacattctaaactgacacttgagcctcactgctattttggctcctcaaaatataatcagaaactggaaacaaattttaggagaagagatggttaccacaaaatgtggggagcgccgcacaatagataccgcagaaccaggagatgctgctgatagggcagcagctcctcttttagaaggtagattccgccccttgttcttactctgagaaagactcttatcaagaacattttcagttctagagtcaagtggcattaacattggaggtgaaactggtatagaggaagcatctggacaaacaactgaactcatgagaagacctcctgcggaaatcagttgcacgagttagattacaaccaaaaaaaaggaagcctgtgtgcataaatatgggagcaaacaaaggatcggtactatgagaaaagggaggatgagaagtcatgaagggagagaaaactagtcatgtctacagtgcacattatggccagttgcacggcaatgcagctggagctgagtacacagcggcttggaggagagtcgtaattttccgtgagatggctgttaagtgttaacagggaagcttatgggtaatgcttaggagtagatcaattacatagcatatttatgtggttccagtacttgatggcaatcatggcatatctgtagtttggtaattagatcaatctgctaaggatatggcatatttaaaaaggctattgtgccacttgggttgaggacacctcagttaggactaaaggccctatcccctaatccctaccatgttcattgcaacgacaattcatactgacagttaatgttcagtaccattcacagtagcagcctcagcctggaacctttctctgacgattcttacaaacttgaacagatcgttagtgaggttcaaatccttcatcaactcttcagaatcttttatacttggatcacattgaagtactgttgttaggaaaaaaaaagataatgtcaagtacagctcaaaaaatcaagcattcaagacacttggccaagtttcatgaggaacttcaactcacagttatatcgatctttggcaagctttaaggtaaccgagtactccttatcagggctttgcaagtctattttgttgaagatgaactttacaccttgaggaagaacagggcaaatgccatgaaagatggaattggcataatttaggggcgattccttatattcctcagtaaagttcacttcatcccctatgtgccactgttgtcccaatgacatgtgggctttaaacccacgagtcagtgagctgataagtggcatataaaggataagatgaaatttaaaaggcataaggaatttatcccataatttacttgaacattgagctgattcatcactcaccttctcctccaacaacctggaaaccaaggaacttgctgtaccagattacagcttcttctattttcttcatccgtgtttcatcctcaataaactttgcttcaagagcttcaacagctgccacagtacatgaagtatatcactatcgtatgaacactatatgtgcacagttcaagaaagacattttctaagactagcaatataatgttttgaaaaaccttaaataagccacagcaacaaaaaaaaaaaacccaaaacatagccctaaaatgataggtaagttaccctcgaggtgattcgatatgactgcagcatggtgatctctcttgttccgctgatctgtaaccatgccctcaagcttctcatttatagccgcagtgcttgaaatcgtctctttggtaagttggtactttgactccttgccggccttaactgtaaatacagtttacaccaagatttcaggcataccatgaaccatttggcagcgaagtgcagtttaatttaccagacaatgcttctgcaagaccatcttccaaattccgcaactgaaggttgagtccactcagttcctctgcaccatccaaaatgttatgaaaataaatgcacaacagaaacacaaattttatcgtcgaacacccttacaggaaaaagaccatggacaccgactggcaatgatcaatgatcactattgaggtgctaaaaacgcaggggataacaaggcggacaaccccttcccatatggcttacaagggatatataaaggagaaatgtaggagccctaacagataaaagattagaagtctactaggaaactataagagaaaacgataatcctgtaatacaaagtcctattaggaaactcatcggaatgtattgctagctgaaattcagcaatatttaacacaaaaatttcagcactcatcggaggggaaaccgggtagagttacttcaattcactcaaattcaattcacattcagtaccaagtaccaaccacattttccaaataaaataaaatcgaagatacatcagacacgcgtccaaagttcatttcgcacaaaaaaaaatggggggtgtttattgaaacgagagagattgagggggtggggggagggattaggggagggcgttgccttggcgggagatggtttgacgggcgatggagcgggaggagagaagcgcggcgcggtagttggcggaggtggaagcttggcgctccctttcgacggccatcccgcgctggtacgccgccagctgcgccgccatctgccggcacagctccgcccctcctcctcctcctcgtgtgccggcggcggtgcctccggcttccatgctaccaactccctgggcactggcggcgtccggcgtcggcggcggagggatcggcggcagccgacggtggccggagtgcgggttgaagtgaggagttcgaacccaaaatttgtgagaagaaatttctcctttttggtctgagaaagaagaagaagacaaagcgggatccattccattgtgtgggcctttttgtgaagcgtattgggcctcatattgggcttaggcccagatcatcttgaagaagagctgtgcttttacccattttgaaggctaaatttgaccatattttctccactttactcatttgactctacatttcaaaaatgaagttattgtcttatcctattctctgaagcaagttaacggtgttgagactagagctcaaggtcaaaatgtcatttatgcccttgcttatttgacactactttctcacaggttctgttcatttggttcaattttgtgcccttactgtgtagtataaaatttgtaatgaaatgacatatctctggcagtttaactgaatttgacatatccgtgacaaagttgacttagatgtcacaaaatctgtgaaatctaagtgaaacaaaacctattatattgttaaacgaatagaaaaaagagcctccacgttcgctctcatggcctagaaattctcacattaatcggagaaaaagaaaaagcagagtccatatagaaatacaatttagaaatagttgaaattcagaattaaaaaataagaaatattagaataggagactagagtccatatagaaatacaatgttgaaatagttgaaattcggaattaaaaaataaggaatattagaagaggagaatagagtccatatagaaatacaattaggaaataactgaaattcgaaattaaaaataagaaatattagaagtagagtatagagtccatatagaaacacaattaggaaataatagaaatttagaattaaaaataaggaatattagaaatagagtataggtccatatagaaatacaattaagaaaaaaaaagaaattcggaattaaaaaataaggaatattagaagtatagtatagagtccatataggaatttaaaactaactaaaatttagaataaacataataaaattaaaagtagagtttagagtccgtataaaaatacaatttacaaataactaaaattcgaaattaagaaaaacatgggaagataagtttaaagtcaatataggaatacaatttagaagtaactgaaattcaaaattaaaaattaaataatattgaaagatgagtttagagtccacatagaaatacaattagaaataataaaaattaagaatattggaagaagaggatagagtctatatagaaatacaatttacaaaaaattcggaattaaaaaaaagaaatattaaaagacgagtatagagtccctataggaatatatataatttacaaataactaaaatttgatattaaaaataattaataactaacacatatataaaatacaatatgaatattacacattagtaattttgtaaagttattgcaaaatttaaaattatgttgtcattttaatatatttgaataatataatgacaaaacatatatgttattatatgagagaaaatataatgatgcaagccgcgcaaaattgcgcgggccaccatgctagttaaaaagaaaaacaaaacctttgagaaattagcagttccaaaaaaaaaatccaactgaagctggatgtatgacataggatcgcccaataccggaaagatggaaaggcacaaaattaacaaattctgctaaagaataccaacaaaacaaccacaagtcgtagagcgaagcgatgcgagggatgatttccagtcggccacaagatcgatcaaaacctgtgatgactgacgagacaaaaatgaaagaaacacagccaattcatcatcatcgaagaagaagaaaatggataagatcgtgtggtgcagagtgcgcgggagatacaagtgcggaagcaatcgcagccacagccattttttgtgtacacgtagacgtctcctcctctttcttctccatctccacgttttttgttttatttatactactccctgttttttagttttatttatattactccctgtattttagtattttaatgtataacgccgttgactttttaatcaacgtttgaccattcattttatttaaaaatgttatgtaaatataaaaatatttatgttatgcttaaagaatatttgatgatgaatcaaatcacaataaaataaatggtaataatataaattttttaaataagatgaatagtcaaacgatggataaaaaatcaacggcgacgtcgtgcattaaaatatgatatgaaggtagtatttaatttgcttttgtttcctccaagcaaccaccacctccactgcgccggcgtcactaccgaccgccgttgagtcgtcgtcgtaaatatcccacctctcctctccggggcagccacacgcccctacctccaagcttggagagactggagccatggctactgccgccccgccggcggcttccggtgcccgacgcctcggccggccgcgggcggggctgcgcgtcggggcagtggcggcggcggagggcccgtcgtgcctgtacgtggggcccatcgagacggccagccaggagatgctcgaggcgctctaccatcaggttccttcacttgcttgctgcttatcctcttatttcctgctcaatcattttcttatactgccaataaattcaccccctatacgtgttatcttgcttgatgttgtaacagtccccaaatgcttatcccttaatgcatagaaatgttggaatataaagtgaattgtccgtctttcctcatcagcaacacaataagaagtaatcaccatcttgttgttttttctctattgctgttttgataggccagggattcctactacagcggccagcctttgattgtcgatgacatgttcgacaaagttgaggtataattcttctaatcttttctctatctatatattcagcatatatgtactcactactcagctcagctaatatgattcaacatgtaaggctttaagatgtgtaacaaattgtatatccatgcccagttgaagctccgggtttatggatccccatccgtagtgaagtatccccgttgcagcctcaagaggcaatcgacgtacgcagacgctgaggttaccttttgggagggaaacaaattcagtatctctacatttgatctcacgactctggcaatactttcgacttacagtccgatgtttcgattggcttttgggtgtagggcaggaggacaaatcaatgttcatggcactctcaagcatctggatgctgctgctcttgtttggcacatcggcatttctcgttccctctctctgtattctaagcctcacttttggggatgcattcggagcaaggtatctcttgtatggtgcaaaatcgtttgatgtgataactagggtaaatgacatggttttaatcggattgggctatctgattggttatccgatttcatctgcatctggtaagggaacttctttgtaaatattccgcggtacaaggatttcgtgttccctgatatgccatgttggccacatggtacaatttttatgcgttgattaatcatcttcttatttttgttctttcagttggtgcactgcaaggcttgctgacaaacaatttggttgcactaaaaggttcttgcccaaattgcggtgagcaggtcagcttccttctacaagtagccaatttgaatgtttatccatatttcatgaagttcatcttttcggtcatctaaagtgtaacctgttcctgccaggtctttgcatttgtcaagacggataattccatcaaagctccccatagagcagaatgtcatgtctgcagctgcccactggagtaccgcactaaagttgaggtatgccaaaaacaacaatgaagaacaaatagctgaatgaaaatgtctatgacagtaaatggcttggtttcagagtgccatatggtataggagagggtgatcattttagattttggtgcatgctgtatgtgtagtttgtgactctaaagaaacaaaacggataatgtctactttcttgacattgttatccagaaatccttgtcgggaactagaagaacatgggtttatggcagagtttatcttgtgaagcaagggcatccaaggaagcggaaatggttgaaagactaaattgccagtgctagatgctgaagaaagtttagaggatgattttaagttatgtggctattctgaacttctgattgactgaaacatatttagagatgttgctcttactgctccaatgtgcttatttgtttctctgttcaaccaatgtatcttgtaaagtggtaaattccttggaaagattgccaaacatgaacaaatgttaaattgatgatgcagtattatgaataatggcgtgccttctcatatatttgttcattagaaatttatcttcatacatgaagtatgaatggcaaacagtggtctgttaagagcaagttcagtaggatcgaatttgttcactagatgttggacactaatagaaaatcatttatcctgttcgttcagcaaagttgcagataaaaaatgtcagacagaatcatattcttattgctttaaatcgcactaagcatactatatgtaaccaaatcatttcttttttctattcgaagagaacattcatccaaaactggtttcagaggggaagatctagaactcaaaaatatgatctggggcagcttgtagatttaaaaatcaggaaaaactggatctgggcacatctgttgcctcgaacaaaaatttcgcagcattagaactagatataaactgtacaatccacaatgcactgaactgaatgcatgcagatataggcgaccacatactttttacttcagacaagactctgactagaagctgcaaaaacaactaaaacaggcaagcaccaaggattcacaactctcctcttctttacaggtccctctaagagcctacactactcatctcaacagatctatatctgatcatatgatatatgattgttcacttaaaccagcctcgcatttgcgggcttccccttcgatgacggtttcgatccattgctgcctgcgttcttgctgctggacttcttctgcagctgaggatttgcccctgtctccttggaatcctggagctgttctaatacagcaacaacctgctccatgttaggcctgttcttggcctccacagagatgcattgaagtgccagtgttgcagccttctgggccttggcaagggagtactgcccgcccaaccgggcgtccaggatgcggaagatgcgccgcttgctcatcaggtatggcctagcccactccaccagattgtgctccccggttgggcggttcttgtccagtgctcgtcgtcctgatagcatctctagcagcacaactccaaagctatagacgtcgctcttggtggtcagatggccttcacaacatacagagaaatgtgtcagttaattcaataatagccaaatcactctatgtttggcacccagatgccagcaagggaaccatagattgacagtaaacacgatgtgtaatgaagctcaaatctttgtcgtgcatgttcattcattgtgatgaaatgattacattctaggattcagaacatggaagtaatatgctacctgttgcaaggtattctggtgcagcatatccataagtccccatcacccttgtggagacatggctcttgtcaccagtcggtccatcctttgccagcccaaaatcagagagctttgcatcatagttctgaaaatacagtctgtctatcagatcaccagttaagctatcttgtgaacacaaaggataatagttctgaggactccgtaccgcatccaaaaggacattagaggtcttgaaatcacggtagatgactttaaccttgtcactgtggagaaatgcgagcccttttgctgctccaagggcaattttcatccgaaggttccaggagagcggctgaaaatgcgtactccctgcattttacaacacattttagcatgttgtattccaaattgtaaatcagaagctagcaactaggaaagtacaaaaaaaaactacttactcctgaaaagatgattttccaagctaccacgtggcatgaactcataaacaagaagacgctgctcatcttcgacgcagtacccaacgagccttacaagatatgggtgtgacaactgtccaagataattcacttcagcctgcacaaattgaaaggaagataatgtcatacacagtgcaaacttgacaggaaagaatcagccagtgggtactaaccagccattccctgtgaccctggtggccttcctgattcaacttctttacagcaatgaccatccctgtgcctggcttagttggtgcgagcgtcttctcatcgatccaccctttgaagactgatccaaagcctccctcaccaagcacactgtctggccggaagtttctggtggcagtcctcagctcattgaaggcaaaggccttgacatttgctgcctccaggatctcatcctcgctccgtggtgttggcggcaccgaggctgcagacacactggagttgctagcatacttggatgtcccccctaaacaacagaagacagtacaaattttcaggccgtggtccattagattttagcctgatcaagttgttgtttctttgcttggtttgggtattaaaaggcaaaaacttcacagataagttaagaggttgcaccaaaagtattgaactttctgcataatacagtcaataacattgaaaaaaaagcacgcagattttggtagaaagtagcaccaaaattagaattttccacttagcctgatttgagcttctgcacttggaacgaacaaatactagcaacaaaggaaaagtcagataaagttatatgtgcgtttccattggaagcttcctttcctactcctagtctggagaaggagaagaattgagctttacgcatgaaacaaatccaagaagagctcaaactagaacttatacgcacgcactaccagtgctaggagacaaggcatgtgattggtgaccctaaacagcctgtaggaagccatta

SEQ ID NO: 6648 - DNA, 2884 bp, Oryza sativa
tacaagctgagttgctgctgggaagaacaggaagacccatcatgtggctgttctgtttctgtggtggtgtattgattgtcaaagggaagctcaatcaccatttgttttttttttttttgccacctgaaaactgaatgacagatatatcctgtcccacagcaaatgaattcagtttgttgtctgtaaaagggaaagtgaagcaagttttgcatgagacagattctgaattcttcttcatgatcacggatactcaaaattatgttcagcctactcatttggtagaattcagaacatttgcatccccaaaccatagaaggttgtttataagagggaaccgcaaccagttagcgcattatttcctcaccctttttttctttggaaattcagcttataattgattcggtgtgaacttctatgaaaacaagcaaaactatggtctccagtaacaaattgaattgtgttgcataaattacacaacagtacacctgaagtactcgtttctaacattctgaatgttgaactgcaggaggctcctgatggaagagctcaagaacattgttgtctgctaattatggaaaacaggcaagtagttaaagtagacaaacacgcaccttacttatcagcagttccaattcagcaacaacatcatatataggttccttgagacacagaagtgaaggaagaggggcatgggccatgttcatttcagattatatagagatcatgttgtccccatgaaatgaaggtggttttccaatttcggtagctaatgtttggtagtgagaccagtgtcgatgtaaactaaaatctttgtatgtatctttctttcagggttcagattgctccaccgttttttggggggatattcttgatgcaatataaaaaaaggcgaatattagggatggcttgatgatctaaggctcccgtacatgttttttgcgagaaagtagctagcgagcccagctagaaacaatccttcttcttaagataatgagctaggaacatccttttatttgtccatctgtagttaactacaatgccttggcatcaagaatctccaatcaagaacacgttcacactataatgtgtctagcagcagctagcatcattatcctaaaaaaatttagctacatacataaacatttaaaagagtaaagtgtattgctggcacttaaatttgttcgtcttatctaggtccttgatattgttaaagtgtattattttgttctcaaattaccatgacatctttgagatcctatatggcactcacgtgtcaaattaccacgacacctttgagatcctatatggcactcacgtgtcatgtcacacgggtgttaactcattttctttatatttttctctttccttttcttctcttcttcgttcctactcgtgtgggaaaaaaatgagaaaaagaaaaagaaaatttaggaccggaatatccgtgtggcatgtcactttagtgtccatgtggcataccttgtaggatcccgaagaggtcttggctagttaggaccggaataacacacttaacaagctgggggatttaaaaatacattttaagagtttggagatctgggatgtcattgataaacaagtttagagatcgacaatgcacgttcgtcttgtttaaacaagacaattctatttttaagataatagaagcttaattgagctcatccaattacatcaaagtgatataactgtattgagaacactctcggactttgcataactaagttatgcataaccaaaatacacacaatgtggttttaaagtgaaagcaaatacaaaacacggggagaattaagggccatcaatcttaaaactaataaatcgctacccacgtttctgggtaaaaaaaaaattccatgctccaatctctaacatgccgcagtagtaaaatcaatctcggtttaccatatgctagcgacagagaaagcatggttagtgtagctgtctacccattttacacttagcttcactcaattggacagtctactggtgacatcgatgaacttacatccaacaacatactccatccgtccttaaaaaacaaatctagaattagatgtgacatatcgtagtactatgaacctatatatatctaggtttatagtactatgatgtatcctaaccggtactaggttgatcttttataggacggagggagtatatactatttcgcagagcacacactgggaaaaaaaaaactaaaacattaaattttggaccgaaagactaaagcatttacggcccaaataagcagacgtgtgtatccggcccacttaaaggttggttggtctcttcttcttcctcctccatcccctttgccctcctgctgcgccgccccaactccggcgccgcaacaaagccatggccaagaagctcggcaagtcgccggtggcgaaggaggaggacaaggaggggctcttcgcgtcatgctccttcaccgacctcggcctccaccccaccctctgcgctcacctccaaggtagtttttccccttcgacaagccatggctggttggttcttggatcgaatttagagcagaccattaccgagttgatgtcaaaattttactattctccgacgcctctgactgattttattttgttatctcgtccaacttccgtgacaagtttcacagcatgctagcatagggtttatgaacggaaatgaagatatatatattctttttattatagcttggtaatcaaacactttggtcgtctctttgatttagataagatgggcttccaagcgccaacaagaatccaagctcaggcaattccagtcgccatgtctggacaacacatgtatatgctcctttttcacaataccataactcctttgattcagagacttcttttttttatttaca

SEQ ID NO: 6649 - DNA, 673 bp, Oryza sativa
  unsure (1)..(673): unsure at all n locations
aattcctgcagcccattttcagcaccctatcccttgcgctattcatagataccatctcatcaccaagattcttcatcctgaacatacagttgactatgagcacttcatccttgtcaatgttcaggtcctcaatttgtacggtttcccaccgtgaagcaatgccctgatattgaaaaggcaccnttgaacaagtttgcataatcagccaaccgcttccctgtctcctcaattatttcacaggggtggaaacctggctggggcatatctatacctgtgatcctaagcttgggtggacccccttcttcatttgcaagccgctgaatcaatgatggccactgaaagccagtgcaaatgccgaaatgaacaatgtgcacctttcttggttgctgccctttgatgcatcaagaatagtttggtttgcataggcgaatgacgccctttcgaaagggcaagctgaaaggtagaggctgtaagccttcaacaaactctcagcactggttcggcttgccatgagcttgcgatacacctggctcccgatcccagccaagcgcgcctccagaccatccaccaagtaaaatgccaacctctggttactatctccatctggtgaagaatgctgtcttatcttcttcactagttcactggccgaaatgcggtcgtcagctgctactgc

SEQ ID NO: 6650 - DNA, 1001 bp, Oryza sativa
gcaagcataaagaccattcttctctggatcatccaccaacttttcaatatttggaatgaacctctttgcttcctcaacacctctcctgaattgcaaagccaaacggtcaaattcagaagaccagtcggtggttatcgaatgcgcatcctgtgacccaaggagatcactaacaaagctaccactacatgcctgttcatgataactgctgctaccattatcagggtaatctgcttgactgtcaccgttaattgctgtctccttagatgaagatgggtatgccttcccaagaatatcatagaagggcttctctgtcgcctgaagtgcatcctgtcctttttttatgctgatcttttcatcaatatcctcctccatcaatattctgtttatataatcaagagttatgtttgagttggtctgacaatactcagggctgtccattatgctagacctgcattgctttaagcttctgaagcagaaatttgtgatctacaaaagagcaagtcaaccttttagaagggtttctttaccagccaatgtcttttttttttgcctctcaaaacttgctaaaatatcaaaataagtcatagataggataataggataagttcaagagttcttttatggtcctgagaggtgccacgctaattaacaacaggagttgccaatatgaatgaaaacattaaaattcggaggtactggtacctcccaggactgtaatcagcaaaacatagttttttgcctagataaactgacatgtaaaaccatctctggcacccaattttgaagattgtatgcactacttacctgctatgtaaatcatacttttgacatggataacctccaaactctggaagacaccttttgttgagaaaaaatgttggtgtatcaaaatgtaggagttggtaacttggtataccaactacactgtagaatatatcccaaatatactttttatgatgtatactactattactgctgttaccaattgttaacagcagcaa

SEQ ID NO: 6651 - DNA, 9896 bp, Oryza sativa
tctattcctagcttaggtccagaaaattcttgatatgtgatgaaccagacaggcagacggacagtatatatatactgctttgatgttgggtgagaaatgttagagagtaaaagaagtgggtgaaacagacacgatcagtttgcagatggtcacaacaacttgccatctccctccttgcacgattcacttggtacggacgcattgctcttgcttcagccttgttaccttgtactgcatctgtactatctcaatgtgaatcatgtgagattgatttcccaattcccatgcggatgacagatcacacacatcttcaagacccacacggccggccatgcatgttgagccgatcgaccacgttgattcttcttcaccgtgctgccattccatcgaacaggctgtgggtgggggtcggagttttattctccgaacccccctcgggccgtgttggattgggaaaatgagaagccgacggcggaggcggcggtggcgtgctacagcggcaggggaggaagcggcggaggccatggccggagatgaaggtgggcttggacttacgtgcggcccatatattaactaattgggccaaaaactaaacccttaagtttaggggtgtcagtgctgactgtgactggactgtgggacccggtcatcttatccgcatcgcatggaggagaggaatcgcctcccttatcctctcgccatgcatttcctgccttgagtgtgaggatcatattcatattgcagctagcgtactgcactgatcgatttgctctagctagctcgtcgttagccacccatggctgcttctcctgcttccactgccgccgccgtcgtgaatgcgccggcggccaccggcgggctgctgctgccgcgggggaggagtagttggagttggagttgctgcaacaataacaattcttcgatggggaggaggtggcgggcggcggcggtgggggaggtggcggcggaggggaacacgtacctgatcgcgggggcggtggcggtggcgctggtggggacggcgttcccgatactgttctcgcggaaggacacgtgcccggagtgcgacggcgccgggttcgtgcgcaagggcggcgccacgctgcgcgccaacgccgcccggaaggacctcccccagatcgtctgccccaactgcaacggcctcggcaagctcggccagatcgacaagtaatcatccatctctacctacctgcttcatcgacgatccatccatccatccatcatcatccagctgccagcttctgatcatctgatcactatatacatgtgtgtatctcaccatctgtgtgcgtcgtctatataactatatactataatcgttagtttggaacgctggaataattccatatatatggtctaattccagtgttccaagccggctatatatcaatcgctacttaaattcaatgtacttgtgttgctgagctactttgtctctgatatacatattcattgtctctcgctgctcttccgtttaatggaacaatattaacatgttcttactactcaccacttttgtttatatttcttcttttttggatggactggaacgcgtcgttggcacatgtacgcttatcgctttattaaattgagacggttagtataagcgaatgattttgatatatatagctccgagttaaatactgtcctttttggagtatagagagagctagctggctctcaggcttttcctaagttttgcattgtgaatataaaatggacctatatatcagagagtaagttcgatatggaattacggagtatattgcaattatcttttccctctctttgtttggtatgaaactaattagcacacttgaatagctgtgtcatcttcaacttataaactgtacaataacacaaggcaagcaccaactaagtaattaattattaatcttcctgcggatgatgcacgataatcggcaaattgaaggccaagcctgaatagagggcttggtcactttaatgacattttcaatcttaccaaagttgacaaaaaagtggcaacatttagtttcctgccaaattttggtaactatataagaaatcctaccaaaatttggtaaggtttttttttggcatcaaagtaaacaggcctagagatagcatcactacaataaagtttttttgatgaaatccagcgcgttgctgcgagagttttatgtgatattagtaaaaataacatgtaagatagtatattttgtataattttcatctctggttgactattgaaacaaaaatctataaacaatttagattaatctctggctcaatgagagaaggaaaagaaagaaggtaatatatatataaattaatcatccaaatgtaaaactaaagtgctatgacattgcaagagaagaaaaggacgaagataatttaacaatgcatcataagtgccttatgatgaattctctgcattttataaaatgtatctatgtcttgtggcagtttcatatagacatttttttatgtctataagagagtagaagcattttctagagattaaattgtaccacaaccatatccaaccaatgcaaaagaaaaggagaaaaaaaatgctttcccttgttattgacaatccttgagatcatgacttgggtaaatcaatttcatcttccatgcactaatcaacttaatataatgtcatacctgtatatttgtgccttgtgttatttatatgtagttcctaagtatgaattaacattgaaaggtgtgcctctatatagcttaaaatgtcttttacataacatgcaatttttacagtacatgaagaatttctctacaagataaaatagaatcaaacatactaaaaatgtctctaaagtgtctctctatagtaaaagttttctatgcaattttcaaagtgcctctaaaaagtctctaccctataaaactcctaattttagagccaattaaaaaagtgtctctaccaaaagtgcctctatatggggttttttttgttgtagtgatggtactcatgtcaagccgttgtccaccttactaattatatccctcacctccgcaaacatatatacttcctccattcaaaaatgtaagttgtattttgttttcttagaacaagacttggactaacaattgctagatatatcatttatgtgacacaaaagctagcacaatcataaggaagtacttttgaatatgaatctcataacatcaattttgcgtcataaaaaacatattataataaagtaactgctagtcaaaggcttgtccaaaaaaatatgccatatattttcaaatggagggagtaccatatatatgcaggtttaatctagctctagtgtcatcactgtccactatgtatgctcccgccatcgccttaactcgaagtctacttgttaattttgtggtccactatggcactatccataacaataaataaaccataataccagggtgtcctagacatggctctagctgacgtgcgtatatatagtaagctccaaaacattgctctgaccaaccgttctttttatcgctaactatgacttctagttgaaactaaaatccacttgtctgagaggaaaaaacaaaccacgatcgcatccaccagatatatgtgagagtttgatctatcactagcgcgtcatcgctatttctagtacatatgcttctgtcatcaccttaattgtagtctatctaatcttcctccttttccacttgccaaccctaaacgaaatcgaattcactcgttgatcttgtggtcgactatgcatagtaaaattgtatgtagtacatagtaagctacaacaccttggtatagagtaagtggttttttcccatcactagacaacatttggcttcaaaagccacaaccatatccaaccaatgtaaaaaaaagagataaaaagtatgtccccttgctattgacaatcctcatccatcagatatacgtgagtgtttgatctaccactagcgcatcatcgctatctcagctacaaaaccttggtatagagtaagtggttttctcccatcaccggacaacatttggcttcaaaagccacgaccatatccaaccaatgtaaaaaaaaggagataaaaagtattttcccttgctatttacaatccttgagctcataacctgttgggtaaatcaaatttatcttcaatgcactaaccaacacaatctcatgtcatacttgtacatttgtgccttatagtatttatatctagttcgttagtatattaacattatagagcttaaaattcctcaaaaaatgcctttacataacacgcatatttttaagtaccaaaagaatgcatctacaagagaaaattaaataaaatatactaaaaatgtctctaaagtgcctctaaaagtgtctctacactataaaactccttgttttagagataattcaaaaagtgtctctacaaaagtgcctctacatgtttttttttgttctagtgatggtactcatgtcaagccattgtccaccttactaattatatccctggcctctgcaaacatatatactccctccatttaaaaatgtaaggcacattttgttatgttagaacaagaattgactaataattttgcgtcacaaaaatcatactagtcaaagccttattctaacaaaacacaatacagcttatattatattttgaaatggagggattaccctatatatgtgggtcactatccactatgtatgcttccgccatcgtcttaacttaaagtctatgtgaactccctccctttttactcgccaccctaaacgaatgttgattttgtaacccactatccataacaataaaaccatgctaccaggcatgttgtcctaggcgcggctctaactaacgtgcatttgtatagtaagctccaaaccattgctctgaccaaccttttttttttcactaactatgaacccgggttgaaactaaaagtcacttgtccgagagcgaaaaaaatgcaccgtcgcatccaccatatatatatgagtttgatctatcactagtgcgtcgttgctatctctagtttagatgcttctgtcatcaccttacttatggtttatctaaacttccttcttttccacttccaccctaaacgaaattgagctttctcattgatcttgtggtccaccacgcatagtaaaattgtatgtatagtacatagtaagctacaaaaacttggtgtagagtaagtgcttttttcccttcactagacggcatttggcttcgaaagccacaagagtatagattaacattatgagaagtgcctctttagagcttaaaatgcctcaagaaaatgtctttacataacacgcagcttttaaagtaccaaaagaatgcatctacaagataaaattaagtaaaaatatactaaaagtgtctctaaagtgtccatagagtaaaagttttctaggcaacttttagagtgccactaaaagtgtctccactctataaaactcctgattttagaggcaactcgaaaagtgtctctataccaaaagtgcatgtatatagggtttttgttgcagtggtggtactcatgtcaagccattctccaccttactaattatatccctcacctctacaaacatatatacttcctccatttaaaaatgcaaggcgtattttgtttttttaaacaagagtttgactaacaattgctatatatatcatttatgtgacacaaaagtacgatcataagaaagtactttcgaatacgaatctcataacatcaattttgcgtcacaaaagccatattgtaaaagagtgattaatagtcaaaaccttattatagtagagtaatacaccttatattatattttgaaatggtgggagtaccctatatatgcgggtttaatctagctctagtatcgtcactatccactatgtatgttttcgccatcatgttaacttgaagtctatgtgaactccctccctttttgatcaccacccccaaacacatgttgattttgtggcccactatccataacaataaaaccatgctaccaggtaagttgtcctaggtgcggctctaattgacatgcgtatgcatagtaagctccaaagtatcgctctgaccaacctttttttttgtcactaactatgaccccgggttgaaaccaaaagtcacttgtctgggtttaaactaatgcgtcatcgctatctctagtttagatgcttctgtcatcaccttgattgtagtctatctaaacttcctcctttttcacttgccatctccaaacgaaatcgaactcggtcgttgatcttgtggtctccactatccatatggtaaagctggtacatagtaagttacaaaacactggtatagggtaagtgaattttccccttcattagatggcatttggcttcgaaagtcactctttcgttcgaaagcgcaaaaactaaggtaaagataaaccataccaaagcatatatagtatcaaacacgcgtcaaatatttaccgtgcgcacgtgtgttctacatgtacgcgaattattcggaccaatcaatcaataaattcctaaaaaccaagctattgatcctaaaaaatgtctatggtaatccttttcctagtgaatttacccatccatgtatacccatgcccctagctagatcaaaagcaatgcatagatctcaaaccaactaccataagtctgagatcgaagagagaacactgtaattaatactcaagcaagttaccaaaaagaaattaagaaagatgtaaggagaacaccatgagaagggaaattaaagatgtatgaggagcgatctaaagggcttattaatcatactccatgtatcggccggccgggaataaactgagtagaggtgatacattgatgagaaattaaaggaaatcgattaagaaaggcgactaatcaataaagagaaacctccaatataatccgacgcaggcaaaggatcgtcgtcgacgatgatcatggatggggtggcgagctagctagtactcgtcgcgccagcagatgagcatttggatgcagcggcgtatgatgtagaagcgcgcccggtgctccttcaccgtcttggtcagccgatgctttatgttctccgcggagtagctccggcacggcatcttcacttgctccggcgacgacgatggcggcggcggcgacttcttcaggcccttcgtcgtcttcatcacctgctccttccgcacggcgacgttgccgcctgcagcatcctccttcgtcttcaggttcttgcaggtcttcttcatcacatgcacttcccttgcgccgcctgctgcagcctccatagtcgtggtggtggtgatggtcgtggtcttcgatggagaaagagatttgaggatcgcgacgacggtgatgaggtaagctatagctatagctagagagagcggtcactcacacctggctgggtgtgccgcgcctggggtctaaaccacgcgcagccactgctgacgtgtggggcccacatcggccgtccgaggatgacgtccggccgagccgaccacacgcacgcacgagcccggtgcgggtcgtagcttgcttgctgcttcagttactctctcatctctcatctcttgctcgcggccacggccacagccactgccagcatatgatcatgtcatgctgtgcgtgcctagctttccagttgattccaagagagagaaagagaggagaaaaattatttttacaagcagtatatgtaatgtaaagtatatataacggatggatggaaattgcaatataatatatatggcaaataatattgttgctagctccatcttttccagctagcacacttttatttctttctgccacaatgaaccttgtgcaccacaggatattagctatggagaaaaaaacgaaacgatttatagttttacactacttgctgtctttattacgacgctctgattaatcattcttacctgatcaatgtcgtatgtacacaaactcaaacgtgcataaatatattcgcttctggccctggttttgatttttgaaatgttgatgtatcggatcatatcggagatcaaaacagaaaatggaataatggtcgatgcaaactaacttctatatattccactcaatcgccaatagccaagacttaattaattacttaaccaacactaccagaaactgaaatacccctgacggccgcaatttttactgacgtgtgtgcatacatgtcaggaaattgaaccctgacggacatatgtcaggcaaatttatttttccccgacaagctagttctgacggtgacatgtccggaactattttcctgacgggattttctttatttctgacgggatttagccgtcagaagtaatacaatttctggtaagatactcaaattcccacgtagatacgcatatatatgcttgcacagtaaacaaagatgagtatttatttaattttacatctctttcaaccgtatatatatatatactccatcttgtatagttcactgtcagaacatacgcatggttacactatagttacattacatttgaaagttaatttctttttagaaaaaaaacttatattacggtagctttttagataatttcaaattaacctagcaccggcagttcccgtgcaaaacagggggctagctagcttgcatgctagccatgcatatatagctttgatttttgttttcttgtgcttttcagggcttccagaagatgcagatgattgtggagtagaatactctatatcctagcttgctgcttttgttcgtttgttataagctttgtatggatgaaaaaaaagttgtttttaattaattacagaatgttaagaatctctcaagactctcagtagtggtatacccaatataatagtgcacctgacatgcatgtgaaagttaacggatggatgatatggatggatggatatgatgctcatgattccttactatttggagaattatctttcataatattcatatataatttacatgttgttaaattatacgatttttaaaaaaaagaattgatggtaaaagattaaaaaatatttgacttataacaaagctataatggcatctaatttaaaacagagagaatatcgggaatgcgtgggccttttttagggagataaatgcatagacttatagaaatagatgacttcattcatcaagatttaaattttagtgttcacgtatattacgcattggtgtgcactttcaatacgatttttggcgaggtcgagagatacccatgtcgtccatctatttaaccatgtgttatatatggacacacacatatgtatgtgggtatgggtgtgatgtgtgtgcacgtattcggtgttatgaaagaaagaatgcatataagttttacttgtcagtttcaagtttctaagtaattaactttgcgtcaacattatttgttgttgcgatttttttaaaaaaagaagcactatatgaatttgtatagaaatagagaacaaaatgaaaggaaagaagtagcgtgagcttatagtgtttcttcttgtagaacctgttgactcgggatttaagttacgactacttatttgttactaggggtgaaaagaaagctcgggttcgtgagcttagctcggccttggctcgagcttggttggcttggctcggctcgtaagccaaacaagccaagcccaagcctcctttttagctcgttgctgaaatgagccgagccgagctagctcgcgagccgcttgttttggctcgcgagcctaggccatcgtgtgtttatattgattattttactttatatagtgttattatttgtcaacttgaaatttatcactaagattttgaagaattgaatataaaaacttatttaaattttacatgttgatgatttgtttttactttttttcaataattacaaaatatatatgaataggtgtttcaacaggaaagcttgcaa

SEQ ID NO: 6652 - DNA, 1957 bp, Oryza sativa
accaaaataattttggcacgtgatatataaccttgggtattatgattctatagttttacaaaatcacacctttaaccattttgatttacttttatataaaaatttttaaaaaacggatgtaacatttatatgatgggataaaatccttataatttgagatatgattgtaaaactcaaaaatggtattgcgaaacttaagaaccataatacctgaggttatataacacatgccaaaatacttgtagttttgtgtaacttagactataatattatcggcggagttttatgaaatttagtgaaatgaaaggatggtaaaatggaacgcagggaggtccggcccacagggacatgcggcccagtaatagaagaagtcgattaggagcagcgggaaagcgataaggaaagcgacagccatagccactcgctgcgcctcctcctcatcgcctcgccgtcgccggagaagacaaccatgaccaccatcgccgcgcggatgccgtttgcgggcccacgcctcaggcctccctgcaacctcaccgcctcgaggccgggtcccaggagggccgggctggccgtcgtctccgccgccgccggtggcccgcttcccaccgtgctcgtcaccggcgcaggcggccgaacaggtgcaatgtactccttgcggaaacccctctcatgcccctcctcgccatcttgcccatttggttcctcgtgttcatcgaatcgaatcgaattttcttttttagataatggaatcgattttccttgcaagaagaaagaaatctagtttcgtgcacatctactcttgcaagaatttgactcggttttcccttttgcacgctgcaattggcctctctgtgatgatgatgatctttcaggccagattgtgtacaagaagctcaaggagagggcagaccaatttgtggggagagggctagtcaggactgaagagagcaaagccaagattgggggcgctgccgacgtgttcgtcggggacataagagatcccgcgagcattgctcctgccattgacggcatcgacgcgcttatcatcctcaccagtgcggttccgaaaatgaagcctgggtttgatcccagcaaggggggacgcccagagttctactttgaggatggctcttatcctgagcaggtgattaaatgtattttgtgtcactcacattttctgtatcaacttgtgccttcatttgaaattgatgttttctgctatttgctactctttgaaggtggattggattggccagaggaatcaaatagatgctggtaaaacatctttgtcttgcagatggattctttgaacttgtttcttttcagctatgctgttctttaaaccagtattatcaatgacttgttggtctagctagcatagctcctttttttttcagttaattcattccttgttcatgattcgtttatgttttttcgtcatcttcatgtagccaagagcattggtgtaaaacaggtggttttggttggatccatgggcggcacagatgtcaatcacccactaaataagttaggaaatgcaaatatactggtatataacatgtgcaaagtctttctttcttctaatttattcatctttatgtgtgcgtgttcatatgtatgcatgcatgagcacatcatatgcactgtttacaagctcagaatactttaatgttctttgaattcgcaggtttggaagaggaaggcggagcagtacctagcagactcaggtctaccatatacaattataaggttgtaaagcaagacatctcttgaaaatatagttgtgatttgtgaaatgcacgttgtcttgcagtctacataattttactagcacattagctttctagaacatggtttcacctttcttccctatagctataggtgcctgcagcctgatcataaactcaaaccttatgtatgtctgtcaggaataaagaacaaaccctcagtgcagttg

SEQ ID NO: 6653 - DNA, 2066 bp, Oryza sativa
tacctacaactgatttcagggctcttttttcgcaagttaatagtcgcttctaagaagtataatctgtcaacgaggcacaatatttgtgatggaataatatgaagtgtgtattgagtgaggttagtttcctagcatatatgcattttttttgttcatccttgtattagtaggcagttgattctgcatatatttttaattatctgtgatctttttgttacctggtactgttttgagaaaaaaaaagttcgctaattgcataccaatataacaaaggcagttacttattactcaatcattcaatatcttcaaatcatttaagagaaatacagatgattgctatagtaatgcattcacagtaagagtatgttaagagcaaatttagttacccacccctaccgagaactccttgttcgtattaattggaaaaatacagagagcaaacataagtcggaaaaccaagccatcttccaagatcatctccaatatccatcaacacaagaaataaattgcaatacttagaacccttatgctgatgattgcataactagcttttgagaatattggagactgattgagatctgctttggtctttctgattaccacatgatcacctaggtttccactttccatgttgacagtgcctgtattatcctccccttccatccctgcagcagccagccactatcttcatcaattacaaagtcttcatgataaaattccttgtaatgtactgatctattcagaatggcttgattaacaggacgttgcttgaacccagccctgaggatcctcatttgccactgtttgtagctttctggcctctcaatcctttctgcaccttcgcatgctacagcattaagtgcatcattcccaaagagatccttctctaccaatatccttgcttcatggttctaggaacattgttgtcgagcatatcaaaaagtgatgagtaatggaataaaacctctctgaatctagtcagaaagaatggggagctgtacaatccattcacaacaccaagaatgaaaacctgcgggttcatcctcttcatcatgtgtagtaccctatcccttgcactatcaatgttttctgtctcatcacctagctttctcattcgtgacatgcagttgattatgagtacctcatccttgtcaatactgagatcctcgatgcagatagtttcccatcttgaagcaatgccatgatactggaaaggtacgttgaacatatttgcatactctgccaaccgctttccagtctcctcaatcctttcatgagggcgaaaaccaggctggggtacatctacacctgtgatacgaagcttaggggggccaccttctcgctttgcaagtcgctgaattagacatggccactgaaagccgaagaggatgccaaaatcaacgatatgcaatgttgttttcccctccaatgcatcaatgatggttttgttggagaagtagtatgttaccatctcaaaagggcatgctacaaaatatagatgataggcctttagcatgtctctggtgctcgtttgtttcgccatcagtttttcgtacatttgactcccagtcccagccaagcgagcctcgaggccatctgcaaagcagtttgctagcctctgagaaccatctccatctggcaaagcgtgatgccttattttcctcagtagctcactagcaaagggatggttgttagatgctatcgcttgtgcacattggatgagaagaacactgagatctattgcctctttctgtttcttcttactactgtgtggcttcctttgcccttttccatatcctttgctttgaaatttctttgggttgtcgcttgcttcttttgccatcattcctctaaggttagcaacttcaccagggagctgcctattgcagagcagaatactatcaaacatttcatcccgtattgtttcactagtggagatggccatatgcttactgttccttgcttccatcaactctatgtgctcaacatgaggatcatgaggatgattccttattttgttctcatgcttgcccttctgttctgttgtctctgttgtttgtttgcag

SEQ ID NO: 6654 - DNA, 14243 bp, Oryza sativa
  unsure (1)..(14243): unsure at all n locations
gatttatcatctaatatcttttaagcatacataaatattttcataaaaattaaataaaacgaatggtcaaacattgataaaaagtcaacggtaccatatattaaaaatacggagggagtacttgctagtgtgcaacttggaaatgaacacgtcggccagctcgtgaattttaacctctgatctcatcattttcatgtgtactcctgatctttctttctcaactgtttgttgattttttttgctcgtgtgttgtcattattttctttgttttttttacatgtcgttttaaatatctgacactggctagcgtctgctaatacgtacgcatgtgtttttaataagacgtacgtactcttgcctggacataaagaaagactatcatgcgtgaatatgtaaccaaattgttgaaacatttctaaaaagaatatgtaaccatcagtacagctataaaaaaaatagacatcatgcgtgaatcgtgatcgaaacattagttcttggtaagaattcgtctactccggctgatataattaattggtaaatatatttttcccaactgtacgagatcatgaggtcaatctttccggtaaaagtggactcttttttactttaccatggcattagctagcaggtagtacaatatatatgtacgatcgcaacaataactataattgtatcaacattagtacggatgaaacctttggcgagctaaaaaccaatataattaagcagatgcgattcattgatcatgactcatcaggtcctaattagccaacgaattaaccaattacctgccacgagttgaccagaaaccatgcgtgcatgttgcacaaattaaatcaaaataaaaaaccatacggtccagcatatncttcgatagatcataatatggctccgttagaatctgattatatgatgaatatcaagtgcgcacgtaaaacgagataagtcattagcatataattaattaagttttaattattaaaaaaaataaaaatggatttacttggtttttatagcaaaatacactgtttattaatttgaaaagcgtgctaacaaaaactgaggaaaaatccagatgttgtggatgttgttggagtttagaacaggacctatgtcataatatgatcaaaactggttaaaatactggttaggtcatatcatatttatagttaaaaaagattttagtaccagacaacatagccatcgataattaatgaaacaccaatatttaagatatacatgtagctctagtcatttgaagattcttataaaaatacgataatatatttataaaaataagtgtacatgtgtgtgaacgaacgtgtcttcgtactgtattttgggagaaaaatatatagctagctagaagtatatttaccggctcgatatgagatggcctaattaattaagctgatggcgacacccaaaaatgagcactagctaactagagaggaggttggctatgtcggcacggtagggttaaaaggttatcttcttttgttttatttttcttttttattttttagatagatgcattttgtgttccggttgatccatgtatcacgcttcaaagtgatcaaacccgacagtgactgcctgtcctggtacggcagcttatttgacgagagcaccccatggatcggattttacaatcatcaaccaagtttggctagacaccctcacacattatattgatataaaaatgctagatactaactcgatccgttctaaaatatagatatttttagagttgaacatgtgtattacaaaaagatagaattaaatgaaggttagttgtgattggttgagaagtagaggtatgtgagagaattgaatgatgaaacactggtggagaaaccatctttggtcggtcggctaaattccacaatagtcccggttctaataaaaatcgggactaaaaagcatttttagtcccggtttaaaagttgaggggtaaaaatttctaaaaagcatttttagtcccggtttaaaagttgagggatactttttgatctttagtcccggttcaagatcatttttagtcctggttcaataagttgtcgggttcaagacattgtcgggttcaagacagaccccaattatttttattcccggttggtataaacaaccgggactaaaagtagatctttagtcccggttgtttataccaatcgggagcaaaaagtaccccgagccgcgcgccatcgatacttatccgcgcgcaattcctctcgatctcctcccctctcattaactccttctccatcccttcctctccccttcccctcccgttcctccccttcccttctctgtagcggcggccaggcgggagcggcggcggccgagctggcgcggcagaggccgagaggacgggggtcgggaggccggcggcaccctcccctcgatctgctgccggattttttttttcaacttatggttcattggatttgatttgtgatgtatgtgatattggatctgatctgtgatgtatttgagttgtgatgtatttcttttaggatttgtgatgtattttttgtttgagattctgtgatgggatgtatttgtgatctgtggtgtatttctttccaaactgtgatgcatttcttcccagatctgtgatgctattggggatatctagggagcggatcaattttagcaaaaaaaaaatcaaatcaaccgggactgctcccaccatctttagtcctggttactaaagatggatttttagtcccgattagtcatctttagtcccagattcgtagtcccggttgtataaccgggactatagggggatcccaaccgggagtaaagcccctttctccaccagtgaaagatcgtggttggttgagaagaaaatgttagtggagaggttatattttggaagaatcttgaacgctacatgttgttatattttagaacggatgtagcaggctagtagcttattttttattgcctaggaatgtactcccttcgtaccataaaaaaatcaatacgagatgtaacgtttcctactataataaatctggacatgggtatgtacggattcactgtactagcaggaaacatcacatcatattctaggttaattaaatttttatgggatggagagtattgtacacactctcctcttaaaaaataactgaattatgtcacccctatcaataattaaatgtaatttcttacagtttcacttattatagggtgttatgcgtgcatgtaagtaagtatctccgtttatttaatttagtcattgcatcattgttttttcactccagtaaatttgtgagggcgttttactaaagatttttacgtatttataagcgtaatagttgatgctaccgtgtcaatattgtatactcttagcaatagttgtatatatatgatgccgtcctaaaatttagaagtcggagtgacacatcactaaacaatatgctgacgtatatcagtatatcacaatcacatatagtcaatatgttattgccaattactacctccttccctaaatatttgacaccgttgacttttttaaacatgtttaaccgttcgttttattcaaaaacttttgtgatatgtgtaaaactatatgtatacataaaagtatatttaacaataaattaaatgatagaaaaagaattaacaattacttaaattttttgaataagataaacggtcaaacatttttaaaaaagtcaacggcgtcaaataatattttgggatggaggtagtatatatattaaggtcctttgtcgtagcctagctaagccatctaaattctaccgacgtaatcgtgctaggaagcgtcattaattactccctatgtattttaatttaatgtacgacgtcgtttaacaattcttctggttaaaaaaaattatataattatcatttattttattataatttaatttattataaaatattctttaagcattacataaatatttttatatttgtataaaaattttaaataagacgaatgatcaaacgctagtaaaaaagtcaacggcgtaatacattaaaatacggagcgagcatatgaattagtcttgtaatatatatagtgtgtgtaggagtgcacgcgtctacactgtattcttttttttaaaaaaaatgatagtagatgtggccatagtgaattgttggggtgaacaattggtgaggccggaatcaatctgtggatgaaaaggacagaaaagaaaaggaaagaaagtggctgggcacatgtaccatgcatatccatggatagatgatcaagacatcgatcaagtagaaatgaaggaaaggaaaagagctagctaggcgccaccaccacttgatgccgacgtatacgtgatatatatatatatatatatatatatatatatatatatatatatatatatatatatatatatatatatatatatatatatatatatatatatatatagtaaatttgtttggtgctccatggtgcccgggcaccattgttgaaattgagtatatacccaattcaaatgagcatgaaacttttttaattatttaggtattaatattaactactttactaactagttgaaagcaagtttgaactgaatttgaacttgtttttgttagattttgattctaggtatatagcatccatacatataattagttaggtatgtaatcatggattgtgaaataaagttaaatttaagttgttttgttgataggtataggtatgaatcaaattcttataactaggtatatactcacaatttgaaaattttgaaaaatttgagtgattttgtgcatttgaaaccatggtgccccatatgagtgtcctatatatatatatatatatatatatatatatatatatatatatatatacatacatacttcatacgtttcacgatgaaagtcactcaatcatttcctatatttatattgatgttaataaatttaaacactgtgaaacggagggagtatacgtgtcctttgctcatgtatgacaatggactaattattctaatcatcatctgctgatataaataaaaatatatgtaattaatataaatactagtatttaatttgggtctgattggttagaacaatttcatttttggtggctcacgttaattggctagcggcgtgttaagtaagacactcatcgatctatcgattcattaatatatgcacgagatggcttgaaaaattcacagcaattttagattttcagggtcgagagagagcgatcgattgatggagatgtatgcattgtaccggcctactatatttactgctctcttgcattgcaaaaagtatcagtttgtcggctagctctagccagctcatactgcccctgttctttttatttaatttcaatatattgagacaataaatacacatgtttttattattagtagtgttcttaatttctacctatatatttgtaagttgtagtatataacgattacaataattggatatagtttctttaaaagcaaaagcaggaatgaattctattattaaaaaagatatatttgtagtaattaaaaattatatgaaaaatattcatcatgaaaaatctgtgaatatcattttttgcatgttaacccttaaatttatatgctaataatttaatgtcatcatatttgaccgtatgtattttagggtaaaatgttaattagagcggaggtagtaacaacttgcaagggagcatgcatgcatgtatgaagcaatcagctctgaccaggagttgttgtagttgtcgttgtagttggacctttggtttgattttgcgacgaacttttgggctgtccgtttcacacgtactcatacacgctacattaatatttcttcagattcaggggtacatacagctaacctacctagctcatcaattaatacgtacttcatccgtattttaatgtatgatgccgttaacttttcgatcaacgtttgaccattcgttttattcagaaattttgtgcaaatataaaaatatttatgttcaacttaaagaacatttgatgacgaatcaagtcacaataaaataaatgatagttacataaattttttgaacaagacgaatggtcaaatattagacaaaaaattaacgacgtcatacattaaaatatggaggtagtacgatatttatatgaagcttatctctctctgtatgtatgccgcacggttagcttggagtacagtgatgtgcatgcatgcttgcttgcttttggaagaaaattaaaaagagggattattctcatgactgacctgacctatgcatgcgttcatgtatgtatcacaaaaaagattggaacaacacgtacgtcaatacatatatgtgccaatcctatccacctcatcatgctcgtgattcaaccactgcctggctgcatctgcgcaagcaaacacacgaaacatctcgtaaaatttgattatcacacacacacatatatatatatgtcattggtacgtatatggtatattgtttagaaacacaatataagcacttgtgctcgtaattaacacgcacacactagtaagtatcatctatcactgaaagaataatcacccataaatatgagcatctgcatcaagtttagtacttcaatccggatggatatatttcaccacaagaattcaagaaacatactcccacagttagagaaatcaaatctaatacgggatgtaacatatcatagtactaaaatatgtcacatctcgtattaggtttgtttttcataggacggagggagtaactagttgagctttaccctatatctagagaaagaaataaacagtgagagagaaaaaaaaagacacatgaatctctgtagatcatctagttggtcgccgctcgccatgtgattggcattcaggaaggcgcttgtgggttccattccggcccatctagtatagccagcttgttaatatcctccctgggccggcccaagtaacccacccactggcatggtctgctccggcccaactaacccacgactgcttggctatttccgtcattttcacgctgaaaacccccctcctcccctccaccacaatcgtcccgccaaactcgaacgcaaccgcctcccaatccccatctccgccgcacgatccgcctcgagattcgcggaatttcccttccctccctcttctctcgtacgccacccactgattgcgccacgtcatctatattactacacctctcactctcactctcagtccataactgaccaagaatctatcgctacccatcgatccaggaggaaggaggccagtgagaagcttccagaaggttcgatcgggagcgcggagtggtgatggcggcggcggcggagctgtctcgcggggcggtggcggcgatgtcgcggatggagcaggggctgcggccggtgctgcaggtcaccgacgtgcggcctgccgccggtcgatacctcgtggcgctcttcgacggaaccaagtcggggcagggggtgctcgtggcgtccatggcgcacctcgtcagggcatgcgccatccgcgccggcaccatcatccgcgtcctcgactatctctgcatcgacacaaggtgaccgtacaaatccttcttctgctctaattttcactcttatgtacttcctccgtttcacaatgtaagtccgaatgtggaaaatactagaaggatttacattgtgaaacggagggagtatttcatataccagatgcttgcctgctgtctggtcgatctttgcgatccaaattaatcggggagccgctctttgatcatttgatgcgatgtgtcgtgtactcgtgtgtgtgttgaaagggggagattttggtgaagtttttgttttttttctttctgtctgactgctaaggttaacttttgttctgaagttgttatgccgaaattagttttttgggagttctaaactaaacggcgctagggagggactgatgaataacagagccagctctttattactgaaccaggacagaaattatatctgaaaaaataactaaagtccagtctacttttgtatagaacttgcttcttttccaatttatttacatcatgtagcatcctaatacaaagttatgacataaaatggacgatctacttgttactatggataaattaaataatattactatgtattatataaatctaaacaaatatctcggaacaagtggtccaaatgatgcagtataagaaatcttttcacaagtcgtgtttttagaagcatcgagcaaataatccgatggacgctatttcattttgttatttgaacttaagcttccaaatactccaacatatgtcaactgttactgaaaattgtatcaacaactaacttttcgtatcatgtcttgctggtttcttaattcagggttattatcgttgagcaacttgaaatactgcaaattaactgcgcactgatcggaactagcaatactcatgggcgccttacttagcctaacacccattgctgcactgagcccatacaagtgtaaatggacaatcaaggccagggtgactgcaaaatctggtctccagcacttgagcaatgacagaggtgaagcaaagttcttcgactttgatctgcttgatgagcagggcggtgaaatgctcgcaaaatgcttcagttcggctgctgaaaagttctatggcctaattgaagttgataaggtctacttgatatccagaggattagtgaaacctgcacaggagcctttcaacagtgattatgaattagctctggatgcctcagcatcagtagaggtctgttccagtgatgttatataatggatcatctcgttcagttggcaataatgcagggctcgtctccagtccatgctgcttcaggtgcaaatcaaaggttgtccagggctatgtctgctcactaataataatgctcttagtgatacagtaggcagggtactgctaattaaagggcacttagcgagatgcatccagctactttgttaaatgttgaatgctagttatgtaagaactctgtcattaccattatatttctgttgatgtgttgaatatcccatcgttcgagttatgtctgataagtcatggaaaaatgaacgaagcaacgaaagataatgtgtgcaaaattttgtatctatgttattagcgactaaaaaccaacactgaaaaagagaccgataagaaataaaattctaaaatcaactctaaaactaaaatctgaaattcaaaaattagatgcatttgctaagataatctaacaaccagacgatgatggtgcaataggatagcagggaaatgtgcatgatcttctgtttggtccttcggttttgcctcaagtgtggactactaaataatgcaggaaatgctgctcttgttgctgtatcagacatttgattttgcggtatgtttagcaagtttctttgtcacgcaaacgaatataatctaaagaaaatttgaacaataccattggagaaatacgtgagttgtaaaataccattgtagtgagaatgacatgagagatctagatccacatgtcaatgacactacttattttgctgacatgttaattgaaacacgacgctgtcaacctaaaatgcttgcttcttgatacaaaatcacgttttggtaacgctgccatacaaaatcacgttgctgcgttcgttttggggagttcccaaatctccaccctcgtttttcgcacacacgcttttcaaaccgctaaaaggtccgttgtttataaaaagtttctatacgaaagttacttagaaaaatcattttgatccaattttttagctaaatatttaaataatcatgcactaatggatcgtttcgtttttcgtgcgcagcagatgtattgggacagtgatcacggaaaaactgcctagggtgacagagcggtgcaccctgttcccaaccaaaatagtgataatggaaaacggaacggtccattaacgcataattaattaagtattagctatttttttttaaaaaaatggatcaatatagattttctaagcaacttttataatttttttttaaaacacacctttaaaaaacgagaaagcggaaaatgagagagatggattggtaactagcgtgtgcgcctggtgtcatgttcatttcacttcctactagtaacgcttatttcttggacgagaaaggaaagctctgaattacccttgggcttatcaatcgtacaggcccatctcaattcccaaaaggccaattcagcccaattctattccacccaccaagggcactaccgtcatttcgcaacgaaaatttctctctccgtccgtttccctccactcctccagagagcgcgcgtcccaaaaacttcctccactccacccacccgcatagacctggtccatacaccgaacccacatccccaccctccaaaccgcctcgagattcgcgcaaccgccctagccttccccactatagtactctccgcctcctccctagggttcccaaaaaccctcccccgaattcgaaatcgaatcgcctcccacatctctctctctcgcggaagcttctggaaggttcggaggcggcggcggcggaggcggcggggacgacgatggagccgcagctgacgccgggggcggtgcaggcgatagcggagcacccggacgggacggggacgatccagccggtgctgcaggtggtggacgtgcggcccgtcaccaccaagaacgcgccgcccacgcccaagcccgccgagcgcttccggatgatgctctccgacggcgtcaacacgcagcagtccatgctcgccaccgccctcaaccccctcgtcaaggacgccacgctccgccccggcaccgtcgtccagctcaccgacttcatgtgcaacaccatccagggtaaaaggtcagcaaaccaccacaacacgcgccccccttcctctcttcccctctgatgagactcttgcagtctttttggtttggatgtttccgcgagaaagattggatcttgatgtgttagttcatctggttactgttttgagaaaaaagatttggtcttgcggcgatgcgcgggttgggagaggagggctctgtgtttaggtttctttggattgcgatgtttgcaatccagattggatagttcaagaaatgacgggttataattggtgcatgccttcaggtgtttgttctagatggcctgtgtcagtttccacttaactgtaatgccttctcagataaggagaatagttgcttcttttcccctttggggtgttcgttatgtaaagatgccaatgcaacgaaatatttgtctgttactacattgttgggattctgtgatttacatctagatctaattcgcacagtagtctttatgtcaacatgggggacagtgagaaggtcacattgctttttcaagcattaatttttttcttctactcagtataccttgttcgttctggtctgtctggcatgcgattacggagttctcaacttttcattaagttacagttgaacaggctgtccttattttgaatcatcatggtaaaattgggggctattgtgttgattcattgtattgaactctcaaatgaatgttttgtttaagtatgtacggtggcttgcatgtgatctcatcttatctgtaggttctaaggaaggtttgcttttccatctctacattgatttcagatgcgcttttatctttgtcatgtttcatccaacgagattttatcactttggggttctattgttagcagttgtccaatgtcgacaaatattcaacctgcaaatatgtttcaacttgcaactaatttgctggctaggttggttagtaaaagtgtactgtattttgagtaatttctcagagtattgtctttcatttaggtttccattaaaccattgaacaagtcacaacggcatgttgcaatgggctgaactgtagaactatcattcataactaagtgtgcaaaccttgctttttctgtaggggtgtgtttatcttttcactgtttcatcaccctcaattgagaaatcttacctatttatggtttatgtgctcatttctgtgtatcagtttggttgatgtgatttagaactggcctaatgccttctaaaaggaacatcctatttggaacttcagattattttttcttcatttttatgaatcactatgaccactatagttgacaattcttcaattctttttttcaggattattattgttgtgaaacttgatgttctgcaaaatgactgcattgtaattgggaaccctaaacactatgaaccaaagagtctaactaaggagcaagaccctaacttacaggccagtgtggctcaaaccaataatggaacctattctggtggcgcaagcatgctgggcccctccgttgcgccaagggcagagcaggctgctagcaacagttcatatggtggaccttataatagtgctcaaggaatgttgggttcttctattggcaggacagttgaacctggtcctgcaaatgtttctgctgttggctcttacggtgcaatatcagcacagaacacaacgaatgccaacatgatgcagcctacatctcagctgaacataatgaatgccaacacgatgcagcctacatctcagctgaacacaatgaatgccaacacgatgcagcctacatctcagctgtcctcgttgaaccctaatcaaaaccaaaggtttgcagctcctgcttcgggtggagtctttggccctcctggcaatgcttatgggcagccttcacgtccttcatatcagcagccacctccagtgtatatgaatagagggcctgcctctaggaatgactctgcaactcgtatcatcccaattaccgcgttgaatccataccagcctaagtggacaatcaaggcaagggtgacagcaaagtctgatatcaggcattggagcaatgccaggagttcaggaacagttttctcgtttgatcttcttgatgcacaaggtggagaaattcgtgcacaatgctggaaagaatcggctgataagttttttggccaaattgaggttggtagggtgtatttgatatctagaggatcactgaagcccgcccagaagaagtataacactttgaaccatgattatgaaataactctggatatcgggttatcaactgtcgaggtttgctctgatgatgataacagcatccccaggctgcagtacaatttccggcagatcagcgaactagagaatatggctaacgagaccattgttgatttacttggtgttgttacatcagttagcccttctgcaacaataatgaggaagatcggcactgaaacccggaaaaggtctattcaactgaaggacttgtctggccggagcattgaagtaacattatggggaaacttctgtgatgctgagggtcagcagttgcagttgcagtgtgattctggttcgaaccctataattgcttttaaaggtgcccgtgtgggtgattttaatggcaaatcagtgagcacaattggttcaacccagttaattataaatccagactttcctgaggtggaaaggctgaggcagtggtacatgacagaaggaaaaactgctccttgcatttctttatctcgagaaatgcttaatatgggccggactgatgcccgcaaaacaattgcacagatcaaggatgaaaatttgggacgattagagaagccagactggatcactgttaaggctgcaatctcccatgtgactactgagagtttttgttatccagcttgcccaaagctcttgcccgtcgggaggcagtgtaataaaaaggcaataaataatggtgatgggatgtggcattgtgaccgatgtgatgagagttttcaaaatcctgaatataggtacatgcttaggttccagatccaagaccacactggtagtacctatgctagtgcgttcgatgaggcaggtgagcagatttttggtcgcaaggcaggagaacttttctcgataagaaatgtcgaccaagatgatgcacaatttgcagagatcatagaaggggtccggtggcatctatatctattcaaactgaaggtcaaggaagaaacctacaatgatgagcaaagcttgaaatgcaccgctgtcaaggttgaaaaactggacccatcaaaagagagcaacgtcctacttggagcgattgacaaccttttactggacccaaaggggcaaagtgatcttgcccctaatgctggtttcaccgatccggtaggcggtcacggtgcgcctacatctagcaatgcctatgccatgaatactggtggcgtgaatcagtttgggcagcaagcgagtataagcgccggga

SEQ ID NO: 6655 - DNA, 623 bp, Oryza sativa
tgctatttccctatggagaagatggcttcacaaacaaaatattgtacagagataaccatggatccaaatgcaagagaaaacatttgaccatgctggagtactatgcttatcgcatacaacagcgcaaaaatcaatgtatgcacttgctaatgtgtgaaaaattgacgttgcagttcattgttgatgcactagcgtgcataatccaatataggctggactggataagaaaacatcaagggaatcttagaactgaactgtatgctggcttgcaggatgcaattgaaaggggtgacacaagagctgaacaggttggaaaaaggatactacttccttcatctttcacaggcagcccaagatacaaggcacaaaactaccaagatgctatggcaatatgtcgttgggcaggatacccagacctgtttgtcactttcacgtgcaacgctgcttggccagagatacaaaatatgctaatgaaataggagttcagaaaccatcagatagacctgacattgttgaccgagtattccatataaaattgagggaattgatgacagacataaaggacaagcaatactttggaaagactcttgcaagtaaaaatcctaaacccgcatattcattag

SEQ ID NO: 6656 - DNA, 4344 bp, Oryza sativa
aatgttgaagtgcaatgatgattatggcttcactgatttgcaaaaatcagaagatgaggtaatatataacaaataaaaaatatttttacaatatatattatatatataattatttattggatgttctgtagtttgggcagcacaattttcagataaaagaagagccaaaaaatgaaagtagtgatgattatgaaatgaacaatcatcgcaaaacaaagaaagagagatcaaacatgagatgtacaaaaagatcaaacaaggtatgtataattgctttcttatataacaattcgtaaagttatttatagtactacactaataatgatgttttataggaaccatacattaccgattttgatgggaaaacaaatgaaaaggcaattacaatcgatgatgattgtgaagaatcacttgatgattattttgatgaagaatacaatgaaaaggttacacaggagagtacaaagacgaatccttctaaaagaagagttacaagatgttttaaaacatctaacaaggtacttcatttattttactttccaattcactcaatttagttttcacataaattatttaccatttcaatatggcactatgatataggctaagaaaggaaaatgttctgaaatgaaaactcagagaaataaggtacaattcttacttttctttcatatacaaaacgatttgtcaaactattactgacatgttatatacaattgatgggtattaataggaaccatatactactgattgtgagaagatagcaaatgacaaaccaatttcgcttgatgatgattttgatgaagaatataataaaaatatggtcatggcggacaccagtacttctaaaagaaaagtcagacactacataggacaaactaacattgtacttcattgagttttactttctatttaatgttacctttcatgtttgtccattaatgtcaatatgctattgtgcaggtaaggggaaaaggttgtggaaagaagagtacaaatatgggaacttgcacaaaaagtgcaattgaaaatacaattcaagatgatgaagtatttgatatatttgttaaataaatcatgtattttaacataaaacttttttaattaactaactaagaacacaaaatttaggtgcatgacggaaaaattgcttcaggaactgctaaaagaccatcaaggaaatttataatttcagatagtgaggtactgcatgagacaatttatcaagttattaattaatatatttttttttgtaacaactaatttttttcccataggatgagcacagcagtaatacaaaggtgactggggacagcaccagctgtaatagtagtaaggaagatataaacaaaggtcgatgcaattataatattgagaacattaaagttcacatgaatgagcagtccagtcgatgcagatcaacaaggattagaagaccacccacccgatactcatattaggtacaacatattacttatgggaaaatgttggttgctttagatttggtttgattagtaaattataataatatggtctttcgtctgcaggtaatttatcgtcaagaaggcccaaaagaaccaattaaaaggagggttcagccaatactttttattgaagaatagtattatatatgttcctattaatttttatgttcattagatattgtcagatgtaacgtacaacttgcacttgccaaaggaatccttggattactttgtttatttctaagatagagagttaataacattcaatataaatgcatgcatgtaccttcagtacatgtatatgagtcgatccctgcttgcttcctctaccgttgatatcctaaaagcatataaaacaagatcagttgatttatatttcttaattaatacaaatccccaagcaagaaacttaatgattaaaaaaacttgattatgtaaaatggaaatcaatcaagaaagatgagctctcggggctaccttcgctctcagccatgcttgatgttgctgcacctgctatccgcactgccccaacacctgccatccccactgccccatttcctacaaataccacctcccataccagagccaactaaccgatggctaacactactcctgatctagacatcctgcggtggatctaccaaggcactgacttggatgccctatggtggatctagccaaccagtctttcagccgtcgctaccacaaggcattccctctcaaatcggctccgatggatgagtagtggaggagaaggtagtgatgagtgagctagatagattggagaagaatatatgttcagattctccgccgcctggccttcgccctcatgtggccattcgggacaggaagacaaacgcgaccgcagcgcagatatgtggccaggaagggcttgggaggagataacgatgtgcctgcaattttacactttggtcctgcagtggattttaatttataaatgagccctcagtctattatcagtacttcagtaatgaaacgtgtttagtatttaccaaaatataatgaatctccttaggatgattgtaaacctttggatgttctaaataaaaccgcatcaaaggaactttccaaatgtgtaatatttaaatggattttacaataatttaattaacttctgtaaaaatcaggcaaaaaatatctaattagaaatttgacaatatatatatgcaatctattttcaagtacaataaaaaaaatataccatctattcagcttatcatccgtaccaataatttcaattttaaaactgccaaaaaaagccacattgttttttatataaccgtactaaaagtattgcaaaatagagttgaccgtacacagtattaaggaattacatcttatacatagaatggaaacgataccattaaaaagaatggaagacaattgttcaagtatagtaataatatggatggagtactaatccacgacacataggttcatggaaactccacggactctatattcctatataaattaatcttacaacaatgctgcaataaataatctactcttcctttcttccggagacaccagtcaggtccctatcagttctctccatcatcttccatcatagtgcaacttatagatttatattgacaaacactcacatatgcagttgatactttatattttttgacatttgattcgcagttgatacttgcacaacaaaaatataggaaaacacgatgcagagtggaaatcaccctacggatgatggcagtccaacacaggacaggtaagaatcaccctaaataccttaatcgtttgtgattgactcctgcaaactgcgacaattatgaactgattttcatatccaattttaacagttcaaacttgactgctcgagccaattcaaaggaattatcgcggttagcaagatcgaaaaggaaaagaaaactagacctgagaaggagcggatctccatcgaccaaaaattactccagtgcggatgaaacaaatgctcttcaaaggtaaacactcaagttatcatcacaattactaaaaaggaaatgcgtcatatttaacaaggatatgccaacatttaccaggaaaagaaaacttgatgaaaaaaggactgggtttcaaatgagcaacaatgagtcaagcgcagacacaggaaatcccctgcaaaggtaaaattataggcgaagaatacaattacctatgaaggtcctgtatttaataacaatttatttcaaccgcaacaattatgaactgattttcagatccaagtttaacagttcaagcgtatgtatttaataacaattaatttccgaataggtacaatacatcagaatcagtcaaaaaaagtagttatctccctgttttgacatccaattttcacagctcaaacttcactgctgaagtaaactcaacggaactcgcacgcttatcaagactgaacaggaaaaggaaacttgaccttagaagaagcggatctacattgaataacagttcgacctgttcaaatccagcaaatcacactgaaaggtaaacatacagaaaatcaacaccattgttagaaaggaaatttttccttattcaacaataaacactgactgtgatatgaataaaatcaggtctagaaaagaaaaatatcagatcccatcaaccaacatggaaacgaataggtatgttaaccacattataaaaatgatatcatcattcagtttatttttaaatcacttttttcttttatgaaaaaaatatttgtcttccagtctcaagatgaatgatcgagtaagtaaggaaggaaacattacaaggaataaggttgctgtaccaccaaggaagaagaaaaaatcaagcgtgaaagaatggaattttggcaagcctacat

SEQ ID NO: 6657 - DNA, 1848 bp, Oryza sativa
aagtaaaagttattaggctatgggatgcggttaatcctacaatggttgatgagttctatggtatacagatgattgtactagatgcagaggtatgattgttgtaaacatgtgatttaatatattgttctattatgtaaatactatttttttggtgcagggcaactcaatacatgtctctatctcaaagcaattggcgaaccacttcaggccaaaaattaagattaactcaatatatacttttaaaaatttcaaagttatggaacatgataaataccgtgtcctaaaaaacaatctgaaaatccttttttatcatgataccatagtaaaagaggtaaaatcaaaaagacaatgtttcttggactattacttcgagtttacagacaggaaaacattaaggagtaggttgaataaagatcaacagttatcaggtatgtgcataatcttacttcttttaaacattgttatttgtactaaagacctgtttgtatttagatgtgattggcttacttagcgggatgaagccgatcgagcaaagaatgctaggaaaaaacacaagcagggagagggtttgcaacatgcgtgaaattgaactccttttattagagtaagattgttgtctgcaaatttaaaccagcactaatactttctatgtggtatattttacatgactttattgcatttgtaggggagaaaaagttaaaattactctatggggagatattttagcaaatatggttgacgacgatttgcttgggaagcaaactgtgttcatcgccactggacttctggttaaagaatatgaaagtgaggatgttatttttttctaatttaacgtacttatagttttagtaaactaacgacattgatcatttagaattattatcatttggagtaacaagttcaacagaagtttttttggatatggaaattcctgcaagcatggaaatattgagcaggtgtgcagtagtagcatttaaattcatatatatttgttgatttgtctaaaattatctgatggattatattgcattttatttataggcataatgctgaaaaggttttgcccacaatgattgaagtggacgcaagcactcaaggaaccattgaagagcaaatgttctacaatagaaagacattgaaagaaataacagaattgcgatatagtaatatacaacagaaggtacatatccattcctatgttacgtttatttttcatttgtgtatttaatgttgggaaaaatctacttgatggctgatgtaatgagcattacctaaattaagtggtacgtttagtcgtgaagtcatctttagtcactctttcaagctgattagttaaccaacattaatttgttttttatttaggaatttatatgcacagtcaaagctaaaattgaggagattaatcaagaaattggtggtatatgtcttgcgataagtgcttttgtggaacaagaaaggaatcaaatgtatacatttgcaattcatgcggaaaggaagcagtgaacccaaaaccacggtaagcatgctcttcaaattttatttgacatattgtagcaggtatatttaccattaacggcacattgtaccaggtatgtaataaaccttgagataagtgaccacactactaggacgacatgtacaatatttaatgaggaagcagaaagaatatttggtcataagtctgtgtccaccatgctggaggaacagaatggacaaattgatatgattcctgatacaatacgtcagatatgtggaagaatattgatattcagattgaagttgactaaaaggaatttagaagagtgtaaggaagactacaaagtgaactacacttttacacctaatgaa

SEQ ID NO: 6658 - DNA, 9789 bp, Oryza sativa
tagcagcaacacgaaacttgcagacatgcagcatttgtggagcaaatgggcacagcgcccagatctgccatgtgggtgcagatatggatatgcaggaaacatcagccggtggaagctccatgggtaactacaactccatcgctggcaacggcagctcggagtgttacaaatgtaaacagcccgggcactatgctagagactgtccagggcagtccactggtggcttggagtgtttcaaatgtaaacagcctgggcacttttctagagactgtccagtgcagtctactggtggctcggagtgtttcaaatgtaaacagcctgggcacttcgctagagattgtccagggcagtctactggcgcccagcaccagacatatgggaataatgttgcagcatcaaggggttacaataggcaatcctttgttggtggctactgaagtattttgcaagggaagaagcagcagcagcagcagcatcttgattttgttcatcttggatggcatcggtgtatcgtgtatagttgttaaacctgccttatgtttatgcctttattacctccaatgtccactgggcagggaaccttgtgatctggactttgtatcgctaccttaaaaagtatattgtccttgtctgcaatcttgtaaatttcaatgcctgcttactgcttgatcggcaactatttatagttcgcctaaagtgctcgctctgtaataatatttgggctttgctagtgtgctttcccccccttttggctgggaatctagataatcagataatggcaattgatctgcttggttcatgcatttcccaagtactggattgtatcatatgggactgaaaattttcatgacctggagatattttcattataaattttagaggaaaaaaaaacatagccttgtgtaacagcaaggttttcttctgtagtactacctctttccaaatgtttattttgagctaaccaacgcaagtgcttttgcggtcagtggcattgcattgtcaaatgtggaagtcatgtttatcctctctgcagagtgttgcttgtctgatgattctataattttgttttagcgcctggaccttctatatctggcactggcatgatttacgggtatggctgcataatctggagagagatttgcattataaagatgagaggaagaaatgcgtacacttgtgttacagcatggtttgtgtttttacggccagttgcattgcattgtcaaatgttagtagtagtatgatgcttttatatgtttttctttggcaatctaatttcgcctatgccttggttccgggttctgagttctgacaagtgacaattctcgaactcattaagcacaagcctatttcacccttacaacaattcggaagaatatagatgggttttaaacatttgataatatttgctccccactcagatttggttactcgaaattgtacaagacctgacattcgtcatctggacactctagtagataaacgtgctggctgatgctagataaacagatgtaaagatgaccacttcaccatcaaccgtaaaaccggacgaagatcaccaaaaattgatactttggagcaacgataggcagcttcgattcagatagcacaatacttaaaagaccacatactagcatcgaattgatacatctcccctccaaatgaggctccaaaaactatccattgtttgatacagcaagcaataggatgtgagaaactgagattggcatttgtatttcactactctcatctgatgagacatgactaggctgtaactgaagctgaatctaaagaggaagattagtgtgggattgcagacaaaactgctactacttccttcctgcactgcaagaagaagaaatctgtatccagtctgtgttgaaccccattaaagcacacacagcagcttcgattcagacagcaaaagaaacattctgatagatagcatcaaattgatactagtatttcgtttgtgtcaaaaaaactctcgatatgtcgtaatcaaagctcgaaaatcccatttgtttgatacagcagcaacagcaagaaaggaacccctactccgatccagccactgaaacagtactaatgaatccggattcgcgcattcatcctatctgatgtgatgaaaagaagctagagtataagaatctaatctgggagaaggttgaggtcagtcgtcgaaggcggatgaggggtcggcgaggtgggcgaagcgggcggcggaggcggaggagaggaggaggaacttgcggacgcaggacctgacgcagtcctcctccttcttgccgagggttcgccggtagaaggtggtgacgcagtcggagaagcaccggtgcgacacccagttgtacagccgtatcctgcgtgcacaaaaatccatccatcgctactccactctctctgcgaggaggaagggaaggaaagtaagagattaaacgtacgcgtctcgggtctggagcttgtcggcgacggcctccatgcgcgccttgtcctcctcctcctccccgccgccggcggccatggcggcggcggcgtccatgctcttcttcagtagcagcacaagaagaagaagaagaaggagaaggagaaggagaagcgtagcccaagccctaaggccctttagtatagttgaagtggtgagatgggccgtggtgggccttcggtaattgagcccatgggctcaaccccgaaaatgccagtgggctaggtgaggtaaaccgtgcacgtgacgctttcagtttcttttcttttctttccttattatatcatcaaaaaaagaaaagaaaaagagaaaaaaaggtatggaagatactgtatagtatacgctagcagcataagctccgtccgtataattatttcttgtacgcatatgatgtacagtatgtattttacgagctgtatactaccattgcgttggatttatgctggagctatttgcctatgtagtggagtattctagaaggatgcttgtgcgccgtccattgcctgcagaaacggacggcgcgggtgggtgggccccacagggcggtgactgacgcgtgggccaccacattgggatttggctttgctttgctttcgtgccttgtcagccgctgcccccggccccttcttctccttcttcttcttcttcttcttcttctccctcaccatcaccaacaagagagaggaggagtggattcatcgatcgagaagtcgaggtagtacatacgttggattggattggaggaggagaatgcctcgcggtgggttctcggggtcgataagctcgcccaggatcgacgtcgccatcgacatggggaaccccttcctcaaccgcaccgtcgacggcttcctcaagatcggcgccgtaagtaaccatcttaatctatcccattccccctctctcctcttaatcacaaactcctaatcctcctaaatgcatttcttgttttgttttgcaggtcggggcgtgcaaggtcgccgccgaggacacattcgactgcctccacagaggtgagatatcgtcagtctttctaccctttcacctcctctcctttcttccccaactccgccctatcttgcacagttgcattatacttcactatacaaagtttctttctttttttttcacctttggggctagggctgcctgagcctcacaccaccaaaataaattaaattgcacgcatcccaaagtggagtactctggtggagtggagattgggaaattgaaagtggcttccaatctttgggtcaaaggattatataatcgaatgaaggcaacacatctatggccaacaagtcatggcttgtcgatttatcctcaccaccagagtacaatctgtatccattcattcacttcactgtcggctgaaaggcatattccttttttttttttcttttttgggttgatggagcttggctcacttgatattgacaaatcaaattcagtttgtcgataacaaacaatttaataattctattttatccaaggctcacttgatggagcaaggcttttcttatgtatcggcatggtacctgcctggcactatatagtatatactgcaaaaatatagcactagcatgatgaatacatgacaataaaatgggagtatttccatatatacaataaaatgtgaccgtgtcctgtttctatatacatgtacacagtgtaacataaattcattctgtttcctttccaggggatgtttcaaagcacaagcttgagcatatggtcagtatttccatggacttccttatctataaaattttcatggagtctgttcaacatggttttaagacctgaacccatgttttcaattgatgagtattttatacatgcagcacacacatctttgcacctatctgaaagtgaatccagtacaaatccaaaattagtgcaccacaatttcctgaatattttgaataaattgatatagggatgcccttgaattaccccacaaaatggataaaaggcgctatgcaaatcaggatttctatcttagtatcaatccaacatgttgacatgttttcatcttaagaaattcgatatgcaaaaccatcaccctgcacctccatagcgtagttgcactgtaactgtggaattcttcttaaaatgtagttgtttctttagtattaaggttccatctatggttcactaatatcctatgatgaatgcttttgcagctgaagaaaatgtgcaaggagggtgcctattggggtacatttttgttgacttgcaaatggatgaatgaattggcatatatgcatttattcattttttttcttatgtcacctttttgccgggtcgttttcttatgttacctgagaaaccatttttctctgacaatatgcaggtactgttgctggggtgtatgtgggcatggagtacggagtggagaggattcgtggtcgccatgactgggtactccctccatttctttttattttttaccattggttattttttaaactctaatgaattctgaaaactatgcaacattatcatagtatgttgtgtcataatataactatacaactttcactcaccataactaattgatgtaaaagttattaatggtcaaagtttgaatagtaccagccaacataacaagtattttgaaatgaaggtagtatagtaaatatctataatggatctctctcattttctgtatttgattgaatctttagttatgttgaagggaaaaataaatatgccttaccttgaaaaatattgtcaacccacttcaaatttgaccggtcctgtcacatataagtactactattattttttgacattgacaatgcctaggctaaatatcacttcgaccaccaatttatatattaatatataccaaaagctcataagttgtagtaataatctattcttttagatgaatccagccacatcattttcatgtgccaaatattcgtaaaggtactgctaaacgaagttgcaatagcttaactgcataaatgaaactcttactggaggagaaagccttattaagtttctttttgggggagaatagtactaaacttggaggagtaagccttaaactgattttccatggatagtttgttttagtcaatatttagatttatgaactccagtgtttattactctgtactgtataatttatgcttggtgctattatttgatcttgattcattattttccgtttcctcctgggatttttgcagaagaatgctatgattggaggtgctttaagtggtgctctgatctctgctgccagcaacaaccacaaagacaagatcatcaaggacgccatcaccggaggcgctgttgcaacagctgtcgagttcatcaactacctcacttagtcatgtaactgcgtttttgcagtggcttttgttggacagcaagaataagagcttcttcactgaagccatgttcagtttaataaaatgttaccttgttcatccctgcttcgttccctgcacttgtgatctcagtacttattctgagtaattattctcctgatattcgtggcttgcagtcgtcagtatgaccttgtgatgatttgttttaagttgagaaaagccatatttgcaagttgcagcaactgagattgaagcttgtatgcaataattacttgatgatattggcgactcatgacaggaaagttgtctaaatttccccccaagtggtgccctcactagaaagaagatggtaatgatcaggtgtcttggcttgttctggtgattggtggttgcataatctagataatcatatctctatttgtcccttatttgcaagattctttcaccatgaccttgatctgctagttgagcttggaagcttccagtttcagatgaaaatcacttgtttttttccaaggccattaatcccctttttttcagtttcagtttcagagtaataatcttatactagagagaaactgaaccgacaagagatattattcgtcctcgtcggtttactgcagtccagtactgttggaaataactttaccttttcacgtgatgctccagtgccaataattgatgtgctacagtagtcaaatgttttttttttccttgtagttccaatgatattctcatttttttccccttgtttcaggtaacaagaagaagtcgattgttcgtccgtgagctgtcgttttcgttatctttattcacgaatttgctgcaccgatcaaacctgatggtattttgattcgagaggtaaccggccaaatggcagcgatttgtgaacaggaagcaatatctccatcgattgatcggtcatgtccctcctcatataccgcacaagatactcccaattaagaaaagagatgctaatcaagtctctctgatgctaagaacacacagctaatcaatcaccattagattccagaccaacaacagtttgtcagctggttataactcgacacaaccatataatccctctgctaagaataacattttgttgcatcagaaatactgcaattagcaggatttgaacaaaccagcagacaacatgtttgtcagccgcgacgtttcgtcagtaaactgtactgttggacctgacctgactgcaggctattactctgaaattgttcttcactcaggccagcactatcattgccattgggaatcaactctgcacagttaatctgtttcttctccctccttaagagtagtagttttattgatccttttgcgaggagagaaaaaggtcactgctttcatgattaagctgattgtggagatgtctcttttttcaaccatggtggttagtgttatgcttcgttaaagagaaggctagtagtagttgtacgctgccgcccactgtcagctagagtccaacacggtcgaaaagatcatcgagccactgatgattatacttgctatttctttaaacttcagtatcttttctgatcaagagtaatttcagttagctttatcatgatcattattgtcgtaacgtttttagctctgcagctaaaagcatgctagtcggtttggttgaggctttttctttcttaatgaaaagccgtggggcggtaattccctagtgcgtcgagttcttgtttttatttcggccaacacttttatgccgtgcggaggattatcccctcgtttattcaaaaatcatctgtatagttatgaaaaaaaaatcgaaaacaaaatggacaacattcatacaacatacatatacaagtccacaaaattttactaaactcaactcacacatcaagaaataaaaagaaaaaaaaaatccaacgtatgaacaatgctggtgatattcacacttaaaatttgtctttctttcccctctcaatttgtaggtcaggtttgaatttatttttttagtagatgcttaccatactctagactattaaaaagatttagaattcttttaaaaccatttgtactgaatttaagagaaaaatgtatcacgagggaatatcctggagggattataattcatctccttattatttagcacttttttttatctacagagttgaaaggacatggcatcacaattactttcatctttcatgctcagcctcagacgtctaattggctagtatactagcttgttaggtgcaaagtcaagcaagagaatttcaactgtggcggtgtttaattctctttaaacttctaaaaattccgtcacatcaaatgtttaaatgtggacaaaaaaaaaataattgcacagtttgtatgtaaattgcgaaacgaatcttgtgagtctaattacgccatgatttgacaatgttgtgctacagtaaacatgtgctaatgatgtattaattagatttaatagattcatctcgcagtttatatgtggaatctatatattttgttattaatctatatttaatacttaatacttttgtccgtgtatgtaaaaaaattttgaccaaacaactgaacacggcctgtatatgtaaccaaagaaagatcaaaggagaggaggtagctactcctacaaagaaagaagaaacgatgagatttgattgcctactactccagctagctagtatacagtactcatacgtgtctatccatattcctgctcccaatgcaaaaatgcaatggcgagattgcaaggttgtgtgggtggtggaccctggatcgatcacctccattctttctccgcatctcgccacagtacgcttcgctgctctcccgcctatatataccacctcctcctcgatcatcagttcatcagcaaccaaagcaagaagcaattcttgagctcaatcagcaacaacatctatctccttcttgcttagttaagtccttcgccctcccaagaagaagaagatgtcttgctgcggcggcaactgcggctgcggcagcggctgccagtgcggcggcggctgcggcgggtaattaactaactaactaaccaactgctaattaattcactcaagaaaccattgtgacacgcacagatcgataactgatcaatattaacattaatatgcatggatgcagatgcaagatgttccctgatgtggaggccacagccaccaccaagaccttcgtcctcgctgctccatccaacaaggcgtaagtttcatcattaatgctaattaattgatctgtcattcctgtgtgtgttcatcattagtgttaattaattgattgatctgccattccgaaacaaaattgtgctggattacaggagctctggaggaatggagatggcggtggagagcggcgagaacggcggctgcggctgcaacacctgcaagtgtggcaccagctgcagcggctgctcctgctgctcctgcaactgaatctatcgtcgtcgtcgcccggctgcatgaggatttatcgtatggatgctgctactgtcgatcagagctttgatcgaggccttaatttgcttgcattagtacccagcttatatgtaggcaggccttgccttttgctctgacgcctaaataaaaccgtcgtcgtcgttgtcagtgtgtgcgtgtgtcgatcaatgttggatggatccctagctagcttggatggatcatctatcatcatggtgatctcatcatgtactcctgctccatctcctcatgcgtgccaggcttcttaatataatctacctctgctttcatcccatttctcttactgcttactgcccttgtttaatttccctttggttctaattaccacgaggaaattgttgttttttcactaatgaaaactctgcaaagttaaactgaccacaaactagttaacacagagactgcatcagctgaaagacctgaaaattcaggacggtaagtcggtaactcttataactaatgtccaaactgacaagaaaacggt

SEQ ID NO: 6659 - DNA, 3429 bp, Oryza sativa
ctagttagagatgatggtggcatccctgcatgaagccatggacaagcttagaccctcatgtacatgggctggatgattgatctccttttgacacgtggcccggggagtttggcccatgttctggtaggggaggtaatgaggattattctttagaacaattcagattatattaactgttaggtgctttacttatgttattttgttatgttaagctggtaatcccaacagaaaatcatgggtacctatgtcgcttttctataaaagctgggtcattcggcctttggtctaggagaaaaaagaagagtgggttgttatacacatacaactccaccctagctagaaatgatttcatgaataattaacaattatgtacttgtgtgcaatattaaattaaagaaaactaatgaatgtgtcatagatgatggatcaagatcaataacgtacgtaccttggctattaagattcaccgatgcctaccaaagaaaaaaaatcaccaaatatatgccaaatcgggtatgacttgcaagaaacaaccagtaacaatgtgatatacatcctcccacttgatgtataaaatatataaaataaccacacgcagaaactaaatcctatttatgaaagcactaggatatacgattctccaatccaactcaacatcataggaaagtatattacaactagcaatttatatagatgatgcatgttacagactaagatccataggatattcgtcgtcttctcacccatgatgctttcaactcatagtacatatatttcattcattgtacacagctgcacatataaatataaaactaaatgcacattgtataaggaaaaaccacttgctatgtagtattttatgtgtgcaagtagcaaccaatatacaactccaacctgggggttgcattgacttggatccatctcccatccaattgatcaccccaggctgcttaattaatttgtttagtgtgttcactgttactactggtcaatatattgattaatctgtgtaagttaagccttctcttactttgcaggttgtctttgattggctatactctaatcttagtcttgaaccttccattaattgattataaagtcagatgtgtttactctagatgatgatgatgcatgcatgccttgcaaatgtcggcatggcgtaccagcaaggcaatcttaaataaagtgtgtatatacattacattcttgtaacctttctatcatatcctatcttactataaaattaatcccaactaatttttgaaacttaacacgtaagtatatcacattatcacccaccaacaattattatcaagagtattttaaatcacataaaagtgtgccacatcaaatactacgtacatacatcaatacttaattatcttttacttagtatatgcatgtttgatcgtgaagtgttggaatttacctttcattgtctacaaacgcatcaatcgctccagggcgatgcgggcggcgaaacctcaccgtcgcctcctcactctcctcctctcccccacctcgctgccgcctgagcagccgccggcaaagccgggcggctgcgaagacggcggtggcgggccggggctcccttctccctcactcccggtcagccgattgggacgccgacgacaccagagagcgagagcgcggccccggcgacgacggccaaatccggcgccgttgggtttggatccggccccttggccggatcttggctgggacgcgcgggtcggcgacggcgtggcgcgtgggccgcgcggaggcggcggagggcacggaggcggcggccgcggcagcggcgtgggaggcgcccgtgcgaaggtggtggggcagaggtccgcggctccggcgacgggcaggcgccagatccggtcgccccgcttggccggggtgaccggcgatgggctcggtcgatgccggcgccgctccacggacctggcaggggggtggctggtggcggcgatggtggcggatgtggcggcgacgaagttggcgacgaaggcggcggactgcggcgcgtgccgcgacgccagccctcgtcaagaacctcgccgccacgagggaggcgcgtctcccgtcaattgtatgccgtgcccgtgacgccttcctccatggcgccggcgacccgcactgcgcgctgcaccttcaggtctgcgccacccggccggtctggacggctggcagctggcgacgatggcggctggacgggggtggtggtggcggtggcgatggcgatggtggctggcggtggcggctggcgacggtggtggctgtggcgctggcggtggcggctgtcgacggtggtgcaaggccatcatccggggctgacggtgcgttgtcgtcggcagcggcatgtggaggcggggaaggaggagttcgggtgcgggcgcgctgtcgagaactgtgggcggtggccttggccgaatttctgaagggacaatgttgttgaccgacaaagatccttcttgtgtggattggtggtgtggttttggacagggaatcgcgggcgaaagccttgtcgagccgtttggccggctaacgacggcgacgccgtttggcgtcgttcccctccttggaggcgtcgttttagattacccctctcctttcctaaccatattttccgggtgaaaaccttgcttcgttccgaacgagcggtggcggcgatccacatctcatcctccttgggggcaccgctttggagaaacctcttcgtgcaaggattgtctaagggtctatgtattggcttcgaacttcagtcttaggctttgacgaggcattctagctccacattttgttttgcttttcttagtttgggtcctctcttttcctgtttagtgtgttcaacttgtcttgaactacactctcttctggagtggaactttgtaataattggctgtagctctttttgagcaaagaccgagatattatattccattatctagaaaacaaacgcatcaatacttctcttttacttggtatatgtttgatcttgaagtgttggaatttacctttcattgtctacaaacgccgtaaaatctatctattatatactaaaagtccattaaactccctacaaacgctcttaagctgccacgtgtctccctcaaaacactctcaacttgccacgtggcgtaacgagaggaattcagcacctcgtagggcccgcacattatttccataaatatatgtacgtgtacacaaggcaagatttgaaatctatctaaaagcaaaacatgtacttgtcgtgaacgaacatagattagttacatatttgtgtgtgagaggcaatattccaaatctctcaaagcaaaacattccaaatctcaaaaagcaaaatttagatcactaggaaagattattaattgcaacaaggattagttccatatacatgagacaatattcgtaaggcttgcatgcatatatata

SEQ ID NO: 6660 - DNA, 5617 bp, Oryza sativa
ctcaccattgtcgtttctctctgtcgggaccatgttgttgtcggccgcgtttccattattcttgttttcttcgtagccaaccgccaccatcaatggatgagtcataatgtggaacacgtccggccaccttacttaccgccgttggtcgctggagcactgtcgcccatcttctctcatcttttgtttcttgtgttggctagggaagacgacgaatagtattagtcgttttttcctatgtgtttaaggaaaaaagaatcctctcgtccgggaacgtgttttgacacgcctgcatccagtcgtgttcaccactaaagctcgtcgttgtcgtttctctttctatcgggaccacatacacgtcctaccactttcctcaccatcgtttggtcactggagcactggcgcccatcttccctcctcttttatttctcgccttgagttagggaagacaatgaacaatgtctgttgggcattattccttcttagtctagcccaaccatgctactgaaccactcacataatattaagaccatatgagaatgaatagaacatgaaaaattctaatttatatcaattaaacaagcgaaaggaacaccatagaagatccaatattgaagacaatatcgatgcacgttatttgttaataaggttcagccgaagcctacatccccagagcagtggtcctccccaatcaagcatattacaacgtatccgaattacaattaatgattctcggccagacgccgccgacagccgatacctctcacctatgctaagtcatcattgtcgtcatcatgtttggatctcatatgacgtttctttcgcgtttggtttccgatgtattatcggggtcggttttataacaaaatcatttctcattatttattaaaaaacatcacacttgcatcagttatatttttcagtggttagcttgacatatatacagtccatcaatcctattgtttggggtccacgtggcagtggtagtgggtgtctggtggaaccgtgactagcagaaccaccacatcactaccatactagtgtttgggaaagagggacttcagtccctctcataaaagtacaagtccctactagtatgtatggtgttgtttgggaatgagggacaccaccaaagtaatatagatattagtgcgatttctgataaatatttcatgttttcaaatatgctagctcaacgtaaattatgacattatattacagaatatggaatcatgcatgtagctataataccaacgagcttaattatctagacaggataaggttgacgaaaaggatattgttattatttattttgttctctatatatgaactggatattaagtccagcatgtgtggttcagttaagtcatcgatcatgttaggacttaggagttaggaacaacaatacacactccgtaaagtcttgtcgattggttgcttgaaataagcgttcttcagacatacgttaattataacgattaatggatcgatggcaactacagatagaagtcttttttatctttatctttataagttggtattttgagtagttttattgttttttaattaaaccttgtttttagttcatagttgtttctatagtaccattttgtagcaaagaccgaaatattttttatcatcttaaaaagaaataatcgatgacgaataaatgctgtgcgtaggaatgagatcatctgacacgaaccatactaaagtgtgatccatatgtcacttttttttcgcgaacgcgtaaaaagattgcacgtcaatatgatccatatgtcagtgactgaactacgtgtctttacctattataaaagtttaaggtgtttttgccagaattttggtacgtcatctgtctttgaaacggttttagttttatgtttcggttttaatctatatgtctactacaataaattcttcttaaaaaaaagtaaaagaagtccgactaaaaaaaggtaaataaaggaagaaaaaaagtccgacttaacgagtgattaaaaaaaaagttccgtcgtcacttaaagagcgattaaaaaaaaagcttccgtcgtcgtcagtaaaaaaaaaaaaatctcttgtccgactatgtagaaaaaggaaaaaaatcttccagtaaaaaaaagtccgtttggttttttttggcaccgatatttttttcccttttttctttgcacgcaaaagagttttttatgcgcacacgctaaagcttttggttttttcttttttttaatccgatctattcaccgcgcacctctcgggtgcttttagttttttcgtcaatgttttttgtcacctgtttttttctcccgtatgctttttgtttttctcttccggttttataatcccatctgtttaccgcacgcctcccgaggtgaaccctagcgccgcgccgctgccataccgatttgtgtattttctcctccaatttaattgcaaaaatggattccccactcctcttatcattttctccatgattttcccttcgattcggctttaattgccagttttaatctctgttctatagttgccgatgatgacggcgatcttcctcggttatttttatcccgagttttatgctctgattttggggaaaacggaaagagtagatcgagtggattaaaaaccctcgaccaattttggtttaccaagaaagattcggccggatttgatggggagatttgctctagcaaacgtatgggcacgggattatcttcgggaggttgaagatgtagtcatattcgggaagttgaagatggtagggtcgaagagaagcagaccaaatggagggaggtagcggactagcctagggctgaaaaggaaggaaggctttcggtcaaaacccagaaaatattttcattaactttttttaattataatctatagcgattccaatattaagatttttattaactttttcaattataatgtatagtgatcccaatattttaatttattacttagctctcaatatattactgaaaaatgtttacccgttgtaacgtacggacatcttttctagtatataattaggtgagaggatctacttccgcacgcatacaacgaagggagattaatttttcatattcggcaatacgtacatgctcttttaaaattaattatgtgcttattaattaattttttttgccgcggggtttctttcatatacatgatgtgagcctatacatcatgcttattaattactaataacattgtttaagtagttaattgttctttagaagaagttgaaggtgcgtggctcgtgacataatcacaagcttaacgcaaagcatcatatatatcttcaacgttctttaaacgtttcttgtggtgggggtggtgaggcaaatagaccccacataactactccgtagtacatacaacatacatatatgtatgtaggaataggatggtatgagcatatataggatttgattaacaaaagaccgagagctagcacatatagcagggatggtaactaaagatttgttgtactaatttttttttggcagtaagtttttttttttaaaaaagaaagtagtagcataaaaacgattcgaactaccctgcgtaggcatgcacatacatacgtgcatacgtcacgattttgtatatagacatacataacagatgcaatgtcaacgttaattaattagatttatttacaaagatttggaagcagtaaaatttattttgatactcctacatgggttttacgcttgatattggttaatcaatcaatcaattaattaattgatgaggtccgacgcggtcagagacggttggtagagtcgtcgtctccctccttgtccttggactgcgtcgcgtgtttccaaggcaattttttctcctctcctctcctcagataattaattaattaaagaaagaaattgaataaaaatagtacttgtgtgtgaaaaagaaaaagagaagagaagatagtttgtgcgtgggctccacgaggagcgtagaccggagacgatttgccgagttggagtggagggagactcatcatcatcagaggataatactctacttactagtagtaggagagaaagaacaccaacattcaactactagtacaaattcaacaacaatggaatacactagagtcgggaaacagctttactagtcgtaaatttttctttctttctttcttgctttctccaccacgccaagtccacagccacctccattttctcctcctccattcttctcttctccacctctcctatcttcttcttcttcttcttcccaattgcttgccagattcaattgtagtggtcggtattgtgcaacaaacgcgggcggcggcggagatctgagcgaatacagactgaccccttccctgccttgccactttggctgatgtatagatccaacatctctcgcaagctgtttccttttcttgcttcactgggaaatttgagatttttgatcccccgatgaaactgactgggggttgcaattggattttccggggatccaaagtcgatgatttggaatgaaaaattatcggtttttgatgtgaaatgttcgtcctgtgtcattttttgcgatggtgcgtggttcgtagccgtcaattgattccccaatgcgtgccagccgctgacttggaccatcccgacgcgccccttgtgttgttgtgtctcttcttttttaaaatttccttctttccgtgtttatttaaattattattattattatatagttgttgtattggatgtagtcgggatggccagcctggactctcggttgtttttccccccaattgctgcaagtttcctctttgtcttcttcttcttcttcctcctccggattcaagttcaatctcctcccctcttttcacattgccacttatcatctgtgtcaaatttgttttgcaaattctcttttgtagctctctacttgtgagcaccgatcgatcgtctctttctttccctcgatttgttggatgtggtaatggaggtttgactgactgactgcctgcttctgcttggtcgtggtcaggtcgtcgattcggagcggtggccgccggcggaggtgctcggagtcggaggggtagcgtatatgtgacgcctgctttgcccttgccttgcagattgcaggccatgtcatgtgcccagcaagacatggatccaccaacaaggtattcccccacctctgtttgtggatctccctttctttttacgcatagatatactactactaattgcttaaccttcaatctatccatgtttcatcactcattacattttgacagtcatagcaatatatcttagaagccatatatagaccacttctttgattttcggtcttgcacacatgtagcctgggtcaatcaatttcttccaccatcaacatctgtagctttgagtcaccattcaccatacagacagaatttttattacttaggagtatttctgtaggtttaattcccgacaacctagctagctagttcgcctccaggtaagatggattacccttgaggaaagggaactccgttgcaacacatgtcatgccctgcaagttgctattaatttgctattgtttcactttgccaaaaccctgtatttattgtcttcctatgacctatgtgtctatttgcattgtgacccgg

SEQ ID NO: 6661 - DNA, 5813 bp, Oryza sativa
ctttccaaacaacacctaatcggataccgtttgacctctcaaactgacacttgactaactactgcataatctgtaactgcagtaactcgagttgacaaaccaccactcaaatccggcgctctactcaaccaatcctcatacaaactaaccagactaaagtgcttaaagtgagaaacaaactcatcaagtttagtgccaatccaaccacgtttgagcctccaatgaatgacttgatgaagatcgggtaagaatgcaggctagggtttttcttcccatcataaagagataaggcaatatccaccattgatcaacatatgaattaatggctcatatttgttggactttttcggctgcaataagctgatagtaaaggcttcatatggagagaaatttggcccaaccgtcagcggaaatgctaatgggcgatcgatctcctggagatgggggcagcgatcgatcccctccccctccctcccttcacctgttttccctttttggcaccgcattactttcctattttagtaaatttatgcacctaaaatttatacacatcaagtttacacatctaaagtttagagacccaatatctaaagtttagagacccaaagtttataagtcaaaagtttatatatccgattcaagtttgaatttgaattcaaatattttttatatatagtatttctatacacctaaagtttatagacccaaagtttataagtcaaaagtttacatagccgtttcaaatttgaatttgaattatatctaattcaaatttgaatttgaattcaaatattttctatatatagtatttttatgcatctaaagtttatacacctaaagtttatagacccaaagtttataagttaaaagtttacattcccgtttcaaatttgaatttgaattatatctgatttaaatttgaatttgaattcaaatattttccatatatagtatttatatacatctaaagtttatatatctaaagtttatagactcaaagtttataagtcaaaagtttacatacccgattcaaatttgaatttaaattcaaactttttatatatatagtatttctatacataaatttttctaacttttgttttttttaaaaaaatttttgtggtgtagtgtagtaggaaaagaagaagggggagaaaaaagggggagaagtgagaggaagtattacctatagggggagggggggccggatctaatcgcttgggtgatcgatcgcccattaggacccttcgaaccgtcagctcttcggttaggtacacgagacaacgcagcagaaagaaattaagggatggatatagaaacgtccacgtggccgcaggagattgggcgtcttatccaagctctgggctaccaggatcacacaataatacgtacatctctgagtcttctcttttttcattatacaaagtacctacaaagtatgatccgtattaatttcataccaagtaactttaatatctggcgcttctgctcccttagcttctttgtgtggatagatatatgaccgttttagcgattttaatgggattaattttgacctcgatcggcatatatacatccattcatacacgaacagttaattcagtacgaaacacatggagtagacacaagagtagaactaggatatatagcttattaattaactgttctttcaaatacatggagtacgtatttgacagtagtatatatgacacagtaatgcatgcatatatgacaccaaaatgtgatatggatatgattaagcaggtgcagcaaaacgtacattaattaaacaacaacaattaaccctcgggcacgcctgtgttttgttatctcgctcaacatatacgtacgtaatactttgcttgcatagcatagggacgacgacattatattcttaattgataaactcaagaacgcatggagatggatcgagagatttataaatatggagcttgcttgattgattagatgaggtcgtcctccttgtgggtctcgatgacgacgtcggacttggggtaggcgtggcaggtgaggacccagccggcggcaacctggtcgtcgtcgaggaagctctggtcggactggtcgatctcgccggagaccaccttgccggcgcaggaggagcaggagcccgcgcggcaggagtaaggcaggtcgatcccttcctcctccgcctggtccaggatgtacacgtcgtccggcacctgcagctccacctcgccgtccggtgtgatcagcttcacgttgtacgtcgcctgcatccgcagcctgtctcccagcttgttgctcgccggcagcaccgacacgcgcgccggcgccggcgccgtcgccacccgcagggacatcggcaaccggacctggctgctcagtgccgtcgccgccatggctgctatagctaattaagctagctagctgctgctgctaggtaaggtagacgaggaggagaggagtgagctagcaagaatgtgagcgtgaggttgaaggaggctgaggcaataagaagggaggtggagggtgccacgtggcgagcggcgactggttggcttatctgcgggggagtggatggggcaacgaccaccacacgatgcacatcgccgatgctgtccggccgtcttgcgtgtggtcgcctcgcttttcttttttgttttcttcttcacaccttaacttcttttgagcttttttttttaaaaaaaataatttgtgagccaatcacatgtacctccaggattcagatctggtatctctttttcccatggccgtccattgattttgtttttcacgagaaaaataattgaacaagatgtatgtgtggtcacacacattttctttaatttcttttgctatgtatatatgttgtccacacatacgttgaatcacaattgttagattgggatttgatggtcacgagtcttgcacaagatagagtgcgatgtgcagcctctaataattttgaactgctgcatgtgccttcttccttcctgttcctggctaggaactttctccaaactaacctaacctctctgtttttcttctctcttttttgagggccaggccaaaacttttgctttgtacgatcacatgcacgcttatatgatattccatgtaaatgggccggcccaatccgcatagccgacccgattccaagatacggcccatagaacactggatgcgatgaccagcccatcttgtctcttattgggcttgtttgttgacaggaacatccatctcatctacttctaggacacgatggaacctgcagcaggcagcaggtacatacaggagtgattgagtataaaaatatgagtggatgtataacaagagagtagttcatgtgctgatcgaattcgatcgatccaactctatatgcatgcaggaatatatacgcatgatcgatgattgtacatgatattttcaactctttaagttctactctatatatatatattgctactggccggccggccacgtgttggttacgtggtccttttgatcctcacacgacactatcagtgaacaaacacgttgtacacacacatatatacgtgtatgtgtaagcggaacaataattgattgatcaattagtagatcgagataactggagtagtatcaactgctgcacatatatgcatgtcaagcatccatcacatgttcacatatatataccccgatatgaatattgatcatccgcatgcaatcgaatcgcccttcatgtggtaggactaaaagacaattttacctcattcaattttatattacattctatttaagtcaaacaacaaaccaatttaaatattttgaatcatttatactgatagtatatgtgtgtgtaactagtacattgtatcgtaacaaaagaaaaactctccacagctagctgactcacatgcatgccttggccctagcttgttgggacgtaatacatatccgtgcattattagcaaattaatagcaattgattaagaaaatgactagctacacagattccctagggaggaaaaaaacacacatatctaacaattaatagacagattgatatatggagtgagagaaaaaaaaagatttacaaccgaaaagaaagaaaacatcgggaaagcaccactggtattgacgtatagtaatgtgatgataaagtcgtggatgcatatctttagcaaatatgtccatgaatacttagcaaatatgcaagtgaagcttgtaccatgatttgagtgagatcagatcgagatgtgctattggtttctgtctttttagtacatgttaggggatgcattctcgggtgtacgagtgtggtgttgcatgtatggtggtgtatgtacgtttattgcacaattgaaaaaaaaaagaaaaatcaaacatggattatatttcattagtgaaattaaattgtagctgggtgtgtttagttcacgctaaaattataagtttaattgaaattgtaatgatgtgactgaaaagttgaaagtttatgtatgtagaaaagttttgatgtgataaaaaagttaaaattttgaagaaaaaattaggaactaaaccaggcctaggtacggtcgcgtgaagattgctcggatccgatcgacatccaaacgtaccgacacggtcaaaccagggatgcgcgaatgtttcctatctatagtttgaccagcatgcatgttctaatgttttctattcttccggtagccactactgttctattttcctatttcattaatcaatatactaataatgactaagcatatgcttcccacccggccctatccaaattccaatctcaaccaataattaagcaattaaccaatgagctatatatgagatttttttattgtactagccaaactgattaattttaattgttgcttttaatcatttcactttgcttgtaagcaattcatcgatcagttcgtgctttgcctgcggcctaccctttttgttgcccggcactactcccaggatatatacggagtatatgccaacacgtaccatgcacgtttcttcgttttgtattctctctcttcgcgtgtgtgatccagttgccttcttttatccgacaagattaatcttcatcacttttaaagaagaaaccacgtttaaaattgctgattttttttgttgaaaattctctctgtgtctctagtatttcaagtgctgatctcgtggtttttttactcccctttgtcacaaaacatgcatgtactctgaatgccgcatctatattgtttgaaaatataacattgactactactacctccgaggacaaagggagtaatttgtacctaattaaaagcaaaacattttaaaaccaacaatattataatactatcaaagtatttttcatgacatatttaccacatgcaactttctaatattggaaaaataaacatgtttagagtttttagagtttaacttgagacatcaattatgataaatttatattacacggggtatatataagactacccacctacaacatatgcgaaatatgtaacttttttttaataatggatatataaagttggtcattgtttcaactgaagctacaaccacctattacaaagttttagttcgaaggccaagcacggtacaataaaaccatgatagatgaaaagactggtacaacaacaccaaccaaagaaaataagcaacttatttaaagtttaagtttattccttaatctccatttaaaggtaatgaagatatgtatgatgattgatcctaaatttcgaccgcagcaatgcgaaatagctagcttgttttgacagggatttgtatatatgctatgcatcttctggattcctagttgccatcgtttgtcatga

SEQ ID NO: 6662 - DNA, 736 bp, Oryza sativa
  unsure (1)..(736): unsure at all n locations
ctgcgacaactagttgaggggactggcgctcccgcaanacnncatcacggcgcgacgagggagagggtgtgataacactctgaattcttgtccctgtctacataaatcttggatccaaacacctttgacacctccatgagtgtgggggtgttggccaagcatgtctgacacaagataaaccaccggtgcattggggtgcttccagatgcaattgatgacctgaaatcatgagagagcaaaaatgtagagttacagttgaagagaacagttgtcagcgattcagcaccagcagcaatgttgacctcacctggcggatggagtcgtgcttggaggggaagtggagagagcaggcggcgattgtgcagtcgaggaagacctagtctgcggcgacgaagcagaagtccggggtgaggcggcagtcttcggtgtgaaggacactgccgaaggaggcgcccctcaagaggaacatgactgcgccggggcagtggttggcgtcgaatgcggtgacggtgaattagcctgtggggtccgggacgagcaacggtgctcccagtttcacctacacgaaggcgttggcgcgatcgaactttgaattggagtggtaataaatcgattctgttggtgatttgagatacttatccatttgtgaatgaacgctacactgtgggaagatgtggcanaccgattaacgatgttgaggccaaaaagcactacacagcgggcgacgtttggtggg

SEQ ID NO: 6663 - DNA, 2635 bp, Oryza sativa
ttactctaattttcgatatgaagctcaatcggttggaaagaattgctcgctgtacgggttctcccataatctcattctcagaagtcttggataaaccaaagctgaaacgttgtgactcgttccacatagaaaaatttattgaggagcataacagtgccagtgatggtggaaaaaggctatcgaaaacattaatgttcttggaaggcttccccaaaccgttgggttgtacggtatgtctagttcataattgtagtatctataacacattcatgcattttgatcttattcatttcgtccataaaatttgttcttcctgaaatctccccatccttttattaggagtgacaatgaaacctctaatcaaaacacccctgtcactgttgtatgccaatctattctagcttgctgtcttttacttcaaacaattattgattcctgatggtacttgtctgatcctgccccatatccaagtgaagtgaagtaaaagatttttatgttttgacttacaaaagggatagtagggaggtgtagatatctgaaatgctctcaaaacatgacaaaggagctgctccttgtcttttggcaaggcatgccaaattttagcaataaagcttggcaggagctatgcactctatggttctttacaatagcaaacctggttttgattatgatgtgctatacagtagcaagtttcatgcatcttttttttattatgatgccaaatgaatatgaccccttccatgcatacttattctctcgactgaataggcacatgtggagtcacttctttccactgagtagacacatgtggggtagtccatattttttataaattatctgcacaattataattctttctttatcatccagatattgctaaggggtgcaaatagtgaagaactgaaaaaagtcaagcaagtcatgcactacacagtatttgcagcgtaccacttgattcttgaaacatcattctttgaagatcagaggatatttttgaatgatcaaaatgcttcaagagagaattctgttactgccatggcagggccatcagcaaatggttacgatccatctgttctttgtgcctctgactttccttcacgagatgactctccagcacttagactgtaccatgccacttctaatggctacactgatgtgaagaaatccctcagttcatcaacaaaagtagatgctccaagttcaataacaaacagctcctcgagtgttggagaagatgcaagtatccgatacgactcaaagccaccacttcattctcaaaggttaccatcaccagtcccaggaacgctaaggaaatacgttggcatgttatctcatcagaatatttatttacctgtcacatccttgcaagaaacatctgctacccagatagaaggcgaggttgaatctggtaaagaaattgtcagtaatggttttcatgttgggtcaaaggtggaagagcctgcagtttctactgcaaatgtggattgctcacaagatcaccagagacaagaaagaattcaagatataatgccaacaaattctacgcacgacaaacgtgaagaatcacctgttatggtagaagatggggaacaacatagcaccattgatatcattagcaaagagaaaactactaacgaagatcaagcggatgatgcccttgatactcacagcatattaattttgatgtccagtcaatgcataacaaagcaggttatttgtgagcagagccatctttctcgtataaaatattatgggaatttcgatgtgtccttagggcgatatttcaagacattttgcagaatccggttttgcagaatcaggtacactgtttattaaacttttactttgtcctcgagtagtttttcttattttcacgaaatacccacattttgttttagcattgcaacttgattctgtttggatgcttactcagctcattgatgtaaattcatagcagaaactgagctgctcttcatgtggagagtttccagagtctcatctgtactcttacactcatcggaatgggaatttgaccgttcgagtcaagcatttggcgcctcaacatcatttgcctggtgaatctgaagggaaaatatggatgtggaccagatgcttgagatgtgagaatgaacatgggattccaaatcgactccaagagtgctcatatcatctgaagcacgaagtctctcttttggaaaattcctagaactcagtttttcaagccattctgcggcaagaaggctttcaatatgcggacatttggtgaacagggactgcttgcgcttttttgggtaagctagccagctaggcatattttcatttgcatcaaacaaaaataattttaagctgaaacaccagtatttggttaccaagcatagctatgccgtggaaagacatactactatacctttcgtctttcttgacattcattattgtctgttcactactgctttcaggttgggctcgaaagttgcaatgttccggtactcatcagttgaaatttatacaacctgcaaaccacaaaccactctccagtttgataatccctgcaggcaggattggtttaaagaagagaggagatatgtatgttttattaacttcagtataatcatgctatgttttcgatatgttttaa

SEQ ID NO: 6664 - DNA, 688 bp, Oryza sativa
aatgcccaaggactcctttgagaagcagcagtctaggattgtggcaactggtcggcatgtgcttgtgagcagcatttttcttgaagactaaccccttgatcacctcactgcaatcaacattgcaaaatgaaggggggggggggggtataatttgaaacataaaaaaaaattcaatgttttcaaagaattttcttcagtaaggaacaaattatgtttcacctttgccgacgagtaccagatgctatgcacttgaccttgatgtaagatccagggtccatttcctttcccttgctagcatctggtttgatcagtagtgcagcttcccacgatagggaggtaaggatatcaagccaactctcaccgctctctcctttggaaaaggagataccagcagaggccaggaaccgacttacaagtatctttaactgcccattcatggcatctagcatcgcgctttctcgctcatccctagtattgtggctgacctcctgctcctcattagtggctgggaaacttgaccggccccacttgatcccatcactgtaatcatcgtcgtcgtcagcgtaagcaatctttccagaaacactgtcagcctcatattccttgtctgcagcttcaggtggtatccagatgctatcattttcagtgcatgttgagtcaatactgccacttttgccactggtactct

SEQ ID NO: 6665 - DNA, 802 bp, Oryza sativa
ctgcaccccttctttggaccaggagccttcaaacgctcccaatcatttcagaaaaattccagactgggatacaggggaagggtggatttggaattctttccatgaatgtcaattggcttacagaaaggacatacaaaatgaaattttggataaatttgaaattgtcaaccgttattctccgtctcatatgtctcccttgtttgagcaacatgaagaagtgagctctccacagttcactgttggtccaggtggtaatattttatctgtactggaggatgagatatctagtataatagcccgtgctcttgctgtatctggggaacaccgccatttagtggagaatgaaacagagggtgccaggttggagcatgctaaaacaatggaaaaatcatatagctttatgtctggaagttctcttgactcatcaccatggtcatctatcggatctttagattccgaagcaagttttttgtctcttggttcatcagtttcatcagatgacctatctggttatgatagcttgcctttgttctcttcaatacatccagaagtcgctgtaaatggaaaagtagctctcagaggcaaatattctgttactagcatatatgctaaacaattccaagatcttcgaaagaagtgctgcccatctgagcttgcatatattacttccctaagtcgctgcaagaagtgggatgctcagggtggaaaaagtaaagctttctttgcaaagacagtggatgacaggttcatcataaagcaaataaagaagacagagtttgagtccttcataaaatttgcccct

SEQ ID NO: 6666 - DNA, 4616 bp, Oryza sativa
ttggtgatggaaaaccttctcttcgggcacaatatttcacggatttatgatcttaaaggtgctatcttttcacgacacgttgcacactccaatgaccgtaatactgtttacttggatcaaaactacgtcgaggacatgcgtgtttctccgatttatattggtggaagaacaaagcatcttttgcaacgtgcaatctggaacgacacatcattcctcactgtatgtataaagcaaatcctgaatccaattacaggtaattgtggctttcaattaaaaatgtgtctttaaccgatttattggcttgcagtcggtcaacgttatggactattctctgcttgtgggagtggacaaagaaaagcatgagcttgtatttggcatcattgattatctgaggcagtacacttgggacaagcagctggaaacatgggtgaaaagttccctagtagtgccaaagaatgtttcaccaactgtagtttcacccaaggagtacaagaaaaggttccggaagttcatggcgaagcacttcctcacagttccagatacatggagttcagagaattcttccggaccaagcaaatcgtttgggcatagcaataacatgttggtagaagtccatagtgatgacaatctgcttcagcatccaattgaggctgagacagttgtataaatgacttctctgacagttgttgaatcctatcctgttgctacttggctttttttttttcattttgtaaaatggtgtacataggagggcctcactcactaattgattttggcaaccccagagaagtttgcagattttaggcaagtcgatggggggcaagtgaggcctacagtacatgtatgtatacaaatgttcattgttaatttcacagttattacagtgaaattgcaaaattgatgattattctgaacctcagtttccaccagctagttagttggtaacttgtgacattattgatagaccaatattgctccgattcatttccgctggagacgatcttcttgctgtgagcactgagccatactcattcgcagaagcaaaataggagtgctgccatgaagcacaaaacctgggttgtcgcaaattaaaggggtatgttcacaaccacaagcatggcatcgacttctcgcccaaatccttgtaatgaagattatgacgagcagaggaatttttttcttttttaagacaagtataactatggcattgcgattgtttttttgatcttgtcttggtgcttggttgcagaactgctttagccaagggattgttgtcgcgctgttcatttgttggagtgcagtcaaggtcagctaatttaattccccattgcatacatgcagattctcaacccacaaagaatggaatatgggctagctatactccaattatcatcattcttcgtttctccacctcatgcatgactctgcaaagaaagatgcttgaatccaatcgatttggcatttcttcatctgattgagtcctacaagtcaaggtgatcattgccatgtcccaattcaagaggacccaccttctcatcatcttgcagccaaaatggtgagcaatatcatggagaatcatgtccaagagctctgcgtagctgcatcgagggtgtgtgctgttctcagttttctttccctgttcatcttctttgcttgagtgattattaaaataaccaattaatatgtttgtgctgccatatatattctcgcatagtggagtgatgaatgataaggaaggtgataagcctaccgccaagaacaaaagggagaagaagaagaagaagctagagcaaagagatggaggttaaaagatgtcatttttaaacccttcccgattaccagtacttgtttctttttgtcccctcctctctagtctgtccaagttgttacttttccagtttttttattattttttttaatggaacttttccagttttagaaaagggcaaagagttggtttccctttcggacatctgattcgtcgcacttttagattcttcctttcacaggtagtaaatattacaccatcatcagtcataaaacaccattaaaatatggagtacaaaagaagaattaggacttactagtggacatatatatatgttgattctgacaattaagcatgaactggtcgctagtagccgcaatggtaatttggagacacaaagatggcatgcatgggcatatatattgatcgatctatagctagatacagtgactagatgagtgatatagctaagctagagaagtgcctgaattacaagaaaacaaaaacacctacgaccttcctagctggagtactacattaagtaattctcatttgttaattactagtagcaaactcatccatgcatcttgtgctaatgcgactatctaccatgcattaattatattagtaatatgcatgcatgatgttaataatctgtttgtggcaataattaataatcatacagtggatgtctggattagactttggatcagcgatggctgcagaggtcggagagcatcttcctgccctcgacaatgtcatcgaacaagtcgtcgagctcggcgatgacggcctcggcgccggagctgagcatggcgaggcagcctttgacgaggtgggccctctcggccatgtcctcccggtgggcgtagccggtgccggtggcgacgaccctgtcgaggtcggccttgaggctgtcgatggcggccctggcctggcggaactcgtacatcaggatgccgtcggcggcgggggcggcgagggcgcgcatctcctgggcgacgcggtggcggaggcgagccatggaggaggcgtagccgggtgcggtgggcaggggaaggggagtgcaggtggagatgaggtggtcggggaggcaggaggagacggtggcagagaggaggatggcgaggaggaaggaggtggcgttgcggagggcgtagaggagggcgcggaagccgttgaaggcgttgaggttgaggtccctcggggagcggtggtcgaggaggaggagggaggccgggtcgaggatgttgtcgtggaggagggcgcggttgtcctggaggaggccggcggcgtggcggcgaggggcgttgatggcgcgggcggcgtggatgtagtcgtcgtcatggtcgtagaggtggtggatggcgtgggcggcggcggcggagtaggcgtggagggcggaggcgccggcgcggacgaggaggcaggcgtcccacaggcgggaggtctcgtccatgtactcgtccagccacctctcccccgccggcaggtgcagcctccccaccacctccagcagctgcgcgtgcaccgaccgcaccagcgccgcagcctgctgcacgaacgccgccgacatgaaccccacttcgccgaccgccagactccggtgcagcgcctccaccccctgcccgatcgacgagtagaacctcttcatcatccttagcttaattaattaattcctagctatctactccttccttgtagtgttcatggtcatggctgctgcctctctgcctgtatatactcctgcggtgcctacatataggagagatgtcatggcagtggcagcagctactcctagtcctcgatgctaatctagtgtgtacagcagcaacagccagactgcaagagcaatggaacgaatgatatgatggtgtgtctgggcgccagggggaaggatgattgtcactgcctactgcttcttcgatcatctctctcactcatctatacgaatgatatgcactattacttgctactgttcatcactatctatccatctatcgattcgattcgattatgtgtgtatcatcacgtacctgcctttgcattgccattttgatttcctacgtgctctcttcctctcaaaaataacttaggccctgtttagttccaagggtgaaaagtttctgcatttcacattggacataccaacacacatataaagtattaaatgtagcctaataacaaaacaaattacagattccacatgtaaaccgcaagacgaatttattaagcctaattaatccgttattagcaaatatttattgtaccaccacattatcaaatcatggagcaatgtttcgcaatttacacacaatctgtgtaattagttttttttttgtctatatttaatactctatgcatgtgtccaaacattcgatgtgatagagtcaaaagtttttgcgtgggaactaaacagacccataacctagatggaaatgtgaaccctcctagtaaaacaaatcaagacaatcttctattcaaattcattatactaagaggggtcacatcacctcttaggttgagtttttttttcaacaaagggagtgctcatatacatatgcatcggaaaacgcaatacacctagttacttaccccctctgtcacataaaaaatccaacctggtattggataagacattttttagtttaacgaagagaaaatgtgtatcattcaatattaaattagttttttcttttttggacggatggagtagagggtacagtacagtactagattagctttgtgtctccatggctggctagcaagtagcaacagaaacaggggacaggggtagtagaaatactagaatggtgcgtggttgttttgatatgaatgtccaattgca

SEQ ID NO: 6667 - DNA, 27857 bp, Oryza sativa
  unsure (1)..(27857): unsure at all n locations
ggggccgactggaggactgacacatgcaggttagcnnacccacannagtctttcagatctagcaaaactccatatatatcacggcaattttcaccgtcatcatacatatctactccgcccacctaaagtgactttaaaatttgtctcaaaatataagaacttctaaagtagtaatttatctcaccttatctagtgcgtactctcccaagccactcgcccatcaccacccgaatatggattagaccaaaaccaaccggcaattaatgaatcgggactagccacctatttaattatgagtattgtgaacttttgtcttgctactcatttaatttgttctaaaattactagaagtccttttaggacggagagataaaatattaaatgtgtaaatactttggtcatatactctctccatcataaaaagaatgcaaacttgcatctaaattttgttagaaaaatataattatatagagagtagtacaactttttcttgcaacccctagtttgaattaatttcttattatcttacccctaaaatcacccttcatttatattaaggccggcaattcatgttatttaatttctctttcctattaatttttctttcgaagttagaattgttctttttctttggattattgtatcattccagcagtcaagaggaaaaaaaatgatgttgcattgtgtacatgtacagtgcccctggttgcacaacagctggccataaagcgcaaaatgcatctatataatcgatcgagtgaggaacagtaactcacgtctgacattttgatacaataatcctcaaagattcggtgaaattttctttctgatccctcgagcactacgcgcactgtgtttcagtctcctcacatatcatgtacatactacatatacgcatgcatactgcatgcagtatacacacaacaataaaatatatgaataatgtgttttcgtattgatctgcaggtgtgtactgcatattgtgttacatgtgtgcgcatcacaaagcaatatatatactacaaaattaatgctttgacgatatcatcagatcttcaatttcttatcgcatgcatttcataagtgtatttccaaaggaatccaaacaataatttcacttcatatatacttatgcatttcataagtatatatagagagagagagcatttaatcatataaaccaaacatgtgcatatgcgcgcgatttcagcaaaatagttaatcgatcatatattagatactttatggtgcaaaattgcataaagcaaagtggtaaaatacatggttagtcgtgtgcctcacaacagaggcaagagatgtaaaccattatcgctattaaatataaagaaatggtaatatgtatgtgctagctaatttggcctgattaattgcacatgtgtttaattcgaaaccttggtaatatatagctaacatgattatattgggcacatgcaaagtgtgcacatgatcatgtgatcgatcaggacaagatttgtataggtccttgtctattagatttgttaggttagcagcagatgcacgccaaaagcaaaaggctctgccctatatttgtacatgctcaatcattaaaatttaatttgttgagcaaaactagctagccaccaggacagtgtcatgatcgatcgatatatgtactatatatgcttgtacattgtgattaattatttagtagaagaagactgtgcatctacagtagatgaccaagaaaaaaatgtgaatatattggatccatgcgcgcaggtgtgccgtacatgcatgcatgtgttcaaatgagagagagagagagagattaaaggagcaaatcgatcgatctagcttttgcttttgcctcttttaatttttgggtacttgaaaagggtggccagtctatgtaactattctagctagtagaacgaatctgaatagaggtatgtctatattcatagtactaggatgtgtcacatccatttctagattggttttttagggacggagagagtatgtgcgatggccatatatgtacacaccgtaaagtaaattaattaagatgtactatgatccattgtacctgcatatatatgcaaattaagctagctagctaaatatatatatcatatggattttcgaagagaagaaattaaattaattaagagaaatgaggaataattgattggcgatcatggaaatttcgaattctggtggaaggaaaggcatctctattgtaggcagctgaatccgaatagaaaaggttatctcgatgagctcgatcgacaggatctctatggccggtggccgggctggggggcactgacacgaatgcatgcatgcaccatcatataatcatgcccttcagctggacactactgcatttcgtatccgatccatcgatgatgctacttcaatccctgcatcttttactcccggtttgcaagtctttaattctatttttgggagaatacatatatatatggccttatgcgtgtggttggaacagactaaatgcactttaacagtcaggtggccactcgagctctatcgtcgtcgacatttccactatcttgttctcagtaacacatgtaaaatttatcaatctcttcgtcaactgggctcaacgacgccgctatatcttcgccactgcaccttacaatctgcaggccatgtagttaaatgcaagttatttaataatcttcactaatatattagcgtgtaatccttttgtaatcttcattaatcaatttgaagcatatgtgcataatggcatattattatagaaactagcatggtggtccgcacagattgcgcagctagcatcattatattttctttcatataatagcatactagaaaaaatgcccgtgcgttgcaacgggtaaaaccatttttggattgatatacattgtaccttttggttttggataaaaacttattttcttccttcctattcagtcttggcccaacccgctacttctctctacttggcttacttcttttaaacctagaccacaagtagagctataggcctagctcgtatagtcgactgccgtcttcaacctcgaagacagtaccgtgtagtatgatgccagaaccaatactccccatcaaatacgatccaatctttctcaatctcctaaaattggttgagtgctcttattcactcgatcttttctttccgtttttatcaaaaccacaacgaatccataaaactctaggatataaatggtgacttctaaatatagagattgaatctggtaaattaaagcagaactaaaagaaaaaattatggggaaaatgatgatggagtagtggagaactgatttttcaatcaattggaggagggaaagcatgagaaagccaatcgatgtggcggtggtgctagagttcggcctgacgacgaaaaaatcgggtagataaaaaaaagaatcctcacaatgtgcacagaccctttctcatgacaaaaattgcgaataaaatataaggacaaaaaaagcggatgggaaaaaaagaaaagcggaaaaaaaaagaaaaaaaggcggataaaagagagggactttttttgctgttttataatgttttttttctctggtaatttttacggtcttttttctacaccgttttttagacgacagtttttttttcgcgtggctttctttattttttttacgatcgacgacttttatatttttgtacagtcggttttttccgtttttttcagcttttttcagtagtagagattaaaactgaaaaaaatattaaaacctactcaaatacagatgacgtaccaaaatattggcaaaaacatcttaaacttttataataggtaaagatatgttttctcattatattattcaaatatattaaaatgacatcataattttaaattttgcaataactttacgaaactacaaatgtgtaatactcatattgcattttatatacgtgttagttattaattatttttaatatcaaattttagttatttgtaaattatatatattcctatatggactctagactcgtcttttaatatttctttttttaattccgaattttctgtaaattgtatttctatatagactctaggctcttcttccaatattatttatttttatttttgaatttttattatttctaattgtatttctatgtggactctaaactcatctctcaatattctttaatttttaatttcgaattacagttacttcattgtattcctatattgacctttaactcttcttcccatatttttcttaatttcgaattttagttatttgtaaattgtatttttatacgaactcaaaactctactttaaattttaattttagttagttttaaattcctatatggactctatactctacttctaatattccttattttttaattccgaatttctattttttttcttaattgtacttctatatggactctatactctacttctaatatttcttatttttaattccgaatttcagttatttcatgattgtatttgtatatggactctatactctacttctaatattccttatttttaattccgaatttcagttattccctaattgtatctctatatggactctagtctcctcttctaatattcctttttttttaattctgagtttcaactatttctaaattgtatttctatatggactctagtctcctcttctaatatttcttattttttaattcgagtttcaactatttctaaattatatttctatatggactctagtctcctcttctaatattccttattttttaattccgaatttcagctatttctaaattgtatttctatatggactctgctttttctttttctccgattaatatgagaatttctatgccatgagagcgaacgtggagactcctttttctatccatttaataatataatagatgttttttttgtcgatggtatattgtagaatgtggcttcactgatgcatatatatttgtagattatgttgctaaccttcatttgacagatgtttgttatatatttctgttgaatcctccactgttggatcagtgtgacgattcatgcttcaatcctttagctccagcaagatggcggccactctggtgagatagcgacgacccaaccagttagggtcctaggttgagataggagtaggaggtggccaggtggatggggtgagggagggtgaggggaagggggaggagggaggagttcactgaccttagagggatggctatggtaggcggcgtcctggcattggtcagtggaattggtgattagcgagacaaccacaacactgcaaagctgcagggtcgccagtggggcggtgggccaatgttatcggcaggggcaaagcggagggagtggttaggaggcgatggatggtggtggcggatccaacgatggggagccaccagtgatgggaaagacggtgggggcgttggcacctcgctaccaatgacttaaggatgaggtgagggagaggcagggggatggtacgatgggccttaccgatgccattgagccctgtcgaacagcaacgtgatgggatggtggcagcaaaggagtacgaggaatcggtggatcagagacggtgttgaattgacaggtggcggcacatgaaagcaggagtaaggaagaaggacgaggagttagggttaagtggtggcgccgaatctcaaagaagatccaacagttaaaaattcatataattagggattggattttcggtcaactaccattcccctatatttaaccctcactcatagttttggaacatggatctctaaagctaacgctggtgatcagctgtcaattaattggcgttgtcagctagctagagtttgatccggcactgtcaaatagcaataccgatggcgattgatcgatctaagaacagtgtaatgtacggcatgcaatagctatctaataatgcccaagctttgtatgtatatgttccccgaatacaagtaagcagtagcaatgcaatgcaagtatagtccacatcattaattccattattgacgaagcatgtcgcttttcatgtaatatacttatataatatacatacaccactacagaaaccaaattaaatagatactggcataaggatatcggttcagattaaaccggcacctattatcagttacaagtaccggttacgagataaaaccagcaccaatattttaggtctccgttattaaaaaaactgacacctatatatagttcatccaatcactatggagcacgcttatatgtaccggtataattttattaaaccggtacctatcatattaggtattggttctcctaaattagttccagctcggaaaccgacacctatagcctgtttctaactggcaccaataaaggtttttcagtagtgatgcatatacacacaagtaactacaccctcggtaaaaaaagaaaccatcttctaagaacgaacctgaatgaatgtttatccagattaattaatccttagaaattgtcttctttttttttacggagcgagctgtgtatatacgagcggtgccgtgcaccgttgagcagtcaccatcagtgccaatgccggacatgtttatttgcatctgtacacaacgcacaggccggaacgatagatcgagaaatatataaattaagattattttcataggtacgaattgacggtacagatcttgctcaactgcatccgcatggattattcatatatatactctcccttttccaaaataagttaacctcctatactatgtgtttgaacttattttaagactaagaaagtacaccgttttatcgtctctgcgaagtattatatatactaaataaaaaataattagaaacatatatacctatactttaaagttaatcatgatatatattcaattggtaaagaaaattagcacttgtggttaattacccctgtacatctggtcaattaatgtaataaatgtaatagtctaaatgcacgtcaattatctagttaattttattagtatagaggaatattttagaagaggtggataagaaaagaaggcacgataaggtatcgagacaagctacatgtgtcgtgcatgcaagagaagcctaacggtactgtgtttgtgcttgttcaaacaagatggtgctgagacccctgtcacgaacgtcggtggggatcggctcggccgccacgatggtaggggtcagcaccaaccgcttgactgctatggtattgtgctcattttatttttggataaaatttttttttgcacggtctagtttcaaaataaatttttaaaaaaggctaatttgtcaaaaaaaaaagagaaaaaggtatttttaggtagggtgaacttagctgcatgcctgcatatataaattagtatatggagttgcaaacatggacgatcgagacgatggagctagcccagcatctggcaaaaagtgccataaactagtatatggagtatgtgttacagtgtgatcaagatgggcccacattggcacggtggggccctatggaactaggatgtttgtatctttcccttagctagtcagatctgatatgatcctcgtttattgttaatattgtcgagcctacatgttcgctgtcatatatacatgtctctgtctcgatctctctttttatatatttgtatatatatgtatacatgaatatacaaattattgatcgacttcgagccgagagtgtcaacccagccatatatatcactgtactggagaaatcatctttgtccggtcgacaaaaactacaatattcctgattgcaataaaaaccgggactaaagatgatttttagtcccggtttataagcagaacggactatgtgatctttagtcccggttcacatgctgtcaggggctgtcagggcccttcgggatctttagtcccgattggtaactctaaccgggattaaagttcggatcgttagttccagtttgtattataactttagtctcagttggtgttactaaccgggactaaagatcaaaacacactatataatctctagtacttatcctcttctcccgtccacacaaactcctctatcttaattttctctctaacttatctctttccttccttcacacggttcacagccttatctctttcttccttcacagttcacggctaagcgagcgcatgaggagggtgggccggctgggcagcggcctgcgaggcggcgcggaggcccgtgcggcggcggccggcgcagatgggatggcggtggcaggcggatgggagggcggcggcggggatatttgtcccttttttttgaagaatttgtgattcattgtatggattgtgatgtataatttctttttttgagaatccgtgattcattgcatggatctgagatgtataatctgtgatgtatttgatttgtggtgtttgggatgttactttgatttggcgtttgatttggggatatgcatcccactcgatttgggagaaaatcagttagggattaagtagtaagtagcaataaaaacaatgaaagaaaaaaaaagaaactaatcgggactgccgctgccctctttagtcccggttggtattatatcaatttttagtcctgggtatttgaaccgggactaaagatagcgatcttatttagtcccaaattcgtagtcccgattggaaaactgggactacagaggattacaaaccgggagtaaaaacgatttctctaccagtgtatacaattacaagtatacaacccagcgcaaatcacacaagaaaaatcgaacaacaaaaacactaaactagctcactcttgtagtcttgagtgtattaggtatattctgcacgattctacactgaaggtttttttaattaaacacattatggacatccgtacataacaaacaaaaacctagcacgaaatgtgacatatcgatcctagtactacaaataatctaaacattcattctatccagattcgtagtatactaggatgtgttatatatcgtactaggtttattttttatgagagggaggagtagatggtaatatatatgagtgcacacccacctctgcaaacatacacatgtgcacttacctatataaacactttttaagattggtcgctacatattaagattgacaaaatcatcacacacacacactcgatatcgataaaatatcgcctactcttaaagaaaacttattgtaaatgcaattaccattaccaaatctagaatttgaatcccttgcaagcgtagaagttgtttagtttggcgaagtctttcataaatgtaaattgtttcagaactccatgcattttctttccatttcgtgccatcaaataaatgttactactaccttttttttaataacaaaaggtgtaattaacatttacattttaaatcatagagtactttactataggaaaaagtccaaataccacccccccccccaaaaaaaataaactttggacaaaagtctgtctagcaccctaaactttaaaacgggacatcaaaccccctaaactttgcaactgttcatattacccctaaggtggtttttatctaatttgtatataacttgaatgagtttgatcacgtgacatacacattagatatatatatatatatatatatatatatataaatctccacttaaatctttttctttttaatcacttgttagctctcacttcaaacaaatattgtatgctattactgtataagtataaattgatgacttagaactgatgatacacagatatgttataatagttattcaaagttgttcgtttaagcttccaaaatatgcaaaaccaccattcaaaaccactttagggggtaatataaacggttttacaaaatttaggggattagatgtcaggttttaaagttaattcagggtactaaatagatttccatccaaagtttaagggagtatttggactttttcctttactataacttcgtaacaagtaagtaagaaattaattcacttgttgtaaaaaaaggaaagaaattaattcactttgaatgttacgcgcatgggcgtcgaccgtccacatgtgttgattgtttgtacgtaacgtaagtagttattatgtggtcctgtctctctctgggtcacgcgcagcgtatgtatacatatataataccacgtacatatactacgtattttctccactgtggtgcgtgtacgtatgtacaccctttattctacaagattatttaatttatgatgggttttaagatggtacccagagatatttagagaaaaatgtgactggaagggtttatgtgattttgtatgatgcttatgctgcgatgagcgtggcagcgatgacgatgtttggataaccgtatatatgtaatatcatacgagcaaaaactggataaccatatagataataacgtacgagcatgttaagaattaaacacgagaccttaggatagaaattgcatacctcttaccactgcacatactccttaccattgtactatcaagtgcatctcgtaatgtactattcttgaatcattactagtgatctatctcatataaaagactaaaattccactgatatgtcgagaaccagataatgttacgtttttatccagttagtaaaaaaaattataaatattagaaaagacctaatatcaaataattagaatgggtgaggcttcgaacccagatcttctagtccatcaccttgtgaagctaccaggtttttacccggttagtgagttgaggtggcatgtcacgcatgcatgcattattgtaccacacaatatatatatatattatcgatgtatatatatatatatacggcaacggtcatgtacgtaagatgtatgggggcgatcaagcagacatatatacggctgcatgctcagcttgatcgatcatatggattgccggaggtctcagcaaccacttggattctagctactagctctctctctaactcataaatttcggcatgccatgcctgcctcctccattttcggctgcagtgtgtgtttacacgccaagcatatactcatgtacatacatacattctcaaaatgctgctctgactttttcatcaatatatatattttttaaaaaagtatatgtagtaatataatagtagtattaattgaagtacactagctttgcattggtgatcataaaccgtgttgttatattaattcattggcactggccacttattcagtattatcgataatatggaatttaatccagtctctgcatgatctatatggtaaatatatgataatctaaatgctgttgttagtataaattcatagtgaaaaaaaaaatcctgcaagaagctactagctagctagcttatcagctatatagctaaaatttaaatcttagaatttaattttagagttatttcatcatcgcttatttttcagtataagcttttaaaccggtaattataacatactttcttcgtttcacaatataagtcattttagcattttccacattcatattagtgttaatgaattaatatagatatttatgtctagattaattaacatcaatatgaatatggaaaatgttagaatgacttacattgtgaaacggagggagtagatatgtatgttttagttgtaaactattttatcactttttcatggtttatcgtcctcaaacgatcagaatgaagacttgaagagtatattaagtatagctaggaggaaaaaaggatcattggctgctggtgtgcaaactgcaaattaagcaaagggccgggtgctcccaaaagagaaggccggtgttgctagctagcgtggcatgcatggtttgggcaaaaagggcggcaaacgactaactggagtagctaaatgttgtgtctcaacggaagtcatcactcacctgaaactgcatgccagcagcgctagcagccgagcattccatttcaatgtatttcgttgtgctcgcaacacctctcctagctagctacatttactaggctctgattgggggagatggaacataattttgagaagtaggacatgtttgacagggctctaatttataaatataacataatttgtggaacgacttgaacctgttccaccctctaatttattttttcatatcactttagcttgcctcgctccctttttaggtggacctgaaattgtatgatcgatcatttggcaagcctttagctccagaagaggtggagatggagtttaattcaagccaaacagatcgtagtagagttaggttcccttacttccaaaagcggatctaggaaggattagcaggagaggcttaatggagactcccatggttacaaaattggtagtgggggctcgagaccccgccgcccccatggtagatccaccactgtttacttcttgttactagttactctatccgccccaatatatagtaacctagtattagatgggacatcaccaaatctagacatagatttgttcaaattcatagcagtaggtgatttatattttaagacagtaaaataattttctaggttatatagctacaaaatctgagagtctagaatgtttacaagagctagaatcagctgtcaaaagctctccaaacggtcggcataatttgctgcaccagcccatgcatgctactgctcatacatactccaaattcagagagaagtgtagtacatgtactttttgtggccttaactttgggagagtccaaaaatgcatgcctggctttgcattgataaaaagaaggtacgacataccgttgatatatcaatcagtcgactgtagatagtgagcttggaaagtactactatagtgctgccgcaggaagctgaagaagaatatatgtgctgcactttatttgtacctatcgatccaattgttttttatatatacttacttagataccatggtacacatgcatgccattcaattaattatcctttcgaagcactgtactgcacccacacaaactggaaatatacatgtacaacatattcttttcttgctatatatatcactcattgatgaacttgttgtgttcctgttggttaattatgcggtaccgtaccttttcggctttccttttcatatttggctgatcgatgttaatgtatgctgtcatcgtttgctatgacttattattaatcattgttaaatttgaattttaaaatttaattctacagttgatttttggtttttcatcataatttattttccagcattagcttttaaaccatgaataatacacatataaaaggtttttacctattatactttttttgcatcatccatttttctactgcttattagccatatatataaagctcaaaccttgccagtgtgacaagaatacactcatacgtatacacatgacagaatcattaatttagcccgcatgttttctatctagtgagggtttttttcataacaattaaaatttttaactaaaggggaatatactaggatttgtcactcaatactcggtactttctttctgttataatccatttccattatctaaaaaaataatgattagtatttctcatttgtgtagcggtgaccactcgacttgaaacttaatggtagctagagaacgggatctcttgaaaatcagaaagatgcatggtatcgaaaatattcgggcatggcaaatagcaaaatattcagagatgaggtgtgcaggctagcggctggatctgtctcatttccgggccggccttttgcattatgggcttgtttgcctacttgcttgaccgcaaattgggtcgggccggacaattgttaattgggccatgtatgcaaccgcatctttctttctgtagatcgaaagatccatcgctttgtcactgttcacgtcgtaatagcatgtagtatgagtagtagatgacagacaccccgtaaaaaaaaagtagatgacagacacaaacatactccctcctttcctaaatacttgacgcagttgaattttttaaacatatttgaccgttcgtcttattcaaaaacttttgtgaaatgtgtaaaattatatgtatacatcaaagtatatttaacaataaatcaaatgataggaaaagaattaataattacttaaattttttaaataagacgaacggtcaaatattttttaaaaagtcaacggcgtcaaatattttgggatggagggaatacatagagaaaaaggtccagcatctatgtattcgctagttagcgtgtgtgcacttgcttatcttacgagctacgttggagatccatcaattgatctgcttgtttatgtgtctagtgtaacatcagattagtgcaacgatgattgagcaaggatcgaaaagtatatctttctatagatccgatcgatcgatcgatcgatctttttacctaaattagtggcacgagctaattaactaagatggccttgcaacacactcaaaaaacaattgtggaatgcaactcaaaactcactcgatcgatcgcttacaagctactagctagcaatctcctgttgcaacatgtgtcgttcaattggcatccatctgcaacagaagaagagctgcccattgtgctacgccatgcatgcatccatcccaattcccaagcagcagtagtgagaaagaaatgggaattagctagggctttgatgccaaggaaggcattgatttgaagcaacgtagtccggctgctcaaaccgtagcatatgagccaactccatcccatcacttgcttcccttgcaaacgcaaccaacaacccattcccatgcaatatatatacaccacactgctgcatgctcaccaccacacctcactcccctctctacagcaaccagcattccatttccatagcaatgactttcaaccctggctctcctggcttcggcttcccctttcccttctaccctcccaatcccaacccttatgctcccctaaaccccaatgctccgaagccaccggtgatgccaccgcgccctcaagccccgccacccccgcagcgtttcccgccaccacctgccccgcccatccgacccccgtcaccttcaggccgcgctccaccaccacccggtcgtgcaccgccaccgccttctcaagccccaccgcccccacgccgtgctcccctccacccgccctgccaccgccacccccacgacgtgccccaccgccaccatcaatgcccccaccaccaccacctcgtcgtgctccacccccaccagcaacacctccgcccccgccacgccgtgctccacccccaccgtcaccgcccattcgaccaccgcctccaccaactcctcgcccttatgcaccaccaccgccgtctcacccactagcaccgcccccgccccacatcagcccaccagcacccgtgccgcctccgcctagcccaccaccccacatcgtcatcatcgtcgtcttcgtctcattcggcggcctcctgttgctagcatgcctcgccgccctcttctgctggcacaagaagaggagggagacggagaggaaggcggaggtgcacaacctgagtggccatgtccatgtccacaaggcgactgagtcaggccccagcggcgccaaggccaccgtgctgtccatcgacgaggacctcaaattccaggaggtcgccggcgagtcgtcgagcgccgccggagcagggagccatcataccccttggtcatggcacaggaggcagcaggaaggcaaagcagagaacaaggcagagctcatcaatgtcacggagcacatccatgtcgatgagaagattgtatcagggcctcaggggcaaaagatcgagatcctttcagaagatgaggacatcaggtttgaagaggaaggcaggaaggaaaagggagatcaaagatcaaagactcgcatcaccaagacctgacaagatgagtctgcatgcccaagtgttactacagctctaaagaaagctacttcagctgagacggtaaagttatccctacacttgtgtgatttgattattttgataagattgtatgttctttggtgtgaatgaaataagggagtctcagaccccatttggttgaatggaaagtgtaactattgctatcagcatttgaaatgaatgaaattctttaatgaaattggtaaaaaaaaaggctgtcaaatataaatagagacatctggtatctgcaagttgatttataaccaaatgtgctcactgacacaagctgtgtccatataactgcttccactatgtgccattagcagaaccggagtttctggggttaggccacaagttgaacacgcgttgcaaaataaatttctttacagggtgacctaaatgtaaattcttgtacttgctatcactacagaagatatcataatcctaggtcctaattactttgcattacttagttgattgcaataggagtaattcgcttcttggtaggcttacttgatgcgctgttcttggtcgacactggcggcgctgtcacttgtacagcgacaggagtgacttccatcttagctttgttttcaccaacatcaacttccatattgtccaccgctgaaggcctgtcattttcacttgtcgcatttccttcagcaacgtcctttgtcactgtgagtttccaattaataaatcgtgtaaggaaagtgtcttgagggaaaaaaaagtaaacaaagatagcgagcacatccaagaagcagatacagccacaaactaaatttatttactgagtaaactaaaagcactttccactatttgcggatcactgcagatgtcgaaattcatgaggtaggaaactagtggagtaactaatcttaagcttactcaatatattgttctgggccagcactggtggtgatggtgtcacttcaacggctgcagaactggcttttatcttagctttgctggaaccagcatcaatttccatactgtccacctttaatggcttcatgttctcacagttggtattcccttcatcaagttcctttgttcctaggattttgaagaattgtcatgtaataaaacagtaaactagaaacaatgatcgtggcaaacaaccaagccttcacagatccaatccttgtactttagctcagcatgaactacaattaataaattcatagcaggccttatgctattcatcgaaaacaagcagattgaagatttgctatgcatacttcaatggtagctttgaattagtactaggaacacaaaacaatcatatcctgatgcaatcaaagagatcatcctacttagcaacacattatttgctttgagttacatcagaaaacaaggaaccccatgaggttgcatcacaggcaaatgaaagtgccactacaagttaacagcagaatgggtaaaatagttatcagtcacctaaagaagtctgctctgatgagtctggctggaccaaatattaataatctttcaagaggtgaacatactaccaaatatccattttctattaacaagtgagtccatttaagatatatgattaaaactatttatatcctgactggcgtaacacatcttgacagaagatggtaagcagaacaaattggaaaattgatacatatacataatccacccattagctctagaaaaggcaggcaccaatattacttgataatacatggtaataacttcaaccaagtaatattatgatccaattttggatactaacataaattttccattcaacaaagtttaaataaacacacccaacaaaataaaaaaagggaagacaaagagataccagagagattatagggcagccccaactcttcattctcaaactcaataatggtgcagaagcaatctcgtgatgacactgccaggtacttggcatcagaagacctatcaaaaaagcgaaaaggtttaaacagaaaacgtgaactgttagttccagtaagacaagtttctctgctcactgaaggctaggagtaaaactattgtaaaactcaccatgcaatatccgtaattgcagcatagtgcagaccagcatgtattagaataggagcaacactttcagtgtcataaacatacagggagttcaaagtagcaacagcaaaaataactctgtaaggaagcttgaagaaacaatctgcaacagttccatagtacagcgtcattttaagagatcagtaaaacaattagaaccttcaagcaaggtaaagctgaaaagaaaatgagctacctgattgggaaccacgcagcttgaagagaaccgggcaaaagcgcactgccactattgctttacttgcgccagggagttgtatcgcaggcctgtagcaccaaaacaaggttggtatcctaaaataaatacagaactaaatatatggtatacaggttatatgctaaagtatatgttttttctgacatataattaatgaaacgttgaaaattaagtgggacaaatgaaataccataagttcctgtggaaccattttatcagctaagaacatctgtagggaatagcatgtttttatcatagtaaaagaatgttggactggccattgaatgctcaatctccaggtttaccttctggtggaataaccaatctatgttcagcaaaggaaggtttcattcacccccgccaaaaccaaggattgatccccaccccacactttcttcacgtataattgaagttagtgggccttaaaatacaaggtcaaccattgggccttcaattcaatgacccatgtcttttgttcctgtgcaagaaccccccaacttaggatgtcctggttcaccagtttcacaaggaaaccatccgattcagccagttgccacggtctaattttgtgatttgtactcggagcaaatcgaaccactgaggttgctagttccagcttttagtaccatggtactgtatcctgttgtaaaaataaaactacctataaagaattctatgtttgtgtgtgcaagcttagagcttaggttagctgatttaaccattcagggaacacctgaacaaacgagtttctaaattgtgaaacatctgaaaaactttatattttgccagtaatgatggttgaaatgtaaaggagcaaattaaacgttataaggcaaggtcatcgttatttcaagcattaaatgtgcttctaccttgacaagtctctccttgacattacataagctgtattgatcacttcagatgaatatttgcataaacctgatcaagataaaaggtgaattagggaaatgaacttgttgatggaataaaaggtatgatgacagggactgactgcagatgaactatattacatgcagcaagaccgtataactaatgcactttagaatgacctgttttgcgttatagaaattagcagagcaactaggtattgccgactagaagtctagcactaacgggaaatttctatacctgctggcagtaccagaaaagatccatcaggcgaccatgccaatctccgaaagaaagatggtaacgtttcgtcatgaaacaaatgagctctaactggtggctgcaagataaaggtagctaatttagagcaacgaataaccaaagaatgccacagagtacattaaacaaaccttggactcatcatgattttgatgttcggccttcaccagtgtatgctggcaaacaaagttcatcctatctgtgttctttgacttgccttggggcttatttgcatatattctacaagttctgtcagagctcagtgaagcaatgtattgacccagaggatcccatgccacgccttgaacataatgcaaatgaccctccaacttttgttgccccgaacctgagaagtaaattgcatacaaatcagtataacagaggaaacatggtgctacagtcataggatcacttgttttagggtttacctttaatagcatcccatacaatgcaactgttatcaactgaagcagaaacaaggaatgcgccatcttgggaccattgcaggtcaagaacatccttgtgatggaacctatgtgataagttaggagaatacagctaagcaagtgtcaacaataaaatgggctaattcaaataattctctattttttttcagaggtttgctctcacaataatgtcttttgtactttccaagcctcgccgtcatcagtggaatgcaacttccagatgataataccaccacctgtcaattacataatagcctaaatgcatagcaaggacacaacaaatctacttgattgtctagctaaaatggagacggttttaattacaacagtttattcccattgtaataaattcatggccatgaatttttccgcgcaggtggggcaaaaaataatgtggcagtttaacataattagcctttatttatcagtttgtttagtggaattcaaacactccagcaggactagtaaatcctttccttgcttgattgaattgatagagcccctgcgtccgttagggggaaaaactaaagtaaacgtaccatcagcaccagacgcaagattttcgcctgcgaacaaccgaacggaaaaggtttgcttagttaggtatgtagaaatttctcaacatatagagagcatttcattcagaaaattgccagtgctaaactcaattcatagcagcgcttaccggaaggcgagaagcggagaacgttcaccgcggagctgtgggaggagaggctgctgtggtaggtggcagtggggagcttcttgtcggaatcatccgacgcaatcacccagatctgcaagccaatatattataatccatgacgaaatgggccagaaagccatccaaaccgcaacgagaaatcgagagcagcaaatcgggcaggggggtggagcaagggaggtgggtgaagagagaccttgatgtcgtggtcgctgccgccggtggcgaggcggcgggagacggggtggaagtcgagggtgaggaccggctgctgctcgtgccagttgatctgcaccgtgccgccccgcatcgccgcctcctcctcctcgccgcgtcaaggagtctaggttggggaaaggctagctagggtttgggagaaattggggaaggcgggaaatgggagggggatttggcgcgcctctcctccgccgctctccccgctttactagacgatcgacgacgatgagggtctctgtatgtgggctttctagtgggcccaaatgaggcccaataaccattagccaatattacatgggccttctcggctcggcccagcctacttctacttggggatatatcatatatgcgagtattttgacattgttatatatttcctctcataataaatatggtacagatagtttcaagttgtaaaaagaaaaatgtgctgacaagtagttcgaaggtagtagtatttttaccctaggttacctttttaacaaaattatgtgtatgcccctgaaattttagatgattctttcaatgtgtcttagttttgttccctaattaagaattttgattttaatccctttcatactctttattgcaattgaccgtcagttgaaagttcaataggtgtaatatatcagttttacccttagtaatcatgaaaggagtgtataattttttgaaatctatcgtgggaaacacaataatttgttgtgtaactacagtatttattcattcatgagattgttgcgtgaggaatcattttacatagaaattttaataagattacatatccatagaacgtattcgtggcatttttttaagacggtaaacataatatttagtcttgcatagcatttctttagataaaatatgctacataaaatatttgttataataataaatttaaatttaaattgcattttttttaatcatgatctaaaaaatatttacatatataatacctcacacagtaaacatataaatataatagtcacgtaaaaaaacttctccactttgaacaataaacttttttacacttcgaacaatatactccacagttttttttaagcgatatactccacaaatttagtgtgcttctttcatactcctacatgaaggcaaaatgaaccgttcgataggtattaaacggtcaactacgaaataggttacatgggatagaatagaaatttggggataataagaattggctggaattccaagggaatacacagggaactacctctagaaattttgtgtgttcgtgttttaagaaaacactatattatgagcggattagatcaaatgtgcagtgacattcctccacaatttaaaatgggagacagatatttagactaggttagatttttgtgtttttaaaaaacactttttgtgagaagattggatgaaatgtgcaggcactagtagagtagatgagttttgcattggatagtggcttctgatcgactagaggatagtgctgcctgcaagtggactgattattggataaggtgtgatgttattcatatactggtctaattctgtgtagtgaaatagcagaatgcatgatgatgatcagtagcactagtaaacacactaacactgtaatatcaagctaatccaacatgcattatacattaagaccaccaaatctttgcatacggtagctacaagatgactatctgctaatgtatatatttggtctacaacagtaggatcaagaaaaagcgtaataaaataggcagaaagtgaaacaaaggggaaattaagtggagcaataaggggtaacacacttccaaaatgcacccactaataactaggagtagcatctatctcacattatttgcaaatataggccacctggaaaatagacagaatgagttaaaaattttgcaaaatcttcagtgccaaatacagattgatgcattcgtcagtacatacccacacattcactcactaattaattaacatcaatcaatacacgtgcaaatcatctggcatatagctagagggaatggaacactgtcaaattaaaactttaattccaggaacccggattgagtggtaattaaattaatactcacactgatcgatatgttaataattcagccccctcatcaataatgaaactatacgtactgatcacctgcagcctggaggcaatatattcagagaaaacaagcagcttacagttacattctttctccatcattgctgaattactttaagtttaattaatcgatcggttcagacaaaataattaggcaggtagaattagtatatgatcgaacgtgcgattgatcattgatcaggccatcaatcgatcgattccagctgctgcatgcagcagttgcaagaactacttttctgctgccgttggttggagttggacgaatcgacggctgcaatgcaaaacagatagctatctaattaaggtagcatacatatccacgcatgcaactcgatcgatctgcagactgcaggtggaaagcaagatactagagtgcaggtacagctatgcatctacctatttaatcgatcaaaatggagtcaaaagtgtgtacttgcgcgtgtttagtataggagtagtaatgatcgatcgatcgatcgagaagttgttgttaagggggcgcctaacccaatagtttaagcatcaggctaattaatcagtcaattagctttaatttaattattagcatatgcatgagcgtgtaatataatgtacctagctacgtgcatcagttctagagaattcaattcaattcgattcaactcagtttcgttttcttgcggccgtcttgttttgatcaaggagatatacccaacaagtgatcatgcgtatatagctttaagactttggttttctttctttatttctgcaaaaagccacaagtcagagtcgttctaggacaatatgatgacgatgctactgtttgcagaggacaagagagacgacgatggcgatggagcgatgaaggggtagccacacaagatggaaacacgcatagaatttggtggtccatgttgcagcatattttcagctgctggttgacagaaattcacaagtcgttgtttcattaatttgttgttggaggagtgctacgtaccggaatctgccagacaaacatagactaatatctctgcagccaattccatcagaaattcagagttagcagcaggcagcaacaggacgcgttttgtccgatcggatgccactagagagtagagagagagaccaacaccactagcaaattgcaacagagaagcattaacaattaagcaagcaagcaatagtcaaaggcttgtttagataggtcgatcgctagtggtagtggtagtggcccattcagtgaagcaggtaggaagcaacccatatacgtacgtattgcattgctacctagctctgaattaccattcagctctagctaattagtgtactagtagatgatacttagttcattccacacgtcgtatagacgcggtctcgccatgccatggaggcgtcaacacgctggtcaatcgagaggagaagagaaacggattaaattaattaaggagatcaaactattgcagttcagactggatcgatgtatataattaattagatagttcctttaattggagctgtaaagctactggttcttgtcaaattgatgcaagattaattatagtacatatatagtttcccagctcgtcgcagacgctgactgaaaatgtcagtcgtctaacgtactgtatatgtatatagctaataagctagcggaccacgtaattaattaattaggtgataattactttgcatcattgcatcagtcgttcagcagattatattttgctgaacacaatttgttccgtgattaaaacaacaacagcgcacatacgatacataaaatttatcatatgtagtaattatctaattaatatcaataaagctttttatataaaaaagcagacatttatagtatacgctctccttctaattaacttgctggagtagtatatatcaagcttgctaggagagacatatatacgtatccacatgaggaacacgagcgatctatgaatgttaacaaaagaacagaaaagctagctaagaaaggtgcgtgcacttacattttcttactgtaataaacaatcaaaaatgaatactaaagtttactcactgcattgcaaatatgcagcttgcatatttgtaagaaatctaagtgttacaacatacgtgcattaattaattattaatttacttttgacaattactaattagccattacaatccagcaaaactaagtcggcaggcagcagataaattaaaccacgcgcgcgcggtatacacttgtgaacacgtacgtaggcgggaaagaagaaggaaaacgcaacaaaattaatggagcatccaactaagttgatttcgcctaaactaaagctgcatctactattactagctgctaattaacaacgcactaactataataaacatgctaagtggactagctagctaagctaagctactacagtactcctctcccacttgaccacctcagcttcctcctcctttctcatactaagaaagaattcagagtcaaatttctcagccacctcgcctatatatacatcccatgcctagcttaattccatcatccatcatcacacagctcactgaccagcagctcagcctcatcactcacgagcaatcagctagctagcttagcttgatcactacacctccatagatcttagcttaattagcttagattatacaagtggtcaagtcaagaactgtaccaatggcatcatcaatggcgcttgcagcagcaatggcgatcctcctcctggcgcttctcatgcccgccacgctgtgctcccgctcagggccgccctcgtccaagcacggccacggcggccacgccaagcgcgcgccgccgccggcgtcgcccgtggtgccggtggcgcctcaggccgcggcgctggtgcgcgccacctgcaactccaccgcctactacgacgtgtgcgtgtcagcgctcgccgccgacccgtcgagcaccacggccgacgtgcgcgggctctccgccatcgccgtgtcagtgcccgcggcgaacgcgtccggcgcggcgcaggcgccgacggcgctggccaacggcacggcgcccttcgccgccgctgccgccgggaacggcaccgtgcaggcgctgctccgcgcgtgcgccggcaagtacggcaacgcgcgcgacgcgctggcggcggcgaagaagtcgatggggcagcaggactacgacctggcgacggtgcacgtgagcgccggcgccgaatacccgcaggtgtgcaaggcgctgttccggcgacacaggcccggggcgtacccggcgaagctgccggcgagggagaaggcgctcaacaagctctgctccgtcgcgctcgacatcatcgccctcctcacctcctctcttgcatccaacaacaacaacagctagagctagatacgtataaatacggtataatactactagtactgcatgcgtacgtgctaaatacgtgtaatgacatgtatttggtagtaactagttaatcctgtgtggtgctgagtgagcatatatatgttcttcttgtattactaagtatagatgagttaattactgccgtgctgaagcttagcatgctgcatcttgtacttcactttggctccagtataattagtcactattcatttttgttgaattaaaatgatctgaatatgtgccccccctttttttttgtttgatatatgatcatatagtttatgtcggaattcaaacggttaaaccccccataacaaatgtattttaaaattcccatgaagttaaaagtgctcaagtggtggcatgatatattcccctgcttttgccccaactttacttgtttagataattaccttcctataatgcaatcacacatgaattactagtttgttctcctttttaatttcatttgagaaagtttggaggacaaatttagtggtccaaaatgctagtagtactagttaaggttgttacaaagctactaaagatcatgcagcatgtatagcacatgaaagaaagccctacctcggcatctagcttccttttgagataattggcatcttgtgttctttcatccacatttgcttggctgcatgaatccatggctggaccatctgtcctatgtgagattgtaattgaagaaaaagaagatcaaaaagcttaggtgatgaatagcccaggtaacatggccatgtcctcctgaccagttcatgtggggttaagctaaaaaaaagcaggcatgcttgcatgtttgcctgacctttgtttccccttgattatcttcctgggtgcacctgagtcccagatttcatcatctttgttcttgcctttgtccctccatgcatgtttaatgttttggccttaaatctgatgacttttgctcatacagtgtcatcttcttctatcctttttcaagttcctatgattttgcctctcacttttaactgctgctgtctctatgaccattgattgcagcttggttactgtttgtctcaagagcagatggatactagcaaacagtagcatgctccataagaaataatggaggagagaataatcatgttcatgcgtttacagttacagatgatcctaacctttttctctttgcatcaaagtcactaggttcctatagaattgtcatggagtaaagctctcatcctgtgtaagctagggtacaggaatctacaaaagccaaaagagagaagaaataaggctgcctacccaacattactcctcaagaggctaagatgccattaagcagacagtgggtatcagattaaagattaaatcttgataggcccaggctgagcctttaatcacactgttctgctttccacaaataaaaaaaaaaaagttcttcaaactgtagggtctcctcttctttaggaagagatgagttttactagtggatcaagtgcagggagatcagatattattccaagtgcacattacaaattgtaaaaatgaaactgcactttctatcttgaaagaacccactttgtgggctggccaacagaccttccattctcagcagtgccagttggcccaattaaaacaccaccc

SEQ ID NO: 6668 - DNA, 5858 bp, Oryza sativa
  unsure (1)..(5858): unsure at all n locations
cgcgtatgaatgcatgactgcccaccncancannattagctatttagctcaataaactcgcgtttgaaagttatcaggagtaaatgtcaaaataattggttcgccatggagcacttatccttctaactctaatcctcgccgtgagttgcacttggattctctctctataatcatcatatcttactctcaacacagatactcgtaccacagaaaagacagtttgggatggttaaaaatccggttgggtctcaattgggagaataaccgtcacgccattagaggttgtgtattacatttgctattttgatcgaattcaatccccaaaagcaaccacaaagtatactagtgcaaattagaacaacaaaggctagctatgctgattcaacggtttcttagcggtgcaaacatgatcatgcatttatgctaagctttggagctgtggggtgtgaatgatactgatcattatcttctattctgtggataattcagtgcactcctgtattagtatactatcatttgaagatttctgcaatcaatgtactaatattaattgtgcaataacaaagtttaagctgcctttgcccatactcttgtatgattgagttgaatgcttcatctcatgaattgcactaactggaaaatagccgtctttaactggtgctgggaacatccttaatgcatttcttattgtgatagtgtttttttctcatcaatttactccagttttcagaagctctgaagtcctgccaatggtacactacgtacgatacgtacatatggcacttctctgcttctaaaatgagcatgctccatgcattaggtggccttccatggaagatttggcattagattatttgccggatgcaagtagttctatgtaactggaaagacgctaagctttattagctcaataaacttgagttcgacaattatcaggagtaagcacgtgtcaaaataattggtttgccatggagcacttacccttctaactgcacattactaaatggtaagaggctactccatctgggagttgaggggcaatacggaattatttgatcgtgtagtagtagtagtgcaatcaaaagagctatttaccccccaaattcttgtgcgttttggagtgaattgaataattcctgtcatgagtcttactggttggcctggccatataatctggtgcttattaattttatcccatgttattagttccttaaattacatgtcatagccagaacttgctatattttgggacataagtagtatgcatgacgtgcaggagcaaagcatttatttgcggaagagggcatatatcgcttggtacaagttaagtatgcacggcctgctatatatagcttgctaaaatgctaataatacaaattcaagagcacaactttggttccgaagcactaccttaaacattaagcataacaccatgtgcacaaaattaaagatgatttgattctggggagtttgagatagattcaaaacaggactctttgaatcaccgaacaccggcccatgccctgatgcattttattggcctggagctctgaaatcttcccatcggtgaacttgtttattccaagtcgtctgcgggacagaccatctctgatagcttccttgttagctcgatctgtccacaaggagcacacgtcgatctcttgaagatttcgaagcgctcaaccatctcagccagcatggtcacgcttctggttgaagagaagccttgcaccactgctcatacaaggcccacagggaatcatctgaagcaaaggtccttctcttctgccacaaacatcaccttacctacagggcatacaggcagaggtggatcatactacaaagtaactagcaaagtgctcgtattttgttacgggattagaagaaaaaaaagaagaagaagttggtattgtatgttcccatgaaaaatttatatcgcttcatcattctattccttaagatcaatccaataatataatcgtaaaggaattaattaaagaggaagcagatcgattaccatgggcgtcgatgtgggaggataggcccctcctgaaggaggagatgatcgaggggaatcggatccgatttgcaccgcctgaagccgcaggacgtaggaggagcaaagacgccatcagcaacacctgacctagcaccgccaatgtcgacaggatctggatattgcggcgtgattggggatttgtgatctcggcaactcgcgggctcccatcggatggcctaataagccaaagaaaaagcctaattttaaattttcaaacttaattttaagattgattttgagatatttttaatgtagttttttttgggtgaatagccaattcagtccttcaacttttgctcaggggttgaattagtccttgatgttttataatgtccaaacaaagaccctaaagattatcatgcggcttaatatagttcttagacccacttaaaacgccacgtgtacatgccacgtcattcgtgcatgtaaaataatatttaaatgtccattttaacatttaattttctatcaaataaagaaaagaaaaacaagaagaagcaatcataaaacaaagaaaaatgtcaattttttagctatcaatgctacatatttttgccaatggccaaaaacttttttttgtgtgttttctcaatagtttttctttatttcctatgaaaacgtaagggtgtaaatgacatttaaatattgaatttgcatgcatagatgatgtgacatgtacacatggcatgtttagagggactaaggactatattgaatcacacaatgaacttaaggtacttgtttggacaatatgaaatgtcagggactaaattgatccttaagcgaaaggtcaaggatcatgttgggtattcaccccttttttttagtattggcttttaaatcaccaagaacatatacataaaaatttttacctataaattcatttttattcccttataagccgttttgatttattaggaaaaaagccaaacgatgaggcctgcggtttctccccttttctaaaaaaaaattggcaacaatatatatattcatcctctatgggtttcctaaactgaatgtagaaagtgaaaatatatatactgatgtacctccgatccaagaaaagtctaaaactgattctctataatcaaaaggtgggccctccgttaaaccacaaccgaaactcgataaaccacaatcaactgtttccgcaattggagttacattatgagggacactataaattttgaggtgaaggatgtcaactgtgattgatattaccgagcaatttacactgcgattgttattgtacagaggtcgtactgtattctcgagtcacgatgataatcaattggataggtaatcttcgttgggacttaattgggacgaaccatcagctgtacttgtacctgtagcctgtggttgtgtattcaattttttgttttgattgaattcccccaaaagcaacaaaatatactagtgcaaactgcaaagtagtttaaggtaagctgtcttgattcaacagttctttgcaatacaaacatgattatgcaattggattgatgttagtattccatggaaaatctggatcagctttggggtgtggatgacaatcatcatcaacatatcatctgctctggatgggcgatatgatgtcatggatattcagtacactccagtgttgtgcaatcaatgtactaacagtagttgtgcaataactaagttacgctgcctttgccatgcatactcttgtctgattgagttgaaatgcttcatgtcatgaattgcattcattggggtaatagttgtctttaactggtgctggaagatccataatgcatttgttttattgcgatatttgggattttctctcatcaatttactcctgtgtttagaagctcaaaaattatgtgaatgatatacacatgtatgttaccattgcttctaaatgaacatgctccatgcagcatgtgatgtgaccctccatggaaaattcggcatttgattatttgttggatgcaaataattttatgtaactgcaaagacttgtctgtgcaaattatcaagagtaaatgtcaaaataaatggttcaccaaggggcaccagatttaattaggagaataatcatcagctgccactagtgtgcttataattttaagtcactaatttgggatggttaatcatggttgggacttaattggtaaaataatcatcaactgtacttgtacctttagccagtagaggttatgccaatcgaagattctgcactgaatgttgtagtagcagtaatagtgcaactagaagggttaagatttacccccaaactccttgtatgttttaatgattcatgtcatgaatctcacttgttggtcttacaaatctgctgttgattaatttaatccagttttagccaccttaaattacatgattggtacaatacttatctcaccattgttatttctgaattgaatgagtatgctgattactgcaggcagatcattctgctttagatcccaggaaggcgtctaaggaaagatgctttatttgaggatggctgctgatttgtgtgtgcacaagaggcggatgtaggagatatcatgactgtggaaacacaggtcattaatgttaggtcggtgaatgtagaaaagaaaagttggtgcattattatagtatatatagactccctttttatgatggtttgctggttcatctagaaagagcgtaatgcaaggatcttcgaacaacgttcgtactcagtggcacgggtgtataatgatataagggaggaaatcatcatttggaaggaagcaaggatttttcgagagtgtgattaatggaaacccttgccctgtctttgtctttttgggctgatatcggtttggttgtcaccccgccttgacagcttaatgtctatcttgtaaacactagtaaacctccttttcctcttaataaaatttggtcgggaaaaaaataatagtatagaagaaaagatgaagatgagtattatcaatccaatgaaggaaaccatacatatgaaaccaataaaacgaaaagagggacaagtatttatagtcagctgtagaaatcagacttgcttgacaaatttgaaggaaggccggttggggtttgctccagtgatttccctgaacgcacgctccatggcgtcccatggataagttgctttcagctcctcatcccggaggtatatctccacgcagatgctttggaggctcaggaggtgctgcataccctccggtgttacgtgaatgcccgactcacaattccggaaccacagatggaggctttggagcttgggcatcacccctgcctggaactgcagccttgaggcaacgtgttcacccacacgcagcttgagtttcaggagagcagggaataatgannnnnnnnnnnnnnnnnnnnnnnnnnnnnctcttgtcttgagtcctactctcagctcgaggtcggcgagggagggtagttcaccaagaaggtcaacctcgctactcgatgtctccgatacctccagcaacacatgttggaggttacggagagtaccgttgatccatcgaggtactttggagaagcaccaaccgtgtagtattagtctctcgatactttgaggaaaaatgggtaatgagcccagcaggtcaacatcacctaaggtagcaggtgggacatgaatttgcaaactcctgagttcatccagttttccaatggaagaccccagagcataaaggctaaggatctcatcgtcccgccacctgttaacagagatgtttaggtcccttagatttttcagctcaccaatggcctccatgccttgataagntngatcagcaagtcactcactcattttttt

SEQ ID NO: 6669 - DNA, 11717 bp, Oryza sativa
  unsure (1)..(11717): unsure at all n locations
aggtatgatgactgctggacacnacntcatnacaagtttggatttctctcacgttgatggtatgtcacctctagaattcagtgatgtttgaactggacttaaatacttgctgggaatatttacttcgttgctgcgagtagcatctagttgatttgtttctgaatattaaagtatagatgttcatgaaacacttgttagaaacaacagtgtattacctttcacgggctgactcacatatccctttttgtagataatttcagcaattgcaggaggaataacagatttgtcttttaatgcaattggttatacttggcagatcttgaactgctttctaacggcatcatattcggtattgtttttgttcattttaacaaaaacctgattacatatgcagcctattcttgaactgttattcccagttgtttcaaattcctaaaccatgatgtagccagttttcagtatattcatttctaaagtgctccacaattattttaactaatgaactgtttttctcagcttacattacggcatgtaatggacagtgccaagcaagccaccaaatctgggaatttgaatgagttatcaatggttttactgaataatattctttcagtaccacttgggattatcctcgtgcttggtttcaatgaagtggagtacctttttgaaacgtaagcaaacttcactcgtttgttctgatgtgaacccaatagacttggtttgttctgaggttcataacgtgaacctagtagactacatgggagctgtggaatctccatttatttcacaaaaaaacctctttcatgaaagttttctttctatgcttccttaggcatgtcaatggcaagttaatggtgtctaacagaatcggtaatggtaatgacctccacacatgtcaataaggcatgtctggacactagaaacaaaaaggtgatgtataggattaaataggttgtcaactagtaatgcatcggtacttaggatccttctgaattacatgcaaacctatcttcttgttgcagccacatctcctgacaaaaccagtatttacttaatctggtggcataatgtatttacaatgtgaatgaattttcaggcctctcttaaggatgcccatgttttggatagtcattactgctagtggagttttggggcttgctatcagctttacttctatgtggtttcttcaccagtcaagtgcaacaacatataggtactgaatgaattgtagtggctttttaaaaaatgtttatcttcatgtgctctgtcttcatgaatttctaatgtcaatattgctcctgatatagtcttgtgggctcccttaataagatccctctctctattgctggaatccttctcttcaaagtgcggacgagcatggagaattctttcagcattttgtttggtaggcttttttttaataacaagggaaaaggtactatgttatagatatcacattcactaataagattcatacccattatcgtgcaggtttattggcaggagtattcttcgccagagccaaattgcttaataactctcagtcctagtcgtaggccaagctttataggttatacaaggcagaattattctagtcagtcagattcagaacaggatgctcgctcggattatgttcctgggaaatttgtgcagatgtaaagatccttctccagctaacaagaagagagattggcaacacatttgttactatggggccatggggctgcttcagttctttttcctcgaaatcagtatggaccccctgttgtcgctctcgtggttgtggtatacgtcctcactttcacttacgatcgaaaggccgataatactcaaatgcaggcagtttgggggaaaaaaaacaattgacgggtcgccgcatttgtaatgttgtgaaattgcagcggttggatcgaaatgggattggtgtttttgtgcgttgcacggctgcttggcctgctgctgtgttgagtatactgtatatacttgtgcagtttaattttgtgttgcccttccctatatgttcttctacaccgtgtagggctgaaggaaaatgcccaagctcctcatgtgcagaactcaaactcatgggatacagtgatactagtgcagaatttgaactgacctgacttgtcccaaatttcttctgattcactttattctcctggttgttctggaatttctgctctgcaaactgcctcttacatttgagaatctcagccaaatttctgccttgcaaactgctcctacatatagtctcagacactggactgaaacatgaattaagccccccaaaaaaaaggggtgaaaaaaacatttgaacctcccagcctagcacggccaacaaggccaaagcggtgagcttcagatgatcagatcttcggtctgacacactcccaatgccagcatggccccactcacgatttagagcagctagcgattcatgttaaacagattcaccgtagcacgtatagacaacacataatttgcatgcagtgaaaatgattctgtaagctcatttcttcatgaatatattctcccttttacaattgataaaacctgaactttgtgctacatacaacctgataaactaaagaatacagctaagttgtaaaatctgactgtatgatcctgaaatcctctgtattatcatcctataatggcaaaagtagacacctcattgcaagaattccagtgtctgtcacaaaaaaattccggcttctgtacacttagactcaagaatggccacaccaagatgacgagccatttctcctaaactcttcacatggcgctggaagaacatcatgtgcctctccatacacagactcgcaatgccatctatcctgacgctttatcactgtcaagctaacgtttctgaagcaaatcccttcatacaccgcaccgtgcactgcctccagcatcggtgcgcgctgtaaatccacaccgacaacgtctctgatgcgcacatcactgatctttggcagcgcacttcggtcatacttgtcatctgaatgatcatccgcacctcggctgaatcttataggcaccttgaccttctccatcctgacattctctatggtgatgttggttatgtagccacctcgtcctacatcggtttttatcctcaccgcttgcgcggaattccatacgtgcaggtcgcgaatgatgacatttgatattccaccggacatctcgctcccaaatcccacacctgagcatgttggagttgtgcctgaaaccctctggatgatgatgtttgagcttggtttccctaccgagatgccgtactgatcccagccactcttgacagcaaccagatcatctccactctcaatgtaacagtcttcaatacaaacttctgaactcgaatctgccattatacatcaatggaaaatgtcatggatagccatgcatgctcttcgcagtttgaggttttataatgaagttatcaccagtttgaagcataagtatgttctaattcaaatttgtagtgctaaaaatggcgataaagcagtatctaactacgtcagcttctaaagagcaaacaaataggaccacttcttttatcatatgaagtacagcaatcaatgatggtccagagttggaattaacattgcgtaaaagaggaacaccctctaggagcatgtacctggatcaatgccatcagtgtttggagcattcaagggagctagtacagttaagttccttatcaccacgtttctgaaagaaaaaaaaacaacatgttcactttatatgattccaatataatgaatatcaagagggcaagtgcaattgtttattcgctgtacaaacataacaaactgacctgcagtagacgggatgcactgtccaaaacggggagttgcgtagagtgatattggagatcatgatgttggttgagtccactagctcaataagatggcctcttgtgtggttcaacgttcgattccaccataggtcccaccaaatcctgccttggccatctatggtcccattgttacctaacatgtgttttcgaaaactgattacctaacatgtaaaggggggcacatgcaagttacaagtcaacgctagttcttcacatgtatgatatgctatacctctaaacataataatgttttatgtaattatgtttatgttgtcattataatgacttaattcagcacatacaactttgctaattgatcagaactgaaatagacatagctaataaaacaacttctgtacccgtaataacaacatcatccaggccctctccatggatgaggctgatgtggcgtggtcctaatctttcccgcccacgcccatacgacggcaatggggctatgagaggccattcttccggatcctgtacattacagtccaaagcaccagtcaatgctatgcagatttccattcaacatatgcaacactatgaagtgctggagactgttcttcttaaataccaatacaaataatttaatcaagaatctagggtatggtccccctaccccgtcaagattgattgttcttcctgctttcatgttggtatcattatgagtagaacgatctacactacttttttattcatgcatctgtcttctgtgcgattgatgatcgttcgattgcctttggttccacccaattcccataagaaactatatggcgcgatggttcgggaactggcattagacttaagtaaaatgctaggctgcaattttcagttggttcactcactccaactgaccagttttcacttttcacagtaagttgttcttggttctacaacaagcatttgaatggtgttttttttttttgccaaaaagactaattggacacctggccatgattgtattagaatattaaggtgattctgctgtgagtgcaagtggcatcatgtcaaaggcatagcatctaattaaagcccttaattactgttactaatttatggcctctatcccaacaactttctgcctcaaacatgaatgcagcactccgtacccccatacgccatacgagggaatccatggagcaaattctactccctactactacaaggtagaagtagtagcaaccaattgcatgaacaccactctacaattaatttataggcaccaaaaatgtggaatatttagttcctgtaggaagctccaaacaagcactgcagaattgtctacaaatcttttagcataagcagataaagacggcagaagaagcaaagtacaaaagcagaatcagggtgtggtcagtccaagcagcagtaaggacaaagcaaaggcacatgagagtagaataacattttggtaggctgcctggtagtggtagcagaagccacaagaaaccagacagtccaagcatgtgattccaacccacccatgtcctctctctcatgtttcaatgaaccattggcatgtgagatgagagatgtgacaacacacaaccgctgagccaagtttcacaatgcaaagtacagatgatacaatccagcaagaacaggaaccagcctagtaactgatatcctaatgctgtacttagagatttttttccagtgcaaatattaatttcacttcgcatatcaacatgattatccacaatcggatgaacagaatcaggatttgatttccatatatgcttaagtcaacgaactcttgttgcaactgctagaagccatggatcataaactaataaagaaaaaaaaagaaatcgaagggaaaaagaaaacgaaaaagggaagatgaattgatggatcacctgggagccgaggatgattgcaccgtggtgcaggaagagcgtgaagcggctggtgaggttaaagctccccgtgacccacctccccggcggcacctccagcctcgcgccgccgcctcccgccctcgcctccagcgccgccaccgcgcgccggaacgccgccgtgttggacgtgaccccgtcccccacggccccgaactcctccaccgacgccgacgccgcgcgccgccccgacgaccccccgcggtagaaccccgcgcagctgtccctgtccctgtccccgtcgacgcgtgcagtagcaggggcgacgagggcggcgagcggcgcggcggcggggaggcgggtgagggcgaggtaggaggaggcgaggaggagggcggcggcggcgacggggaggaggcgcgggcgcgggctgggcgtgggctgatgggcggtggcgtgaggaagcatcgcgtcgcatcaatggcgccgcgcgcgcatgtggcgggcgcgccgaggccaacacgaaagacaaagctaagctaggggaagaggacacaaaagctttttttttttttcaaacgactctagtgcaaaaatttagagactatagtagtatatcaacaaaatgtggatcataaacattttaaatcttatgagaatttcttgggatttgaattagttctatatgggatagtttcctagatgaaatttgtatgattagaatggtccgacccagtattaatatagcagaacctccgacctatagtatatgagtaaatttttatttgtgtttatgtctctcttaaaaagtattatacccctccatcagtgtgttctacaaaatgttattaataaaaacatagataatattgcttattctttagaaaggtcaatgtgggagagattcaccatacgaattgtctcatttgataagggaaatgtgagcaagagagagaattgttgttactagcacgacacaacacatggtgttcgttagttgcatttgtttagcgcacgagaagtcaaggatgcatcctcaacacagatatgtagagcataataccttgtatcgatgcgaattcgtttcttaagaccacattgtacccgtggttccatagctaccaaaaacaaaccatgaagaaagcatggaaactatagtgagggttcagggtgcctccatcctccctaattcttccacatgcatcgtggaggagagatgcggataacgatccacataagtaacactcaatttttttaaaaaaatattggctttccttagataccttacttgaacagatggattattatttttatgtagagaatccaaacaacatattagttatttataaattttaccatcgctaagatttatctagacatggtgtcattcgatatcattaaacactgcctgcacggttttgcctgatctagacttgattttgattttagagtaaattgtattggcggtacacaaacttgttaggtgggtgcaatttagtacataaatttataaaatgttcgtttcagtacacgaacttgtctagtttatgcgaacgaggaccagaataacttggaaatattaattttatgaagctgacgttgattaggatctaacgtgcgtacgtttagtgagtatacacaagaaatgctatatttataaatttggtctctactttatccttcatcatggaaatgatgaatttcatatatttctaacccttatatcatttcttgaattttttttaatccttttctcctatcactatatactattctattttttattgaagatgtgtatatctaatagcaaccttctcatatatatatatatatgtctatatagtatcctaatctgcttctaaatctaagattagacatgtagtgtccttttcgtcttcttccacatgcaccagacaagttcatgcaccaaaacgagcattttgcaagttcgtgcactaaattgcacccacctgacaagttcgtgtaccggcactgcaatttactcttgattttagattttgctaaaatagacattatattcattaaaaaatttgcaatgttggttatatttaactattagagccatattataattattgtgtcttttaaagatttcaagaacagactcataatatatgatttgttgcttcttcgatgtatgccttctggaacagagttaatatctaagataagaagaaacatgttactactagattttaaagaaatgtgggtacaaaaaaggaatggttgcaatgagaatggatgctactcgatagtggccactttgccgcgcatctcatttttagttggacacgggtggctagcgcgatcgtgtgtgtcggcggatggctagtttatctcaaatagcagttgtaagattacaagctctcaattcatatatttataaacaaaagatcaattatgtcatcgcatcttggttagaaaaaaaaacaaatgattgattttcgtatgcaccgatcggtcattgaatattgaaaattatatatgtgttgtgtaggtaattagcagcaaccagcttgtaaagcgagagaattgaagtgagggaaggaaattcgctttccttgtacggatggaccgacggaggaagaagaagggaaagcaagtcagttgtagaaatgggccgtgaaaggccaggagaaaaggcccaaccatcccgagcacctaacaattaattgggctggacggcctgcttcgggagaaagttgggcctcccctatctggcccatccagtatattggtagtatatgtacatgttgggccggcgtctcttgtttttctgtgggatccttttctgtgtgtttctgttcggaataagttcactttgactccctaaagtgacccgaatctaatccatgaccctaaaccgcaagaccggatatctggacccccaaactattgaaaccgatgcaatttgactcccttggcggttttggagagcggcttctctaacgtggcgctgacgcggtggtgttgacctagtctgtgtgctgacgtggcgcttaggtgacatttcaattaaaaacatatatgtgggacccgtttgttattcacacacacaaaattgtgggtcccactgacatgtgggttccacatgtcatcctctccctttcttcttcctcccctcctcctcccttctctctttctttctccctctccccttcggccgtccgccgggagcaagcggcggcgggcgggagctgaagcggtggcggcgggacgagagaacgcgaacacggggaacgccgccgagctgaagtggtgctgcctcgccgattgccacacggccaatcgaacagtgtgggcgcgggcgcgagttatcggagtgaccatttcgtgcgtcgatttgacatgcctttgttgctgttgatttgaccaaacgttgaaggaacaattatagatttaccacttattctaatcggtaccgtaaagacaataactgtaacttaaaaaaaaagcaaacataccattaaaattattattcgagtggcatctttataaaattaaaaaaaatcagtgacagatttacaaatgtccctattattttactggagtagttagtataatttttaatttattttttttaaaaagaaacaggacctgttggttcgttcgttggtctgtgtcttgttgtctgaagcctcaagcagaggagagagagagagagaggcagcgaccgacgaggcaccctccctgacttgaccaaatcaaccatcgtctcaattcgacaccacacggagacgaccattctcttggtctctcccccaaattccaattccaatttcatcatcttcttcgtctacctccagctcgcctcgcttcccccaccaattgcttacgtacgactactcctccacgccccaaatccaaaattccccaatccgatctctcgcctaccaccaagctcatctcgtttcgttagctacctaccaaattaataagggtagctacagacagcgtagcggacgaggaatccaaatcaaatccaatcctcaatcgaagaaatggagtgcgagccggaggagctgcaattcctgggcatggtgggtatctacagggaggcggcgtccatcctgcgcgcccaccggccgctcttcgcccgcatcgccgccgccttcgtcctcccgctctccctcctcttcctcctccacatcgccatctcccacgccctcttctcccacatcgactccgacgactccgccctcgactccgccgccccgggcacccccgcccagcgccgcctcctccaccgcctcgccgacgactggctcgccctcctcctcttcaaggccgcctacctcctcgccctcctcctcttctccctcctctccaccgccgccgccgtcttctccgtcgcctccgtctactccgccaagcacgacgccctctccttccccagggtcctctccgtcgtcccccgcgtctggcgccgcctcgccgccaccttcctcgccgccttcctcctcctcttcgcctaccacctcctcttcgtcgccgtcttcgtcgccctcctcgtcgccgccgactccggatcgggcctcgccgcgctgctcgccttcctcctcgccctcgcctacatcgcgggcctcgtctacctcagcgtcgtctggcacctcgccagcgtcgtctccgtcctcgaggactacaagggattcgaggccatgcgcaagagcaaggcgctcatacagggcaagctctggaccgcctccgccatcttcttcgtcctcaacgtcgtcttcatcgtcgtcgaggtcgccttccgggcgtgggtggtgcgcggggccacccacggcctcgcgccggctcaaggctcctcctgggcctcgccatgctcgccgcgctctgcgctgtcgtgatgctggcgctcgtggtgcagacggtggtgtacctggtgtgcaagagctaccaccacgagagcatcgacaagagcaacctctccgaccacctcgaggtctacctcggcgagtacgtcccgctcaaggccagcgacgtccagatggagcaattcaacctctgatcatcaaccctccgctccatccgatccgatcgctgtgagttgcgcttggattatatctctgtaatcatcatatttttattctcatcaacacagatactcataccacaaaaacacagtttgggatggctcaaaatcaggctggatctcaattgggagaataacctgtcagctgtatttgtaccagtagacattaaaggttgtgtattgcattttctgttttgatcgaattcaatcccaaaaagcaacaacaaagtatactagtgcaaattagaacaacaaaggctagctacgttgattcaacggtttcttagctgtgaaaacatgatcatgcattcatgctaagctttggataattcagtgcgctcctgtattactagtacactactatcatttgaaggttatgcaatcaatgttctgatactagttgtgcagtaacaaagtttaagttgcttttacccatatgattgagtcgaatgcttcatctcgtgaattgcactaactgggaaataatcgtcattaactggtgctgggaagatcctcgatgcatttttcagtgtgatattgtttttttttctctcaccaatttgcttcagtattcagaagctctaaagtcatgcggatggcacactatactacacacatatggcaccattgcttctaaatgaacatgctccatgcattaagtggccttccatggataattcggcattagattatttgccagacgcaaatagttttatgcaaactgaaggcgctaggtttattagctatttagcttaaataaactccgtttgaaaattatcaagagtaaaatgtaaaaataattggttgccattggacaactattcttctaactctaatccttcgcctgaagtgcacttgnatatctctctctataatcaatataatctaactttcacacagatacttctaccacaaaaaaaaacatttgggaatgttaaaaaacccggtgggt

SEQ ID NO: 6670 - DNA, 13985 bp, Oryza sativa
  unsure (1)..(13985): unsure at all n locations
ccgtgttgtttacganctctgctanagcncaccaagcattccgacaaatatgatattcacaggcacccaaactttgattagcttccaagttagtggttcagttgggataacaccagagagcgatagagtggacactatagtcacagatacaatgttctgcagcaaaagaccatcaagagattatcaatgggtacaacaagcagcagaagcacgacacagaaataaatgtaatatattgtttgagaggtaaacaatcagaaaaaaagtaacatacctgataaagcatcagaaatattccagcactgaaaccatagccagataagatatacttattaactaaaatcatgctgcaggatgatatgcaataggcaagaccagatagaagagcctgattctgtatctttgggagactgaggaaatgtgaaggcctatctctgtctttttcagccttaccatcttccaagtcagtgttgtcaatacagaaggatcttgttatagatctggagaaaatatgatccagaaaacacaacataatgtgttagattccacgatacttccaaaacattttcattcaaatagacaagaataatgttttcacatggtattttcagttttttttcccattgctgaatcgtcacaccacatgattatgttgaaccgaacaagaatatttttatatgtaaacgaaaacattatatgtaagttgggatggagggcatgtaattgatggaaaatccactttatactttgaatacaatggcaacaagtggataaaagaacattggtcaagggaagcttacatgcctgttcccaacttctctcctcaaaggactcccaagtgcactgtatcctctaacctgatcccggaaaatactcttttcaccattcacaagaggacttgttacagtctctggcgtatttttcctaggagaggcatctgaatccacaggaatggctatagaaggagttctacaagataaaaaggatgccattagcaataattcaattatgtaagatatatgtaggactcttccttatatacagcatgccatgttctattgggtttcatctcatcaaatatctcaaagtgaactcaaacctcatgatccagcaagcaaatgaaatatatggtacttaagaatgctttgtccagaaggataaattgcaagcatatgcatttcccaaaagagtcaaaattctgttctagaaataacatgaaaaaggtcttgtgctgttaattcacacaatcaaattatcatcgctgcataacacattttttttcaaagcaattgttgaaacccaacccccacagaggcacaggcatcaaccggcttgattttgaaacatcagtagcgcattcgatggctgtcatatgaaataactatttgcttgtaaaggatgtctcatggttttgagacatggaaattctctatcagattgaagtgctgtgatctaggaagcaactccaaggttatcccgattgagcaaactgaccaaataaagtccggctatcacattcatccgccagcctcatacacacgctacagctattttgctgaacatctaatatgctcaactctgcaaaagtgcattatcagaataacggtatggtgaaccgaagtatgaattactaaatttaatcaatcatgtggggtacacgggtaaattggtgaaaacaagcgagttgaggcacgcatactactgtttcacttcccaaacatttagtttcattctattttgggaaatattgaacctaccctctaaacaatgaatgagctcttggcaagatagtggaaaccaaatcaatagctatggtcaacagaagagtgagaatctactactaccaataaaggaaacaagttcgttacatcagccattaggtagtaattaaccacacgcccatttactaacaaaacaaagttgttaaacatgggccattcactcgtttatactctcatcagccaaatgactaatactgtgcgatcaaaccatgagacaagtgtagccgcaaccctgtcaaatctcaatacatttctcatatgcaagccattcccgcttgtttgttagtttgagacttgggaggagttaaaaaaaaacaaaaaaagaggagaaacaaactagctgaggttccatatccatccatccctacacgcttccaaattacagaaaatatgaaacccggagagagagagagaaagctattgcaccgagacattcctgatgaaatccgtagctccccacaccgaaatggatcagcaaccaaaaaaaaaaaaacacttccccgaaacgaaacaaactctattagagcaatcgaaccacctcccgtactaaaaagttccctaatccaaacccagctagttataaaccgcattagtcaacctcctcgtcttcgaagggagcggcggcggcggcggaggtgaaagccgccaccaccggggctggaagcctggagcaggagccgcaaaagttgttgccgtacaggggaagaggagagagagagaggtcgatcggaggctgacctggtggagcccatggcgccgccggagccgggcggcggcggcgaagaatggcgcggcggaggaggagaggagaggaggcgtctgaaattttgcgaggcggcgacgactcgggagtaacggaggagggggggattcgctttaaaatatccggcggcctctctctctctgacgggtgggccccacctgtcgggtctcgggcgcagctgcttcgctgtggcttcctcgacaccccgagccgcctggtacttcgtgccgctgacctgcgggacccacgtggtaccgggcccacgtggcggtggcgggggataaggctgggcgttgccctggtcgcgtcgactccgcgtggcgtttggagttgggcgagccgtgcgaatgtcgtggcgttgactggagcccagcgatagcagtagcaggctttgcgtgacctgaccatggaggatgggctttgacctcattttgtttgcttcagattcagatttgtttcacacatctctttcatcttgcgtctgattatgaattactactactgtttagtttaggttaggacatcaggtggaagcaaattactttgaaatttaaacaagtagtaccaagattagtactaatccagctatagaatggagtggcaggaatctgtggaggttgacttaacattggtttagtattttctttccaatacaaggacgttatgagctaccacatatgccatagattccattgattatactgtcctaacatcagataaacacgacgtcaatcatatgcattatccaaatctcagttttgctttgcttgtgctaactatcttctgttgagaatggatacatacataccaaagatgtttgtttggttaagttgcagtattaattaggtcacttaataattgattattagttgtacaagaaatgtcatactattatatacatcatatttttgtttaatttaatgggggcgcagaacgattgagtttggttttgaaggtgaaattaattactccttacaattcatcaacgatgcatgtaatagcaagcactaaagttctatttaaaaaatccatcgcatacataaccggtgaatcaataaaagtagaaaaaacaacactatggtatcattcactgttttatcagcatgggaaaagaaaaggaaaaaggaaaaggagaaagaaaagctttcctggaggatctcgtcgcagcgagaagcagatgtcggcggcccatttacacgggcctctcatccggcccacgaaccagcccaattaggaggcaggcccgacacgatacaacttatcgtctcctcttcccctctcgtctcgtgtcgtgtcgtcttctccaacccatccaaaccaaagccgcggcggcgcgaggaggcagcgagagctagggtttggggcggcggaggggagatgtcgcggacgctggtgcagccggtggggcagaagcggctgacgaacgtggcggtggtgcggctccgtaagcacgggcagcggttcgagatcgcgtgcttcccgaacaaggtgctgtcatggcggacgcgggtggagaaggacatcgacgaggtgctccaatcccacaccgtctactccaacgtctccaagggcgtcctcgccaagtccaaggacctcctcaaggccttctccaccgacgaccacaccgccatctgcctcgagatcctcgacaagggcgagctccaggtctccggcaaggagcgcgaggcccagctctcctcccagttccacgagatcgccaccatcgtcatggacaagaccatcaacccggagacacgccgcccctacaccatcaccatgatcgagcgcctcatgcacgacgtccacttcgccgtcgaccccaacctcacttccaaggagcaggtctgctattcgaatttttttattccaatagaggaatactaatagggcttgctattcgatttgttaactactaccatctgctgctgcctgcttttatactgacaaaatagaaaccagcatcgttaataaacatgttatcgcaccattgggcttcagatacaactgatatagttagtgatattgacattgtgttaaatcaattgagttacttggtttcctgtttctctttacaatttaatatatggagatcatggtttaattgtttaagcacaaatttccatgtccttatttgcattctagcgtaataactttgtgtgtgtggtttggtacctgcggtcgcatttatttaacttggatcttcaattcttcttcaatcacggtaagaaatgtgcacacccagtttaggattttctgggccaaccaattgtattttaacatctagtttcttcagacacagaaccaatgatagtgtaaataacagaatatgcacaaaaagaatgtgtgaatgtaggtgaacatacctgcttgcttgcatatacaaattagacactccataaacctcgtgtcttgtggactagtgcttattggcttagcgaaggacactaatgtgatgaatcgttcctgtaagctcccagtggactattcctctgcatttgctccaattggtaggaaatagtctgttaggcatttagccccagaggcccagacttgatgacatggctgagtcaaaccaaacatcatggctgaataggaaacttagatcactagaaatatctctgtctctcatcatctgtagaactggtagcatgactaaaaaaggtaatggtacctctaaatgtttcttagttgtgtatcgcttgcaacaattctgttctaccttctttctacagttgatcaaccttgcagtgacagtgagtcaatttcttataataacatcatactttttgtgaataaatcagtaggaaacaggcatgacaataccgacaacataatatgttcatatttgttttgattacctatggtttcttcattgcacaggcactgagagttattaagaacctaatttattatgataacctatgatttcttcattgtgcaggcactgaaagttattaagaagctaacagagcatttccccataaagcgtgcaccattgagggtgcgcttcactgcaccaaagtcaaaatttgcaagccttacagagaagcttgaagagtggaatgctaatgttatttcaaaggacgagtctggtagccagccctctgttgtaagtgctttcttccagctattactatttcactgattatgattcgcttgtcatcagtgttccctgcatgactagagtctagaggcatttcgcaaatcatattggagctcatgttttcatccacaatgttatgaagctgttaaaagattttttttttgctgtcttttggaagttgttacattcagatttatgctgctttatgccacttaatatttttaggctgcaataaatttatgctgctttatgccacttaaatatttgtagaatttagtggaatccttcagaagcttgtcctaggatagtaggctttttttcattgataaatggattgtcatatactgctatgacttggttgttagccgtgctagtcagaagcttgatccctattgcattgttcattcttctgtgaaattatttcctataggagcactaccatcctgtcatgcttaactttataaccattatgtttgtcccatgtgtacgatgtttttcaggtgtgtgagattgagccatctattctacggtcatgtgaggagagattgaaggatgtgcaggggagggtggaagtactctcagtgtcagcgcacgcagaaggtggctcttctgtggatcaatatgaaaacactgaagaatctcaatcagtgcctgcagtggagattgatcctgttgctcggataggtgaggccatgcagaaacagtccatctcaagtgagccagaaaatcctgggcagggacaaggcaagcagcagagaagatgcaaagaatgtgacgtgcttgtggaggacaagttgtatagggagcattgcaaatctgggtggcacaagcacaactacacacgccacaagaacggccttcctccactcagccaggaggagtgcttggtggaaatggaattagccgactccaagagggacctaaaagactatgatttctgaggtgaattccctgtagttccacaatgatattgtgtctgtattctaataactttgtctgacttctggctaacattttggttcaacatgttatcttctaggctgatatggtaaacattccgtgtggtacatggagatgcagtgtttttgtctgaggagaaaggttgtctgtttgatgctgtatagggaagcagggaagggaatatttgtgtaaccgcaatgtacgctacttgcaatctactgaaatggagtggtctatccacattgtctaaccgccaaagagtagcagaaacctggttgttgctgtatagctgggccagtaaatctggtggcagttttgaatgttgcttattctgtaatgggatgctatgctatgctatgtgagactacatgttagtatatcatgtttcttgctctcattcctgtggacagaagtgaatgaaaatttggagatcgattttgcaatctacaatgtgccgattttgctagcgattgtttctgggatttgtggagtcgattgctgtaggattgatctcgtttgattcgatcttggaatagtcggcacgaaacaaatgaaacaggcatacatgttggttgcgttgaactggtttttaactcaatgttgtgtgtcatactcttgtcgctgaagaaaatagtgcagtaactgaaacaacagaacttaaacaaaacaacagtgcatccagactatcacacaaacagcaatgcttaaacagaacatcatcatgccaaaaaaaaaaagagaaaaaactttgagccaactaggcaagacgaggagatacaataagtacattaggagtatgatgactaaattcttgagcaaattaagcggcggtaaataatcgcgcgaaaaattgaaatgaaaaactcccgcctctctgcctccaaaacaaaaccaaatccaaatcttcttctccacagtcgtcgccgccaccgcggccgccgcccgtcgccgcggttgcgctgtgggctgcggttgacgaggagggagggaggtcgcgatgccgatcgagctaccgcgggggctgcccttcgccgtggacacgtggacggccgcctccgccgtcaagcgccaccgcttcctgacccacgcccaccgcgaccacatcgccggcatcaccgccaccaacgtcgccgccgtctacgcctcccgcctcaccatcctcatcgcctgccacatcttcccccaggtaaccttcattcacaaatggataattatctcaaatcaccaacaaaatcaaattattaccactccaattcaaagctcgatcgcgccgacgccttcgtggaggtggagctgggcgcgccggtgctcgtcccggaccccgacggcgacttcaccgtcaccgccttcgacgccaaccactgccccggcgccgtcatgttcctcttcgagggcgcctccttcggccgcgtccttcacaccggcgactgccgcctcacccccgacttccgcttcctcgccgccgactacgtcttcctcgactgcaccttcgccgcctgctctcttcactttccctccaaggacgactccatccgccaggtgaggtcaacattgctgctgctgctgaatcactgacaactcttctcctcaactgtaactctacatttttgctctctcatgatttcaggtcatcaattgcatctggaagcaccccaatgcaccggtggtttatctcgtgtccgacatgcttggccaagaggagatactcatggaggtgtcaaaggtgtttggatccaagatttatgtagacagggacaagaattcagagtgttatcacaccctctccctcgtcgcgccggagatcctcaccgacgactcgtcgtctcgcttccaggtgattggtttccccaggttgtcggagcgagcaacggagatgctcgcgttggcacgggcgaagcaccagcctgagccactcatcatcagggcttcttcgcaatggtacgcgtactatgagccaccagagggatcgaccaagaggaaaccggcactgacagagccaatgcgcgatgaattcggggtgtggcacgtctgcttctcgatgcattcgtcccgcgaagagctggagcaggcgttgcggttcatccagcccaaatgggtcatctccacaacccctccatgtatggcgatcgagctgtcctatgtcaagaagcactgcttcgcgtcccggttacgcaatgatgatcccctctggaagctgctcaggttgtctgatggaaattctgcagtttcaggatcaccactggctgtaccaactgtagagatgatcaagaaatgtgaggaggaagaggtcacttgttctgtcaaggactctttcagttctgatggtatcaggatgcgggatcaagaaccaactctggaagactttgaaatcaacgtggagccacctgtgacactgttcgggatagcgaggtttggattgacagaggaacctgaattgtggaaggatgagcatgagagtgtcgaaatcgacgagcttaaagtgcagatggagaattcagctacagaatgtgagcagtggaaggatggcatatctgtcttaggctctgaagtaattgattcagttgaaattgtggccaaagagcaggactcagcaatagaatctgaacagttgaaagattgcgaacctaaagatggaaccaaagcaactgatgtaactgaagttgaagtgaatgagcacacatcatgtacagaatctgtactttggaaaatggacagaagtgatgagtgtgtgacaactaagagaggtgaatttgaagctgaagaacagaaattcactggcagataccagttttggaaaatatgcaagcccaaggagatggagggtgctaaattgactgtacaaggtaaaaacactgttgaagcacttgatcaggttttggccatcgatcgtctagcctacttgcatgacaacaaccaagaggtaacaaaagagggtattgctccatcagaaactgatcaggagaactctaaagttcctgacaagggaagcagtgactcctcgaatgctattggatcatcaaaaggtctgaatgccaacctgagaaagctgtacaggtcgatgaacgtgccggttcctcgtcccctgccctcattagttgagctcatggcagcctcaaagcgaccaagggtttctcctgctgtgcagctgtaggcctatcatagattcatctgttgtttccggcctctactttcagtcattatttgagttagacctgtcattcaagaatacttccattgtaacagcgatgctatagcataataatatactataattgttcttaatagctaactaatttgaatgaaaataccatgcttacaaagttgcaagcttgcaaccttcaggaactttgggcagtaaggattgttgcctcctgccttgtttgggaatatataatgatttcataattcaacagcatcacgaacgattttcttgatacagaacttcacatccaagattgcaaacaatattcaacagggaaaagagcttttggtctgtgagaaactcatccagtgaaagatatacataaatttaaggagcatggtgaatttttgaggccaactagatagctacaggctgtgtcaaacagcccttgttttcacaacaggacgatacttttcagggatagcatttatatgttgatcgtatttgccacttgaaaccagcaaaaccagcgactcagccgtggaagcttcaagggagaagttattttcatcaattttggagagataaaccccagccttgcgtacctcccctttctgtagtaactttccaactaaagcatttagcattcgggagttagctgtacaaccattcttctccaaagaaagaaataaatcatccaactcttctagcaacccttgttctatcaaacttttcatcattaaccagtaggtcacaacattcggcactaaacctctagccaagagagaagcaaacagatccttagcttcatcatgcctgccacctttaagtaacgcatcaatcataatgttaaaagtcctattctctaggtggaaatcaatcaaatataggttctgaaaaattcggagagcatcatcagtgcaattgttttggcaaagtcctagaagtattatgttgtatgtgccgatatcaaactttatcccacttttaatcatccaaagatagagttcttttgcggctgcagttcttctagcctgaaacaacccctggaggattgtgctataggtaacaatgccaggattaacacccttgcttgccatctgtctgaaaagagaaaatgcatcctctatcctaccgttcttacagtaaccattaatcatggtattataggtaacttcgttaggtttcaccccatctaacaccataccttcaagtaactttgctgcttcatccaccttaccatgtaagcaatatccatctatgagtgtgttgtatgtaatgacatcacgctgcacatctacacgtaccatcaagtcaaatatgtttttggctcttgcaaccattccttctttgcataggtggttcaacaatgtgttgaagaaaatgttgttgggacagatgcctcgaccgatcatttcaacagctaactcctcagccttgtcccannnnnnnnnnnnnnnnnnnnnnngaattaagtttctaaaaacaacagcatcaggagttagtccttcagagatgagcctgccaaattgggccatagcatcatccactttacctaccatgcagagcgcgtccattactattccgtaggtgactgtatcaggattcaatccttgcctcctcattttgctaaataaaagcatggcatcatctacttttccatgtttagtgtatgtgcctattaatatgttaaagatgtagtgatcaggttgaataccgtttcgtaccatcatatccaatagatgatgcatcttaacaagagatccttcagtagcatacccatgaagcagagtaccgtaggtagcactgttaggcttgtggcccctcttgaccatagagtcaaagatctttctagcttccatggatcttccattcttgcagagatagcccatcaacgtgttataagtgaatacatctggttcaacaccatccctgcacatccttttgaaaaccccaatagcgtcattgggctttcctgatgagcaatatccatgcaaaagactattgtgcgtgatgcgattaggcatagcaccattcttaaccatcctaacaaggaccacagcggccttgtccattgctcgagccttggaaagggcagagataatcgagttgtaagtcacaacatcaggcgacaacccctgatccagcatttgatcaaataggtgataagctgtgtccagctgacgaccctctctaagcaagccgttgatgactgtgttgtatgaaaccacgtcgggtgggtatcctcctctggtatcatcagccaccatcatggtgtggagcaggtggagagcttgttgactccggttttcatcacagaggcccttgagaaggatggtgtaggagaagacattgggtgtgcaacccagaacaggcattcgtcgcagcgcaatgtccattgcttcgctggtcctctttttgtcgcagagagccttgagcagaggactgaaggtgattgcttccgccgtccatccagacctaatgacacggccgagggcggcgaaagcgaggtccaagtggccgacgcggctgcagcagtcaatgacgacgctgtaggtgattaagttaggaggcaccttgggtcgggccaccatcaccatgcggcggaagagggagatggcgacggctgggctgtgacgcgcggcgtcggagagggcgcgattcaggtcgacgatgctgctggtggtgggtcggtgaagcaattcatcgaacgcgtggtgggcgtggtggctatcagtgccagcagcagccgcttcttgtcgaccttgcagcttcatgaggttgaagcgggagaccttggtgccgtccggggcgctgaggacgcggcgggacatggccgccgccgccgggccgagctagttgaaggaggagagatggcggaaattggggaggaaagatgcaagttgctcagctgctgctgctgctgctgggagagagagagagagagagagagagagagatagagcggcatgtggtgcgggaatggcggaggaaacaatcggcgacggccggcgaggaggtggccgccgactcgccgaggccggccggagttccgccacaaagttggcttttttttttccagagggtgacatgatttatatcagtaacacgtgatttgttatcaataatattgtttctcaataacttaaccgtgctcccctcatttcaaaaaactccataaacttggacttaaatctttatataatttaagcacttataggacattgatggtaatacacgatattttatgtaaaggacacgaattaagatttacctgaaaacttactctatcgctacacaagtcttatttgaattacgcgcaaaattatcctgaggctgatttaaccatcgttatatctgcggtcttaccgggactagcaaccggtctaaccgctggttcacctgtggtctaaccgccacctggtctgaccgactagacagtgtcggtctgacctcactactcgaaccaaaatccgattttagccaccgtcatttcacaaaagcaatttccctttcctttttctgtttatgggtaaattaaaataaaaaccaaccaaatgtccatcttttcaaaaaaaaaaaaagagcaagaataaatctcacaagtttatgaaaatagatggttttacaaccaaagactgtttcttgaaccattgaagaaacagaaagcaaaatcccagcagttttaaaaatcgttttctttggttcaggttttgtcaaagttttaccttttttttagttattttcaaaacaggaagttggtgatctgtaaaacaggcagtagtatcaaaacttacaccctgattgtaagtgctcattttttattaatccaaaatcgcgttaagtttctttttaccataaaaaaaaatctttccaaagaacttttcagataagaaactttttttctcaaatttgtaaaattcaactaaaacacctttgttcttgtgacacctagaacaagaaagcacatcatcagatttcacaatattctccatatgcttaacacgatctaaagcatctttcaattcatctcattcaaaaaaacactttgagcaattttagaaacaaaaacatcctgtgttgttaaccctttttgcactcaaacattacaaagatcttgcaaaaaacaactttgtattttttttcccaaacgtttttcatcaaaatcaactcatcacaacacgaatatgcaaagcaaatccaagagcaaaagaaaactccaagtttttaaatttt

SEQ ID NO: 6671 - DNA, 6251 bp, Oryza sativa
  unsure (1)..(6251): unsure at all n locations
cgggttggaggaagtggataatgtagagagcgtattgaaaggagaatgtggccagagttgttacggtgaggtatagatagacggagtgagtgtaccaactgtagaaaaagagaaaaatacgtccgaagtcaagaaagaagaagtaaaggaaatcgaagaggtgaagaggctagagatggggacagacatgcgctcgaaagtagaaaaggggaaataaggaaggcgggtggaaaagaagaacaggagagaagcacagagaaaccgccgcccttttaattttccccccatcttgccgttttaaagacgataaagaatttttgccaatttaattgcaccgattttttaaaaaccctgtgccgacttaaaaacttaattattttttggggcagagttaaggactattgtttccataggaagtgtggaagcccctatataatgttccgtaaaaaaaaaggtgaagatgttttagaattgctgcggaatgagttgaggtttttgggattatccagagggggtttaaatgtttataaaaagcgaagggngccaaacatttcgaaacggagggagtatattgttttactgtaatcattatgaattactccctccatccataatatgagggattatgccattttttttgtaaaaattaagaaagtagtggtagatgaaataataaaatagtataaaagttggtaggtggagaataaaatactatcttggaaacctaaaatctcttttcagaacaatttacagatgaaaataccttatattatgggacggagggagtaagttgttacagtaccactatctatatatagcaagagatgcatttatgatgggtgagacatgaaaaaaaatgtcaattcaaaaatatgcaatagtgatatttgactacaatctaagtttgcctttttaatatgcaatcatgtaaacatataatatatgtatataattcgattcttaatcgatactatgataaagcctaagtagtaaaattggcattttccttgtaattaattagtcctatatatgcttgtgcgttacaatgggatatgaagaaatacagaaggatggttttatgaggttcaattttctttgactggtttttctagtggatcatgaaaacactagtttttttagtaggtctttttttaggtagggtggttttcctttttatggggtgtatgatggtggaagaagagaagaaagacgacttccctttatagtagtagagacaattaagcaaaggataaaagctttcaatatcacatgatagtaatttttcattaattaattcaaaaataaaactattatgctacataaaaaaatgtgatgttttaagattgtgaaagtccaatattttaaaaattcttctaacatctctcctatatggatagctgtattagattcaatgaaacatcgatcatgcgtgcaagtttttctctaaaaaaatacgtctcaatgtcacttttgcacaatatatagctttatagaaactaagggtgaaagttgaattttggggaacatgcatgtcaatgtccaagaaaaaaatgtcatgtttgcgagggaacagagagcacgaggggcggatataagagaggtaggtgaggggtgacaaacggaacaaaaactcctatacagaagaataacaaataatagcttaagcgtaaaatttggtacctctatcggtatcttaaggaccataaaaattctcataaaaaatggagtagttaacagattcatcatccaaccttttgcttaatcatagtaagcaagacatccagccatttgcttacctcacacttactgtacacaccaaacataatacatgaatgaataaaaatgcatctagacacacactagtacacattagtacacctcaagctaaggtaagcagctatcctcccccttcttctccccctccattcccctataaagccatcttttatgtgaccactcatgggctctccttcctccatctccatctccctgctgtgactgagctacatactaccagagctaaagcatatgtactcaaatctgtactacctccttaccttgtgatccatgctaagctgcatgctagctaggttgctgccatcacttactgcatgcacttgtgagtggtgatctcatctgctgctactacagcaattagctagcagagctgcagctcatcgatccatggacaacatgacccacaactccagcagcagcagctcatgggatttggacatgagcctcggcagccaccaccatcccctcctcttcgaccagccgccgccgccgncgcccccgccgccgccgncgccattacccttccacctccaccaccaccctctagatccctctccttcttcttctttgtttcctcctcctccccatcatcaccaccatgcccatcacctccatcatcctctcgacctggaccagcggcgtggtcaccatgactatggcggcggtgaccaggggggcgacgaggagctgaggcttcagcaggaggcggcggcaggtggtggtggtggtggccaggacggcggcggcggtggggatcaggacgccgacgaggagctcggcgccatgaaggagatgatgtaccggatcgccgcgatgcagccggtggacatcgacccggcgaccatcaagaagccccgccgccgcaacgtccgcatcagcgacgacccgcagagcgtcgccgcccgccaccgccgggagcggatcagcgagcgcatccgcatcctgcagcgcctcgtcccgggggggaccaagatggacaccgcctccatgctcgacgaggccatccgctacatcaagttcctcaagcgccaggtccaggagctccagcaccagccgggaccgccgccgccgccgtatcccgccggagctgcaccggccgccgggcccagcacctcggccgtgggcccaccgggccggccattcttgccgctgggtggaggagggcccatgatcgactgggtcggcctgaccaggccggtggacatccatgggccgacctcgtcgtcgtcctcgtcgtcgatgggcggcgccttgggtttcgggttcggctgcggcggcggcgggcagagcagccatgggatgcactgatggatgatgaaattgggatggagcaatatagctgagagagaggagattaactaagctagggatgcatggattggtggactagagaggtaattttggtaatttggttttggtcttggtttttattaattaatttgctcttgttgttggctcaggctactagctactctctctactccccactgagtagctaagctgctgccttgatgtttctcaaagtacaattaattaataagattagctagggtttgcattctatttgccaattttttttccctgcatgtgataattacccttcaggggtttggttaattttctcttgtcgaattttcttttgtgggaaatttcaattaagggaccaaatcattcaacaaattaaaatctggacacaacacatatgtagtgtagtagaaatttaatttaacaaattaaatcttggatgcatgcaatagaataattgtcaatgatgttctggtaggttgcgtgttgtgtcgtggtggcagcatagcatagcatgcatgcatatatgttgactgctaggctagctactggttgagctgagagcatgggatcacaagagaggatcagaccggatacatttatttatttattgtttgcagcttgtcacacacaagatcagagctcttgctatctacctttgatcacttaacaaaccgcttaattaattttactctttctttttgtttgtttgtttggacccccaaaggggatcatatcggatcagaaagaaaaaaaaaaccactttaattttgtcctgatgagatactagctactccagcgcgcagacgtagctagaaaaggagggaattattggtgcaaggtattcagtgccatgatcagtgatgagtggtgaggtgctgaattccatgcatcgtcagtaaattaagaaaggtgagggttttcatttcatttcagttggagagttcccagggaggacgacaatgcggccaaacccaaccattggaaaaagcttagctgtaaccatcaactcctatcgatctaggagtagtagtattctctaccttacctattgcttacgtattctacctagctagtagtagcatttctagcttagcactggtgtacggctcctggattttcttatgttttgtttccttctttgtgaacattgggccagaggtttctcaaattgtcattcctggcaaaatttcttgtttatctaagctaattaagccatatgtgatatactacctccgttctaaaatatttgtccagtacatagctacaatttcttatattttagggtgaattggaggtggtaattaagaacttaaatttttgttgtgcatgacctcctcgaaaaattccattagccgcaacaaatggtattttatgtaaattaatggtgatgcatcactgttgatggaattactgctttgtacttttttaaaagagttttcattagatttagatgcatgttttgttgtcgaaacagaaacaatgtaagtgatttgttcactttttgttgctgttactctattctgaagttcagtattcttgccatattctcccccaattttgattaatttctgctatatagtttaaaccaatgcttaagtatacgcataaatgaagcattttagttttcttcaacatgctggtaaataaattattttaatcaaactaattcagctttggttttttttatagtgctcattgggaattttgtaattctttgtttcagattaatgcatgtttggctgccaattttgcctttttaggtatgctaatttatattgatttattgtagtatttgaaccttgctgactcaaaatgtttagtttttttttacttaaaccttttggcaaagcaaggacgaaatcccaagtgatgtgcaaccctgccttaatttggggctatagacattatattttgagtgaatcttgggccatatatataatgttacttgaattttaacttaagatcatctagataaaaaaatgctgccttatgccgtagttgtatgccaatcccatttttatgaatgaaaatagctaagaggtcaccaaaattaagtacatcacataataaatttgatcttcaaacttaattaatgcaacatgcatgtcatcgtatcagtattaatcatggctaaaggagcaagctttctcctttatcttcggaattgaagaaaaaaatgttacaatattatatgtttgcatggtcattttttaatgttgcagacatatggttcaaagaacattactgttcgttgtaggattgttagaactccagagaggattaattatattgattccaccattgtgaaatgttaacatacacatacgtgaatgtgtggaaattggccacattaatctactgtacctttgcattcgtgatgaacagctttcattccatacagtcctttgtcatgccttaaagcacactaggttatgggcaatcctcagcagtgataatcgactagctagagatcgaaattggtagtatatatgtaaaatctcgatctctaccaaagatttttttttctccctaaaactcccgtgatttagaattaatcaaaatcgttgtgcgtgctacatctgccctcatcaagtaaaagaaatttagtaatatatgcagatcgaatagatcaactagtagtatatgttagagcatgcatattcctttcccttgtccatatatatgaaaagttcaattcaaattaaagatatctctacagtactataaccaatgaatcttaatttgtttaatttgattacttccattcattagattgaacttcaggaaatcatcaaatactacactaacaaggagaaataaattcgataaggcgcgccatttggagtagtgcaggaatttttcccatgttaattcttccagaaattgttttaaaaattatgtcatttccatgttccaaacggggcgcgcagcatttagttctctcttttcatttaaatctttttttaccaagcgaaattagaactatatttgtcgtcagaagaaattaagtatatacatgcatgccaactttgtagctagagaggtttgatcaattatattatgtgctttacgatgataaattaactcacatgaatttaatataaattaagggcacactttgctatataaataagggcatatgtacc

SEQ ID NO: 6672 - DNA, 663 bp, Oryza sativa
tgcctttaatctgttacctagaaactatctacactgcacaatatttggtccaaaagccgattttaacttagatcaaaaccagcttctgcatttatcgcgtacaacaatttgctttccaattgtgtcttgctgttcaaagaacaaaggaatccgttagtcccgttgctgtcaatcgaaacgatcagatagagcgaacaacccataaggatgacagaacatgcattacagtagttactacaattacttactttctataaggagggagcttcaggaggttcatgcaagtggccgatgtaggcaagcggtcttcgtcctcctcctccatgccaggaacaccagccctgcagagagagtttacgatgcaattaacaatttcaatgaatggaacttaaaacagaggtatatcaaacctctgaatgcagaattttggttcgaggtactgaaatccaaggagtggtccacgagaacatccggtcacgaacctgtgcatttatcaagtatcaaccacatgatgagactaggagaaaagcattatttcaaaatagccataaatcatgtttatgcataagccatctgtgcatcaaggaaagcaggggtagatagagagactaaactaaaagagatactaaggcaatacactcagcagacattattacaacttat

SEQ ID NO: 6673 - DNA, 688 bp, Oryza sativa
aagtaatgtaagtattaaagctgctaagatacaatgcgcttctttttaagaaatacaagatgcaccccacagttgaatctggactgcaagatttgcagccactcttgaagcagaacttatattcttagcttatatattgacccaacagtttgcgtttatcttaatatgttgacagaacgaagaagaaaatttgctcagtatctgtggttcatattaccagtccaaattgcatcagaagtttggaaaaatcttagcttctaaacttgtgaagagccattttctacttcagaaataaatggaaacaagctcgaacctttaaagacagaagatgacgatacaattctggatccaatgaaggcagatcatttaagaagttgtacctgattaagagcaaaataccagatacaataatccaaagtaaaacataatcagtataatgcaatatagcatatggcataatgtttcaattgaccgaattgtgaaaggaaaaaaaaagaacataacccaatcaaatatgatcccatggtttgtttagatattctgtttagtttaatctcagtggatgtaaattccaaaagtatacatcaagtccctacgcacagtgttatcggttatcatagaagtcaattgatatgctttaaagaaaatttaacccagtcattggtaggggtggaatgggctgcaggaa

SEQ ID NO: 6674 - DNA, 641 bp, Oryza sativa
aggtcatagtaagtattattattcctctgggcaatggtggctaacaaacgaggcaaattatcataagaagcttcaaatgtgccatacctcatctcaatgatcttttgtttggctctccaggcctttgcatagcttatggtgtacttgaatttgttctcgatgtgcctaataattgattttggttcaaagccaatgttaccaacaacactgctgtacatctcacttgccacaaaagctgaagtgatgtttcggtgatacttctccaccccttgtaagtagcacttgtgctcggtcacaatgctaactttccaataatcattccatttacccttatatgcatggacacgccacggacattcttccttcatgcacctcacttcatacacataatttgttgacttgaccaccctaaactctctctgcaatgaaactgcccaatgcttcaccgcctccttcatctcatccttatgagcataccttgcaccctcaattacctcgttctccttatactcccagggtacatgatcaccctctgatataacaagaccagagaagtcctcatttgcccaatcagtggccattacatcaccttcctcatcggatgatgcgtcgtcctccgcttgctcattatccgaatcttc

SEQ ID NO: 6675 - DNA, 2741 bp, Oryza sativa
  unsure (1)..(2741): unsure at all n locations
cgcccacccttgcctagatgcgtcggctagaggaaagctacgctacaagcccagccgttgcccacgctggcttgtggtaagtacgttaagttcttccagggcatcccgcgaaccggtccttaactgccatgggtgcgaccagcaaaaccatgcacccacagcccaccatatgattcattttaattaaccaacaccagagcggtggtactaatccaacattaccattagaaccaacagtctaaacattaatatgattttccccattgtgaactagttgaactaagcatagctaagcaattcctagtccaaactctaatcatgtcataaccccaagctaacaaaggagcatggtatccaaaaagcatggctgtgacaataggtaaccaacccataggatcccctataaaacaatgcaatatttgaaagaaaacaatagagcatttgcaatataggatcaacatgttcaagtgacaagcatgacttgccttgctctgctgctggaggaacctcggcgactatctcaaagtacaccggagcgtcggaggaatcggaatctagcgacatacaaagcaaacattgcaaacaggctataagactactgaaacagggaacaaaaccatttttaatggattctacacatttttcttgatttactgagacttgaatgggcttaaacggagctcggatgaattagttatgaattttagaagattcactgtgtttattactataaaagaaaaaccctaaatcatttattgcgcaatatattccagggctgacgtcagcacaagggaagcggcgccgacatgcggggcccaccggtcagcggctcgggagagggaggaagggcgccggcacgcgggcccactggtcagcggctcgggagagggaggaagggcgccggcacgcgggcccactggtcagcggcggggagaaagaaaaggggcggcggcacccagctcggcttggctcaaggccggccgaccggccgcggcgacggcgacggcgcgcgcgcgaacgcgttgccggcgacggcaaccggcggcgagggcgacggcgcaaaaggcgacgcgaaggcggctacgctaagcggcggctaggaaggggaggggacgggcggcgttaaaggcgaccgccggctcggctcggcatcaaagccgacctgccggccaggtctagcggcgacggcatgcggccaacgacggcggcgaccggcggcacgggaggcggcggcggcggccgaaggcgacggcatgcgactcgaagcggcggcgcggcactaggaggagaggaaggggaaaagaggggagggatgcctcaccgagggtggccggcgcggaagaagatgatggcgaacggcgacggcaagccacgggaggacgacgtcggtgggcggacgagcttcggggtgccctaaggaaggagaagagagggattagagagagagatggaccacggcgaccggaaaccatggccgaaggcggcggtggaggtggtgctcacccgagtgcgagggaacgagggctccggcgacgaacctcgacggaggaggggtggacggtgtcacatcctgattttttcaggatttatagattatttaataaattattattagaatttatattaaatgttcattaatttacaagtgaagttaaatgtgggaaataaaatttcctaaatataaagcatggatggatttaattttttattaaattctccatggttaattatactctctggaattttctcggatttttcggagctcaattattaattttaatcatacaaagagcatttcagtaattacccacatattaaattaatcattaaatggtctaattataattttggtaagtactttgagtgtccaagtattttcaggatttttcttggaattatttgagcattggaagtatttttaacaattcaaagatcatttaagtgattattttaattggaaaagtaataaaatcctcctcctcagcttgggccattttcggcccattctttcctttccttcctctctcttccgccggcccaacctgagccgcctcctctcctctcagcccagccagaaaagtctactgttcctccctctactactgttcatcttccagctctggacagagcccgagctgccgtcctgtgccctgtgcagccgccgctttctccaccaaatccgccgcatcccgagctccgtttgcaaaattagttgaggggaaatatttcctttatcttcctctttcgtttcccccaagaatcggaacctaattccttgtattttatccaaataaaattcgttttgagtttatctctccaaactaacccgaagattttccggcatcgattcctctcgtttggagtccgatctctctagtccaagactatataaagcatcccctagttctcctctttcttttgccccatctcccgagctctctcgtcaaccgtagagctgccgccacgtcgtcttagccgccgccgtcgccggccgacgaacagccggctcgcgccgtcgttttggccgtcgccggtgtctcctctcgccgccgtcgggtgcgcgtggaagaagggaagctcggncggccccttcccgccgtcgccggtcaccggagagtcgccggcggcgacgaccgagtcgccaccggcgcacaagctcggcgccggccgtcatccgtcgtcgttcgttgcgttggtgagtatcgttgagatcgcgtcgtcgtcgtctacgtgtagatgcc

SEQ ID NO: 6676 - DNA, 2805 bp, Oryza sativa
tggagactccgatccaagtcgactccgagacagaggggaccgacaccgagccagagatcgagccagacatcactaatccttcagaggatgagacccctgttccccgcatcaccttcctcgaaggccctcgcaccctcagcactgcccgcaagagcacccgacccccgagcaagaagcccaagccagatccagaggccactacttccgagccgtggggactcaggtttgcccgtgccagcgaccaccctctacctgccccaggatcctgcggatggttggatgactagactggaggattattgcagcttcgatctcgcttcagatggtttttggatagtatgcgagacacacccccccttacctagattgacgagtagcttgatggttagttcgatgcatcttttggatgaaccttatttggactgcgtatgtgtgcagtcgattgcatcatgatttatgtactatttgtggaactctatgatgttatttatgatattattgttgttgtgttataaatgagtttattccaccatgcttgcaaaacaaagttcacatcgaaacaactcccttaatgggataaaaccataagagctagttagaaaattaggatacttacttaatcggcctacacagatggcaagccgacgtcgggcgtcaaccagcaatgaagaagcttcgacacctgacctaaccaccctggccagagttatggccactgaaacccaacttctacaagccattgcgaataaccaaggcaaccgcggcggatcgagctttggagagtttatgaggaccaagccacccacgttcgctacggtagacgagcctatggaggcagaagattggctacgtatcatagagaataaactgacccttgtccgggtacgcgaagccgacaaagtgatcttcgcagtaaattaactggagggacccgctggtgattggtgggatacttacaaggaagctcgggaagaggatgatggagaacccacttgggaagagttcactgcagcatttcgcgagaacttcgtgcctactgcggtaatgcgtatgaagaggaacgagtttagaaggctgcgacaagggaacacaacggtgcaggaatatctgaaccgattcactcagttggcccgctatgcaattggagacctcgcagatgaagaagaaaagatcgacaagttcatagaagggctgaatgatgagttgcgtggacctatgattgggcaagatcaagagagtttccagagcctaatcaacaaggtcgttaggctggagaacgatcaaaggactgtagagcacaaccgcaaaaggaggctttctatgaatcgcctacctcagggagtgcctcagcgactcaaggaagccacttcgtctgggtggaaaacccctattgtggcaaccaaccgccccgctgcacctagcaaattcaacaggtcggttgcgattcagaaccgcacccctacaccaaccctggctgcccctggagccaagaagaatgtggactgcttgaactgcggggagtatgggcactacgccaacaactgccctcatccacacaaaactcctgtccgtactggcgctaatgcaatgattgttcgtggaactactacccctactaccggacgaggtctattcaagactccgcaaactaacaggaccgctaccggatttggacgcggacaagtgaaccatgttcgagctgaagaggcccaggaagatcagggcgtactaatgggtatgttctctgtcaattctaccccggttaaagtcctcttcgattctggtgcatcgcattcattcatatctctgaaggctagtcaaaagcacaacttaaccctagtgggacttagaaagcctatgatagtacactcacctgggggcgagataactgtgagtcatgcttgcatagatgtacctattcgtcttagggttgtggtgtttccctccaaccttatggttttgataccccagaccctggatgttgtcacgcccagaaattcccgaatagaattccaagcagaatgtgcattaaaatccccgtccaggaccagccggggtacacaaacgacaatgttgacattcagatccacgtcttacaaacatcataaagtcttacataaatgcagcggaagaaaagaaagacaacaggagctaagccttgactaaactgcagcgggaacaccactccacaggcatcctcgacggcacggacgaagcctactcctcagagaaaccttcatctgacccgaactcgaactctggggttgggaaaagtagagcaagactgagtactacccactatactcagcaagtcataccggaataggggtatgatgcagggaattaacaaagaagagctgaagtggttcatttgcataaagcgagcatttataaacagaaattgaaagatttaaacagttgtaataattaattcatattaatcatccgttgtccaacgctaacccacgttgcgacaggcccaaccatccacctaaactatccaaattcaaaagattacactagggtgagactaatcacggtgaatctggttgaccgcccataaccgcgggcacggctattcgaatagttttactctgatcagaggtgtacaactgtacccacaagacacagccccacgacatgtttccgtgcgccgacatgtcaccacgacatacccgaaagaggccgtgacaggacccttcgcataaccccctctaaccaagcacaccacacctcaggtttcacccccactcctcgcaaggcagcgggcagtcccctctcgtgcctaggtgaatccggaagccg

SEQ ID NO: 6677 - DNA, 1239 bp, Oryza sativa
gattatagatccaaaagacctagatggcttgcaggccgatattgttagtaccctgagtcacttggagatgtattttacactagctttcttcgatatcatggttcatctcactgttcacctactgaagcaaacaaaaatatgtgggccagcttttatgagagaaatgtggccatttgtcatgaccggaaataacccagcgggcgttccttacgtgcgtgtattattccttgtcccaggaggcaaggtacaccaaaaattgatacaatacagagtttaacaagcggaagcgtaaacaattaatttattacatgggcggtgaaggcccagcacacaggaagacaaacaaaaaacagcggaagactacggcgacgaccacaggcgcttgacggcaggcacgagctagacaccaaagccttcatcttccaggaactcctcttctgggtttgggaaaaattgagcaagactgagtacaaccaccgtactcaacaagacacacccacgagtgcagaataaatgcaagggagtacaagggagttataatataagggattagggtttgtagtaaacagcattaaaagacacttagttgctcaaagctattttgtaaatacgatcctcgagctatgcaatattattaatcaaggccgtgaacccacacgaacctgccttaacccaaggcctacgatgattcagaccgaactggcaactcgaccctgggtcccagctcgtcccaagccaacccaggccaaccattccacattttagtcgttaagaaggttttaagaattgaaacactaacttgggtacattgctcggcttgcccataaccgagggcgcggctattcgaataggttatactctaatcaaaggtgtacatctttacccacaagacacatcttcctcacgtgtaaccacgtgccacataccaccacggtatacggacggaagacatgacatagtttccaactcatcctatccatagacaagagtaccgacccaaccccacctacgggcggaacctccgggacaggtaggcaggactgagcccctagcagcaggacatcggccctctgccctgacatctcgactaccgggccgcagctcgtgtagccttcatttgccctagagatgtccatcgacccccgacttcgtccatctccatccgtgaacttttgttataaccagactgagccacaaactaagccttaccactagacatgtggaagtacggtagtgctt

SEQ ID NO: 6678 - DNA, 6821 bp, Oryza sativa
cacatttgcgttacgtatataaacgacataattcccactaccctgcactccaaaccagcaataatttatcatctagatacacaacaacaatcaccagtcaaccatatattacaccatatattacacagataacaactaaaagtaaccagaagtaattacaagaattgcatctaaccaccgaatcgaatcgagatctaagcagataccttgcaggggcggttcttgataacaatatacccattcttgcggatggttccggcctgctggggataggtcttggacgccccagcgtcggccttcgactcgaaatggtgctcctcagagtccgacatgccgatcttagcgagcccctgataacaaaatcaaatcccaaacatcaaatcaaacaagattgcacaaaaaaacgaaattcccaaaccaagaaaccgagcaagtgtggtacggaagcaattggactacgaaccaaatccgaatggatttccaccccaaattaccttgtttggatagatcgcgaggagaaggaggcggtgagcgagagagagggaggcgccgattgatgataagtgataagctcgcgttggaatcctagggtttggttacatttatacgctgctaacaacgtttccgcctcaccctctcacccgcggagacaccacctgtgacactgacggtgggtcccggaacgacccgtccccacctgtctgtgagcgaggcggtggtggcgtgttacgagagtcgcagccgtcgattcggtctggggatcgggacacgtgtacggctgcggagggagggcatcacctcgcgttcgaaccacgccatgggcggcttggaagaatctttcttccttttttattttttatctttccttttcttatcttgaagtttttatatttttcttcattgcttttcgccgtctcttttctgctgatcggtgataagtcaataatctctcttgtgattccgatcgggtggggattccctcaggagacgtcatagccgcattgttatgagatgatcaaagaggaggagggcctagttggatgtgacatggtgttctttttagatagtgttaaagagagacactcttctttccaaaagaagctactagtacactcaatatctatatatatatatttttagagaagtttctcttaaaatacttatctaatttataatctgtatataccgttatgatcgttacaattaaatctttacaacaagatcttacatgattatattctgataatatatatatatatatatatatatatatatatatatatatatatatatatatgacggagcgtggggctcctcaccgggagaccgcacaggcccccctttgccggttcggccgggggctcagggtgagatcccaagctctctctgtacgtggaaagatcgcgacctatcgaaagagcatgagacacaagcgatgtatacaggttcgggccgctgagaagcgtaataccctactcctgtgtttttggtggatctgtgtatcaaggagctacaaagtgtgagccaacctccccctttgttctaggttccgaatcaggaaagaatccaaaaaatcccccttctccatgggcgaggtcctccttttatatttcaaggggataccacatgcaccctccctttccaaactggacttttcttctcttcataaatggacggagatttgcacggttgccctccgaacgtccttctgacgggacggcacatacctacctccacttctgccgggggcaggcgcgtcgtgggaacgtggctgtctgccgacgacatgatcagtgtcagaccggtcacaaatcggtcattcttgtccaccacgcgtcagcttagcaacgtgcatgtttgcccttcttcacacaacatcttgcttgtaatggttaggatgaagcctggcatatatccgaccggggctaacgtgccatctctgggaggtaacacgctagctccagctggggacgagtgcctagaagctctcgtcttgacgggatggggcgaagcgtgcgtcagaccgcctgtcgcctcctaacccgcgatctgaccggtctgtgactggtcacagaccggataaacgagtgcactgcactgtatttcgtgcggcgtgacacgtttagccgagccgcaataaatgcggttaggtgagccccgctgtgctcacctaacccatacacgcggagtagaacccgcgaggggtcggggcgcctcggccctcgggggcgaggcaggagtggtccgaccccccctcggggagaccaagaggtgggcgcacacatcaccctcgggcccgacgtcccccgagggtgccaggccacgtgggcgattgtgtctgcctcaagcctctagtcgtgatactcccggtcccatgtcaccgacagtagcccccggcgttatgccagggcgatcacctttttcaagggaagcggtcgggcgtgacgccatccctaaagcctggtgacaagtgggaccggtctctacaaataggcagaaacccaacggtcacaaactacgcacatcggcaatggtaactcggctgtcagtaatgagcggtctcttccagactgccacattactcgagtagcacacgaatctggacatggcgattcgtttcatctgaagatatggtaacgtcgcttcggttggcgagcgtaattaacgcgcgcacgatatgatctacctcgaccgccacaaccacatatccacctcatgcgccgcaagcgggcgaatgggattagtggaagcgtgggcgcgagaaacgagggggcgaaatagtgggcgcgagaaacgaggagccgggcacagcattggcaagggtataaaggcactgggaagggatttgtttccttcctttcgccattattccccttgtctttaccgcttgcgccctaactccttcttccctgcgcccttctttcgccacacgcgctcgctctccatcttctcttcgtccggcgccatggcacggggctccgcactgcttgatggtagcgtgctgccgccttcccgcatcgtgagcgagaagcaggctgggttgccgcgccgcttcatgccggaatctgccaccggccgtgagatagtcatgctgggcgagggacgcccggcgccagactacccggggcggtccgtcttctttctcccctttgcaatggcagggctggttccgccattttcttctttcttcatggatgtcctggagttctacgatctccagatggcgcaccttacccccaacgcagtgatgacattagccatcttcgcgcacctgtgcgagatgttcattggggtgcgcccatctcttcggctgttccggtggttcttcaccgtgcagtcggtgtcgccgccgtcggtggtcggtggctgctacttcctgccgcgggggccggtgttgaaccgctacatcccctgcgtcctccgcaagaagtgggatgactggaagagtgactggttctacacccccctcgccgacgaagcgcgcctccgacttccgagccagcccccggcgcaggcctccagctggcgggcgccggtagatctgggggatggctatgacgccgtcctcgaccgcctggcgggcctgcgatcccaggggctcacaggggccatggtgtacggcgactatctccgtcgtcggattgcgccactccagcggcgcgctcggggcgcctgggagtacaccgggtccgaagactacatgcggacccaccagggagtcagatgggattgggctcctgaggacttcaagatattggtccaacgggtgctgaatctcaactccgtggaggcggccctcattccccaaggaatcctccccctctgcagcgatccagaccgcgcctcgatcctgaccattatgatgggggtcggggcctctgaggagcaagctccaaagggccatgacggcgcaggagggagccgccggggggagcaatctaccccgagagggggtcgtgcttctgggtcccgtgtcaggggcccggggagcagccgccctaccgacgcccgggggaagaggaagcagggaggaacacctcccccatctcctccccgagggggcggggcggcgcgtgctagcagcaagcgcccggagggggccgcgccagcatcgcagctcgagggggagcgcaagaagaagcggccccgcaaaatggaggagacagaaccatctcggggaaacctcatttcccttccaaagtggtcgtttaaccgaccccctcgcaggttcgtctctcacccatcgtggctgtattcattctctcaacatgagttttcactcgcccatcttgttcgtcttctggtcttttcttttgtttcagcgagatcccgtcgcgtccctcccatcattccaagtccggccagcctgaggccgaggatccggcggccgcagaggcccgcaggcgggaagctgaccggcgagaggccgcagatcgcctacgggaagccgaggaggccgcccaggaggccgcccgggctcgccaggccgaggaaactgctcaggaggaggctgcccgagcccaccaggccgaggaagctgcttgggaggaggccggatttcgccaggacgaggcgatggcgacttccgaggcagctcgcgaggaggccgcgggcgcgtcgctcgggcccactccctcgggcgacgctcaggcgacaacttccggggcagctggcgacgaggcagcgggcgcgtcgcttgggcccactccctcgggcgacgctcaggctcaaccaggtccggaggacatccctgcgtctggcacgtccatcggcgggccgagccgcgcggcatcttttccgaggcgacttttccccacgccttctgctgccctactgagcgcagagccccttctgcaagccttggccgccgcaaacaccacggtgttggacgggttaagtgcccaggtggaggccctgcaggcagagcgggcggagctcgacgccgcgtgggcgcgcgtcgaagaggggcgacgctcggtggaggccatggtggaggtgggccgtaaggctcaccgccggcatgtctcggagcttgaaacccgtaagaaggtgttggcggagatcgccaaggaagtggaggaggagcggggggctgccctcattgccaccaccgtaatgaacgaggcgcaggacaccctccgccttcaatacgggagctgggaggcggagctagggaagaagctcgacgccgcccagggggtgcttgacgctgccgctgcccgagaacagcgggcggtggagaccgaagcggcgtcccggcggcgcgaagagaccctcgaggcgcgcgccatggcgctggaagagcgcgcctgtgtcgtggagagggatctggcggaccgcgaggccgctgtcaccatccgggaagcgacactggcagcgcacgaggctgcctgcgccgaagaagagctcgcgctccgcctccgcgaggacgcgctcaccgagcgggagcgagctcttgagggggccgaggccgcggcacaacagctggcggacagcctgtccctccgcgaggcagcgcaggaggagcaggcgcgccgcaatctggaaggtgcccgcgccgagagggccacactgaaccaacgggccgctgagctcgaggcgcgggcgaaggagctggacgcgagggcgcgcagcggcggggcggccgcgggcgaaagcgacttaaccgcccgcctcgcagctgccgaacacaccatcgccgatttgcagggcgcactagactcgtccgccggggaggtcgaggccctccgcttggcaggcgaggtagggcccggcatgcttcgggacgctgtctcccgtctagaccgcgccggccggcaagtgggcctctggggcgggcggactgcgaagtacgccgccaaccaggggggcctcgcccagcgcctctcggagatagccgggactctccaacggctccccgaggagctcgagaggacgattaagtcatcctcgagggacctcgcccgcggagcggtggagctcgtactggcgagttaccaagccagggatcccgatttctccccatggacggcgctggacgagttccctcccgggaccgaggatggtgcgcgcgcgcaggtccgggacgccgccgaccatatcgtccacagcttcgagggttcggcccctcggctcgcgttcgccctcaactccgacgaggaggacgatgacggcagagtcggcgacagtggcgacgaggctggcgacccgggtgcatcggggtgagcccccaggcccccgccaatctttaaatagtttcttcttttcttcttccgaggccttcgggcctcttttttgtatagatcaacttaatctgtaatcaaaaatgaagaaatttttgtgttaatttcatcttgctatgtgtatgagatgaggatgatctgtgccgtggtccttttgtgtcttagcttgaataagggctcgtgcccaggttctggtcctcaaaaggcgcgggtcggggcttgtcacgcccagaaattcccgaatagaattccaagcagaatgtgcattaaaatccccgtccaggaccagccggggtacacaaacgacaatgttgacattcagatccacgtcttacaaacatcataaaagtcttacaaaaatgcagcggaaaacaaaagaaactggagctaagccttgactaaactacagcgggaacaccactccacaggcatcctcgacggcacggacgaagcctactcctcggggaaaccttcatctgacacatacccgtcctctggggttgggaaaagtagagcaagactgagtagtacccactgtactcagcaagtcataccggaataggggtatgatgcagggaa

SEQ ID NO: 6679 - DNA, 827 bp, Oryza sativa
gagggggcatggaattttgcaggcggcccccttgccgccctgggggagggcgatttttgcctcccccctataaagcccagcccctcccctgtgaaatttcattatattcactaaaaatccaaaaaaacgaaagagagagagaggggagggcagcagaaggggagcggcgaagccctgctggttcgctcacttcatcacaggtatgctcccatacatcttttgcatttgtactaatatattacgtttgagtacatatgttgcgttttagttttagttccatatattttagcagatctgtagcacacagcacatatgtgtagatccagagcatagaatataatagtatgaattgagacatagacagtagtgttaattgtaagatgtagtttagtttgatctggagaatgtaacctacttttagaaatttagagaacaatattgtagagaatgtaacttagggcgtagtacagaaatgcgaggttaacgcagttattgttttcatcaggcacaatgtcaagtaaggtcacatttcagatagttcacggtgaaggaaatattagatttggtccagatggtgttgatctgtcagattttgtaatgacatctaagggcatcgataggcctgcggagagaacatttgagtcaatttatagttggttgttgagaggatttagaatagaccaagaagtctacacaatgtcagtatctgttgtagtgagtcgtgcaatagaaggttatttttgggaactaatgccgatggacagcactgctgcttggagacggtatgtggaaatggcttttgaacggtcatggcccctcgttatatc

SEQ ID NO: 6680 - DNA, 4814 bp, Oryza sativa
ccggatgcctcaccgatgacggcatcccgtatgacccgtcagaggtgacggtcatcagtgaccatttcgattgcccgtcacaggtatcccgtcagagatgtgaggatctggtgtagtggttcaacatgcaatatctctgaagatgcttagttgagtgtgtggtgggctctgcttcaatacgcaccatgttttttgcattttggatggatgtccttgtcagcctacacgatcaggagtcaaacaaaagcgctaagaacctaagacccttctttttcagactttaaaactgaagaccgagactaaacaactcgtatagtttaacggattatagtggattgtttatacatgagaacaatagttttatagtattcaaattcaattgtgacacaatttggatctatagtctgctatctgcaagagattacatttcacaatctagcttattcctaggtttttctgctaggcccgttttttttctagtgttctacatcttccttccacgacaccaccattttttctcatcctaaatagctagctgtaaattaaaccgtcgtcaaaacatgaaaaatgaaaaaaaaacctagccgattttgttgtgcaattagttgcacaaaactacttgatctacaactttttttaaaaaatggaattatatcagttgaagaaactaagttcaattttacaaattattaacgcaactgtgtagttcttatatataaaaaaaaataaacaccagtttaatatttatatatttgatcaattaatctacaccattacaatttattacagttaagtcagttctcttaagttatttactcattcctttggttttgtacttggttatacattcctgcacgaatgttcgtaacccatgacgtacgtttttggagaatagtcatgtgttatgcatgatcttcattctagcaaataaactatatattcatttgtgacgactggcctgcaggtttcttggacgaacctcatatagatagagtcaaagatatatctgggactatatggcattagagaagagagtaaatgttgcttgctaatgtcgatatttgccgtgctgtccaagtttaattattttaattgtttgtttttgtgtaatgtgtcaaactaatgggtccctctcgggagatcttttctccctgcaggtaccaagttcaattgggtgaattccacacaattgcaatccattttcttaggaaacatgttgatggaagacacacatgtctcgtgtggtagcttcctctgctctgctacgtactgattgattctttcgttgattttgacgtgagcatgaattttccttgcatgattcgagcagtctcattgcttagtctgcttaagtagctagattaattctgagaagcagctggtgagtatccagttaaccagaatttgggatagctattgaggcttgaatctatattaattagcagtgaatttctaaaacctatatggtcattttaagctagcacgtggttttgtcactaacttatactaccttcatttaagagaaaattgcctttatgggtgtgtttgattgcctacattgatcttgacgtgtatgtgcgagtgcaggtgagtggtgtttggttgtttgcacatttgtccaatctagaccgaactcgtgcgaaaggcaccttggaaccaaacccaaagagaatacatgtttcaacctttgctacctagccaggcccgacgcgtgcaggcgtggtgcaacagtgcgagcgtgagggtaggcacggatgcaggggtgtgggttgactcatccccccaccccattcgtctcacagaagtgcgaggaactcgaccttgcaaagggtgatgagaaaagctcgacgttgtctccaatccacttgccggatcgccatcatatctcatccaaccagatttggcttgggatggtagctatgagcacgctgtcactatatctggcctgcacgagcttactatcatcgtcctcttcttgttgtcgcctctactgttatgccccaacatcatctcttcctcctccttgtttagccggatctggtagcaaggtgtatgaggccactagatctgccatcttggttgccaaattcgaccactccggtgatgacaagcaacaatgacataggagcgcgagcgagatagagaagggcggagagcgagagtaatgggcctagaggagcgacgaacggcaagggagagtgggagttgttgtcggtagaggaagtggggaacgacaggtggcagaaaagttgggaatggctgacaatgcagtggctcatcgttttgttttttctttcttttcttttttcacctgtttgttgtaaaaagggtcaaacacatattttatttttttagacaaagaatgctacaatgatttcacacatatattattttttatatgtaataacttgtttacatctactaattgattaaatctcttttttttatgatatgatattatataggtaaccttatccaactttaaattttaaccacacttaaattcaaacaaccaatcaaacaaaatcagttcccaactggattactcatagaagcaattagataaaatctgatactatcttaggctaattaaattagtgcaaataaccaaatagttgtctatatgtgtacctctctagccaaaccaaattcaacctaaaggagagacgagcatgctagagagataccagtatacaaaacatacacttatttataggacaaaagtttaaaatttaatgacatgggcttacttgaaaaaggagggattggagtaactatcaagggaaaattcaacgtagtactttctgatgccactgcacagaatggaaaaaatgcagtacctttgcatcgatttaccacatgtggttcaattcactatttccatttgattgattccggaaataaatgcaaatgcattttcttccaaattgtactgcttttacacgcgcacgtgcgtcgtactgctagagtacgtgccggttaccatcagtacccacgaaccaatatatgcgcacaaagaaaaatgcaggaaaaaagcacttgtaaaaatgtcaattaagcagaaaatctcatgcatgacgtggcaattcctgcacatacattatccatccctacagggcacagtatactccacatcactagtactatactactatgtactatactagtagtaatatttatccagaaattaattaataattaatcatgttaaccaattctacatattcaacctcgtgctttgacttgctagctagtcctcgggcttcaggcatctgtcaggattaggtgaagattaccacaaaatgaatcaattaattagggtgttttagatgttgccatgaagctaacagagtgtgatattctccacagaggccactgctcggccgagccaggacaaattccggtgagaaaaaaccaataatgcacactgctggacaacggcgacgtgtacccttggcacgtgcaatctctcactgtcattttggtagtttatgcatgaccggcacaaggcccaatgttaagcttcatatgtgcactaaattacatgttgtatctaatgatcgatcattgggttcagattttgggaaatcgagacagaatgattgtttgatcgacgccggcacatgtgtagatatggttgttaacaaggggattaattaacggaagctagtgtatgtgatcagtcaatcattggcaagattagtccagatatgtttagcttaggccctgtttagattaattggcaaaaattttcactctgtcacatcgaatgtttaaacgcatacatgaaatattaaatataaacgaaaaaaataactaattacacagattacgtgtaaattacgagacgaatattttataaatctaactgctgcatgatctgacaatgtggtgctacagtaaatatttgttaataacggattaattaggcttaataaattcgtctagcagtttacaggcggattctgtaatttggtttgttattagtctatgtttaatactttaaaagtgtatccgtatatccgatgtgacacgccaaaactttacccccttatctaaatacagccttaattaagccttaattaggtagtaactaatgagtatatctgtggtggaataaagtttgcttgttgcgttgccgtcgtcgcaatcagcggcacatgctgcaggggggagaagacgccatggagggacagcaaggccaccatgcgttttgtgcagatgcagccatggagaggtgatcgtgtttcgattctcgtatcgatcatttttgccaatttgccatggccggattacggcggcggctcagctttgggcagcacaaaagcagctaggtgacacggtagaggtcaagagatggtgagcagactgtttttttttcttcacttctattccaactcacctttttcgttttctgggtatacgttttctaaatttctaaacgagtatgttttttagcaaaaaaattctatagaaaaattactttaaaaattatattaatctatcttttattttttaaattaatatttaattaatctcgctctaatcgtttgatttatttttcgcgtcaggaggcaagtttgggcgatgcttttatggctgcaatgacggctcggcccatatgctcgattgctgcggcatgtggcccaggcgccgcggcccgtgcatgatcggggcacacccaaagcgttttcagttgttaggatgtgtttggatgaattttttttatttataattttttgtattaaaagttttacaaaaataattttccattttgaaaattgacggaaatagtcgcctaccgccctctggga

SEQ ID NO: 6681 - DNA, 5805 bp, Oryza sativa
cgccgccggtgaggttgttctcggcgacgttgaactgcgtgaacctcgcgatgcccggccatagctcgccagtgaagttgttggtgctgaggtcgatgtactcgagcttggggcagccgtcgaagaggccggtgatgtcgccggtgaagccgttgccggagacgttgagcacggcgaggtcgccgcacgccgccgggacgaagctcgccgcggcgccgcccacgaaccggttcccggacacgtcgagcgtgcgcagcttggtcaggccggagacgtcgagccccccggcgatgaggttgtgcgacaggttgaggtgcacgaggccgcggcattgggcgaggtcgccggcggggagctcgccgccgatgccgttgtcggagaggtcgagccacgtgagcgccgtgagccgggagaagttgccgaacgcggcgccgctgatggccgagccggagaggtcgagcgccgtgacgcggccgcgcccgtcgcaggtcacgccggcccaccggcacggcgacgcgtcggactccggccaccggtcatactccccccggttgaacctgttgttcgcctgaagaaacctcttcagctcgacgagcacctccctgtcgtcgtcgctggctaccaccgccacctgacctacaaaaaattcaccaaaattcggtcaaattccgcgcaaaaccgagcaaaccaaaccaaaccaaaccaagaacagagagctacctgcgaagaggagtaagcagaggaatccaagaagcaggggagacatggcacgccttcgagaatcatggaagaacaaggggagctacgacgaggacgaggcgggaggacgaatcctcatgtgctagctgcgtctccgcctcagctaccgctgctactccgtctcgccaattccagtggcaagatagaaagaagaaagtgagagggacgaactgacgaagtgagatgagagtttagaaaaaaaaggataaagtttttgagtgctaaaccggaggttatttaaggcctaataagcgacatgtgactgcgttgaattgaaccgggtaaggtaatggccgtcgctgtttcatacaagtagtattcctctcttcttctttttttcttttctcggtttttaattggggtttcaaacttcgccactgctgctgaccacacgggggacacagggtgatggaccgactgacgatggctcgttggttatggcctctgaattttcttcctctcctttatagtacaacttgtactattttccttccctcacaaaactgatgaaatttcgtaaaaatcgaccggcttttatgaatctgtcagatatgaaaaaccaattgccggttttcgtatgacattgatcaaaatttatcggtttttacggtttttgattggatttcagtaaactaatgaggagcggcttttactttgatatcgaaaagttagggccggtttgatttgaggcctaaattaggcttaccaatatttggtaattttaatagtgtttagtgtctatttgttttgaagccaaattttggcatgcctaagaaaataggacatttcaatagtaaacttaggctattttggcttcaatccaaacacaattttaccttatcaaaattagtaatgccaaaatttggcattaacaaaatttggtaagacctatctagaccataaaccaaaccaacccttaaacccttgctactacctttctgctcaatgtatgagctgcgagtataactgcgattagtaacgtaccaatcgacacgtctgaaactaattcccgattaatcacgggtttttttcctatggtttagaagttaatctcgtgggtctctcttgcttgttggaagaagagggaaggaaagccgccgttgttgacgacgagcgactcggcctggtcgggtcgggtcagtccaccaccgtgccggggaggagaagggcgcgggcgcggacacacgcacgcgcgcgcgtgatcgatcgcggatgcgtgcgggcgaccaggcgtgcggcccatgcatgcgctgaccagaacacgaacagcacgcggccttcggatttttggaattttccaggcggaggaggggctcgcggtcgggcggagtaaactgtaactgcaagtggggtggggagcgcgataccaccgcgacgatgcgtgatccggcatgagtgagtgaccggcgaccggcgatggcgaagggggcggatgggcgcgccgcgcggtggtcggggtggcgctgttgcttacgctgaactagtttcagtcgtatcctatctagggtttacgattccaagatggctgtctatttcgggctatggcgaaataatggttttagcgaaaaccggtagaaagccgatatattctgaacaaatttcacaaaccaaattttgaatacagattccttaagtttaccgataagctcgcgaaaactcgtcggctttggcaaaattccgagggaaatcattgaaatttcaattgtagctagaaaaagaggtaaactgaaattgttttccttttttaattcgttattattttctttactactgtaaatctcagtaaatacacagaatacatcaattttatcaaaaatttatatcccaataggttctatgaatatcgtactattttataagattttattttccttttttatccattcaaatttgaatttggatgaaactcatcgaaatctcagacggcttctactttcgagcctcgtcgaaacctcaaaatttcacagaattcgaccggttttcgtcggaattgtgaaccttaatcccatcctacacccaggataacttattttggaatagagaaagtagttacgattcgacttatctcatcatttgccctataataaataagccgatgttaagatttaaattttaaattatgttgtttattttaaaacattaacatttaatcactaaaaatacaacatgtatataaaatttttagtctaattattcttttttaaataaaccgtttaatatataaccagcctttggcctactaataggattctatgtgtccgcggacattattttttaaaatatttaggtccttgtcatatgttcattcgcttataggctacaactaaaatttaaaattttgaaatgtaattttagtcctacagttcatttgacagtttttaatcatataatttatttttcagctttggtttttatattgctaatgatataaatataatattttacactcaatcatttttgttgcttcattcatttcaaattttggttgctttattcatttatccatgacgtatgagtggtactaaaactgattagagatcctgtcgggtatttaggaggtctgaaattatcgagttattcgaggttgagtaatacgattattcttaatcaatgcatgtacttgtatatggaggtgaatgctagttgcttttgggttttagaaagggtaggggttcgaatccgaatcgaactcggaattattacaatccagcccaaggcaggggatgctgtacaaagatttttgcacttctagcgttatctgaaaaaggaactttgcacaaaacgtaaagcataaaagaaattgagaagatggagacctacgtgcatagcaactttagcaagatagatgcttccaagtccaagctcgagctaccatttcaagagatatgctcgatgggattctggtttgagtattgaaattctgtctaaccatctatatatgcacatagaatgcacaaagaaattatgtataaccatctatatacagggctgtgttctttagcctaaggtcccaactcatctccatcgtttttcgtgcgcacactttttaaattgcttaactttttttaaaaaatatttatataggaaagttgttttttaaaaatcatattaatctatttttaagtttttttaagttaacacttaattaatcatatattaatccatcgttttattttgtgtgggtaggggaggtcccacccctccaaaaaaaaaaaaaaacacagccgcaatcatgccctttatattattagcctaaagttcagcacacaaggcctagccttttaattaacctcatcatatatgcatgacatacatcaaacaccaatatataggataaatttatggtgggaacttaacctatgtgaaaactcatgtaagccacacccgaaaagccatctaaaaaaatcccacatgaagctaaaatgatgatgaatagaccgtgtaaagaatctttgcgggatataaaaacaaatttcgaaccagaaaacagtgtccaatcctttgtctgaaatttgtcatttttatctcacaattgaagttgaatttaggcaagatttttcacacaacaattcatcgtcatctatctacatatgagatttttttttgtgattttagatgactttgtggtgtggtttacacgagttttcacctaagttcaaaatcttcacttcttggcgtgacaaagcttgcaatcccttaaatcttttctttttgcagggacaatatctcagatatgttcaaacatatacttgagtataaacgcaatttgcttggttcactacagcagaacaagttagcagtgacgggctcaaactctcatctgtgacggatacaccccctcgtcacagatcagtggtcactgatgactcaagtcatctttgacgggtggaggtccgtcagaggtgtcattcccctctgacgagttgtatcatgtgacccgtcacatatgagaaaaatcaccccaaaaaaaaaagcaaaaaagagccacaaccacagctcaacacccgtcactgatgtagattccgatgaaaaaaaacaaaaaaaaagtatttctgggtagttgccatcgcattcatcacacacaaaaatctagaacatttcatcacagataaaagtctttatgaacatatcacacataaaacagccatggcaagcaagcaattcatcaaacacctgacgagcaacaaaaaaaaaacgaaggtgcccttcttcttctctccttccttgtctttctcgatcaatgccttcacaagaggaataatctgcaaggcaaaaccaaatcgaatcagatcaaattcaccagaataaccacgagagagatggatgcagaaatcagatctgggttcaaatcacaagttgagatcgaatcataccacgatgggcttgaactccttggcatgctggaccttcttgagctcggtctggaggcgacctcgtccccattgctgctcgacgccgccctcttcgccttctgcacccgggaagcggcgtacgggcggatctgcacccggcagttggggacgcagccggcggacggaggagacgacgcccggcagttgaggacgacggatccggcgccaggcggacggggattgaggccgcggcgccgccgctcacctcctcctcgcggtcgaggatgcaggccgccgaactgccgctcgccgttggaaccacctcgctgcaagaaaaaccggatcgggaagggggaggaggggagaaagaagggggaggaggatgggggtaccgccgccgcaccacctcgccgccgccacgcatcgctgagccaccgcccagcgtcgccgctgccacgcgccgccgcaccacctcgccgcttcgccaccgcaccgccgccgccgccacgcaccgctgagccgcagcccggcgccacgtgtcgccgaaccagagccgccgcccagcgccaccgccgccgccgcgcatcgccaaaccaccgccgccgcctcgcccgagctagggccgtcgggtcctccgccgccgccgcaagtcgtgagagggagagagagagagagagagtgaggataagggaga

SEQ ID NO: 6682 - DNA, 13308 bp, Oryza sativa
tgcactgcactgtatttcgtgcggcgtgacacgtttagccgagccgcaataaatgcggttaggtgagccccgctgtgctcacctaacccatacacgcggagtagaacccgcgaggggtcggggcgcctcggccctcgggggcgaggcaggagtggtccgaccccccctcggggagaccaagaggtgggcgcacacatcaccctcgggcccgacgtcccccgagggtgccaggccacgtgggcgattgtgtctgcctcaagcctctagtcgtgatactcccggtcccatgtcaccgacaatatatatatatatatatatatatatatatatatatatatatatatatatatatatatatatatattgtaagttacttttgtcatatatgtgatttaagctctttaataacttatatattttaaatcacgtattgtttttggatctatttgcgtcattatgctctacataaaatatgtgacaatgcaatatccatattggatatatattcaaatattttattaatttaaaagtcatgtatttaaattgcagagtaatttagctatacaatagaagtaacttagctatataatagaagtaacttagctatgcaatagaaataagtttctgtagtagaagtaattatatgcaacagaagtaatttagttatgtaatagaagtacttctaactctctgtagtataaataataatttacataaatcataaaagtaacttagcataaaatgcaagtaaattgttacaagtaaattcgttgtaggaaagaaaatatggtctatcgaaaaattaaatttaaagtccacaaattacagaattgactaaaaacaataatacaaataatcaatttagagcattatgaatgtataagaagtaacttagtcaaatataaaagtaatatatatatatatatatatatatatatatatatatatatatatatatatatatatgataaaagtaacttacgtatataataaaagtaatttacaaacataaatattttttcgtcgcaatataatcatgtaagatcttgttgtaaagatttaattgtaacgaacacaatggtgtaatcggattgtatatcggataagtaattttagagaaaattttataagaagggtaaaaagaaatgcatatctatatagatgtgtaggcgtttgtctgctgtcttccgttcagatgtgtaggctttctctgctatgtacgtaagctttctataccgtctccgttaagactaaacagagaggcaaacactgatattttacaaagtatatctgtggattatatgagccattaatatattgttattgcgcatgtataggagacatggaatattgcgtggagttgaccagtatgtcggcactttgttggcgtgtagcaaatgtcatgatgcaaaaattctatgggcgccataggttttcctgtggtggaacgagttgacgtgagtttaaattctagattagtactgttgctcgtatttacggtttttttttcataaataaccgatgtactctttaacaataagataagacctttgtcaatctcgagttatacactttcggtgagttcgtcaattataatatatacaccttcatcaatctcaagatgcatgtgctggctcagtattcatataagtaggggtgtgcaacatattcatgtgtatcaatctctcaatatgcatgtcggctcagtctttaaatgtgctcatatgggtaaaggtgtgtgatacgttcatgtgtatcaatctcgatatgcatgtgccggctcagtctttatatgtgtttataggggtagggatgtgtgtgcatatttatagaggtgactgcgtatgtgtatatataagcgtctacgtttgtgtcttgtaaaagaaaaaaaaatttaaaatcaaaagtaaggtagaggcacgtgagaaaatgttttttttcttgactatagacgtttttatttgtcattttgtgtttagatgattctgttaatccctacgtgtaaataatattcttctagttacttttagcagggctacgtgtaaacaatattcttctagctacacggctgagctactttcttattatttgtagacacgctttctaaactgttaaacattatattttcgtgaagaacatgtgtccagttcagcgggaacgtgccagttacatggttacgggacgagttggatgcagataccacaagcaaacaagaggtggcagttacagtctcggtaacatggaaagtcaaatgcaagtaaatacttcatccattttatattataagtcgttttgattttagtcaaagtcaagcagtttcaaatttaatcaaatttgtagagaaactagtaaaaatttcaatccaaaacaaatacatttatgaaaatatattcaattatatatttataatgaaactaatttgataatattactatatttttctataaacttgaaatggtttgactttgactaaagttaaaacgacttataatttgatacaaatgaagtaataaggattggattaagtcaagtatagccttctataacttgtgttaaagcttaaatgtgaggcacaaatatgtgactgttgtgtgtttcgttgctagttgctacaaacctgcaaacacacctcttatttgtttataaattcaaaaagacaatgtaagctaatgtgcatgcagttcaagattgacataatacctcctttgattggagtagatagctttgcaagccggtggttgcatattagctagggaaggaccaaattagagcgcaagaaactgcactccatcgttttggttactgggatgatccacaaaaatgtaagaccagtgtctttcgtgggatgacatatacggcacaaagagctaacaaagacaataacaatgatgaaggagctatgaatttgattgtatgtaaggatctagactaatagctaaaaaatgttctattttaggaggtagtataatatagcggttatccggctcatgcgagctagctagcctatgatattatatatgagtctaagctgagctatgtgatttatgggtccgagttttttttctcaatccatggttgtacgatgtttttgtgagcctcttaagttctacggcgtaattagctttggccaacaatttatttaccgtgttttatttatattatctatggtggtgtttgaatctcctgaaaataaagacgaagataaagattaagtgtttcatgcaaaaatgaattggtaataacgtgtgattaattgagttttaattattacaaacttaaaaaatagattaatacgatattttagagcaattttcatatagaaagtattcccataaaacgcaccgtttagccgtttgaaaaatatgtcactgagtatccaaaattttatctctgctagtagaggaaacgaacagggctcacattaaagaagaatgttgctaagcaaaatgcaagtactcagccaacaacccacttgctaaccaaaacctcgatatctatcacatgaactaaacatggcacttgcaggagcatcaacaacaacccacctgacacctacacttaaccctaacctgaaacgcaacgaactgcaagttagtaccactccacgtgaccgcgcgcccatctagcacgtcaaaaacgctcgcgacgcgcagtagaaaagccacccccacccggtcggagtcggaaaccgaccgagcccaacgcaccgcaccgcaccggccaaccagtccacggactcgcgagcccaaaccgctcagccgccgatggcgacgccgccgccgccgccggcgccgacgccggaggtgttcgacgtcgtcatcttcggggcttcggggttcaccggaaggtacgtcatccgcgaggcgctcaagttcctgcccccgtcgtcgtccccgctccgctcgctcgcgctcgccggccgcagccgcgaccgtgtcgccgccgcgctccgctgggcggcggggcccgggggggcggcgcccgacctgccgatcctcgtcgcggacgcctccgacccggcgtccctcgccgcgctcgcggcgcgggcgcgcgtcgtgctgtcctgcgcgggccccttccgcctccacggcaggcaggtcgcggcggcctgcgccgccgcgggggccgactgcctcgacatctccggggagcccgagttcatggagcgcgtcgaggcggagttccacgaggccgccgccaagaacgggtcgctgatcatctcggcctgcgggtttgactccatccccgcggagctcgggttcttgttccactccaggcagtgggcgccgccgtccgtgccggtgactgtgcaggcgtacctgagcctggagtcggacaagaggatcgtcgggaacttcgggacgtacgagtcggccgtgctcggtgtggccaacgccggtgaacttcaggcgctgcgccggtcgcggccaaggcgacccaggcccaatgtgagctaccgacttctctcagtttgtgaattgatttacgagttctatcaaatgctaattcaatcatctataaagttgctaattcgatcattcaatggcgtggtagttgataagggaactaaggctacctcaccgaaacaacatttgcatacagttagaacttagaaggatgattcgtcccctaattggatatgctgctcagtgttgataaccttctagttttattggtccattgtgaaatttcttttgttattggtgtcattgacttattgtgaatggttgtgatttcctttgtgctgttttctagtttgcccgaggatgaaattttccctgttttgatatagaatacatcctaagtcccaaatgctccaaacattgtttgacaaaatgatgattggtaatgacaattggttaagagcaaacttattgtccttatgataaaattgagaatttggtttttgtcgatcaatgtttatttcatgctgaatagagtttttcttttgaagggaaaacaacacgagattgtgccttttcattgaatatagcaggaaaaaataaaacccctaggggtatgctgaatagagttttgtactggagcagtacaattttattttccaaacgaggaatagactcttaatataagtataagatggttgaaggttacagaatagatacaatgaagaagggcgatccacatatttcgactgctattaagacgatatacaccactactgatgtctgtgaaacatgctgtgtgggcgccctttaattaactcagtatcattctttccctttttaatttgtccacaaaagatctatatgtcctactctaaccatcacctttgtttcaagtggtctgttgttggtacttggtacaatcacatgccaagcaaactctgccacttaatccactattctatcaagttgttgccatattatgcaccatctttgagctaatgaataacttttcaccttttttagaaaaaaagtctcggtactgtcatactggtgacatgtaaactaaatgactggtaccgtgccttttgtgtgaatgtgacgctaatccatgaggaataggttctcttgtttctttgtgcatcatattgacatttgctagttctttatgtgtcttacatgtctatatgagtactccacacttccccttgatgtccttgataatgattaattgcttccctctccaagttgttagtattgtgttcttagggcctgctattttcttccgctctattaatacatgagtcaagacagagcctcttttctttcacagggcctgttatcctttgattaagatcagagtgatgtattaacctacacgcctaattttaccacaacaccaaggctcttaagtatcactgcgctattttcacatagaaatagttaaaatcctacttaatcatgaaaactagcatggctagccgcgcagattgcgcggctagcatcattatattttctctcgtataatagcatatatgttttctcaatgtattattcaaatatattaaaataacaacataattttaaattttgtgctaacttacgaatctactaatgtgtaaattcatattgcattttatatacgtgttatttattaattatatttaatatcaaattttagttatttgtaaattatattcctatatggactctagactcgtctttcaatattattttaattccgaattttcgttatctgtaaattgtatttctatatagaatctaggctgttcttccaatattatttatttttaattctgaatatttctattatttcgatgtggactctaaactcatctatcaatattctttaattttaaattttgaatttcagttacttctaaattgtattcttatattgactttagactcttcttcccatgtttttttaattttgaattttagttatttgtaaattgtactatttttatatgaactgtaaactctactttcaattttattatgtttatttcgaattttagttagtttaaaattcctatatggactatatactccacttctaatattccttatttttaattccgaatttctattatttcttagttgtatttctatatggactttatactctacttctaacaatccttatttttaattccgaatttctattatttcttagttgtatttttatatgtactctatgctctacttctaatattccttatttttaattccgaatttctattatttcttagttgtatttttatatgtactctatgctctacttctaatattccttatttttaattccgaatttctattatttcttagttgtatttctatatggactctatactctacttctaatattccttatttttaattccgaatttctattatttctgaattgtatttctatatggactctagtctcctcttccaatattccttattttttaattccgaatttcaactatttctaaattgtatttctatatggactctgtttttctttttctccgattaatgtgggaatttctaagccgtgagagcgaacgtggaggcttctttttctattcctttaataagttaatagatagatcttgttaaatggcaggctactgccaaaatatgaagagagcaacaggagttaggaaagcaatagctacatgaatttatgatgtaaagttgactttaatgtgttttttcattttagttattgacctattgcaatagaagtaagagggtgaggaagggaaaaatctcaatgtagaggaactaaataaggaatttgattccacagtctgttctgaatgaatatccaactaactgttgcaggaatcttactcattacaacttatgagttgcaaatttgagaattgcaaaattttgaagagcatcttgtaagatgtttcttactacttaccctattgaaggactgaagcatggaaacacttttcatgttgttattgttgttgtttctgctgctgcttaaactaaaacccttaaattcattgcatgcgatggtgcctattgggtgaaattatgatagaaaccaaactattttctttggagataataatcacatttgatgctaacgcttattgctttcgacagattccaggccctccacctcccaaaggatctctggttgaacatgacaaggcactgggattgtggactataaagttaccttctgcagacacagtggttgtgaagagaaccctatcaacagtgacacagcatcctgagggccttcctggggtggaagaatccacggatttcgctgagcataggaagagcttctggtcttctgttaaaccagcgcatttcggagtgaagctcacctccaaatccttgctgggcattgcgcagttcatcttcactggactctgcatcggcctgctgggaggtttctcctttggcaggtccctcctactaaaattcccctcattcttctccgctggttggttcaggaagagcggaccgacggaggaacaggtgagcagcgcctcgttcaagatgtggttcgtcgggcgtggctacagcgacgcggctcgtgcatcggaccgcgggagcaagcctgacaaggagatcatcacgagggtttcgggaccagagatcggctacatcacaaccccgatcgtcctggtccaatgcgccctcgtcctgctgagccagcgagggaacctacctaagggcggggtgtacacaccgggtgccgttttcggccctaccgatatccagcagcgcctccaggagaatggcctgtcgttcgaccttgtctcaactaggacactgtgatcagaacttcagaagctgagcatctaccggtttgttcctgaacctgttgcccttttcctggaacctgcctcttgttgctaccttacactgaagaaacgtactgtagtagtctcttgctacgtgtgttgtgtttgtgtgaagtaacagtgtgtttctacatgtcgaaactcgaaactatgtgttgtccttgtgtgtagtacaagttgttatactgttccatctgaaatgaaaatgacgttcctgtgtaatgagaatcatctgggttccacgagtgtagcgtagatggttgttggcctgtgaaagcaagggcattgtcttgtctacgacatttaaatttaatttagggtgtgtttagttcacgctaaaattgaaagtttggttgaaattgaaatgatgtgatggaaaagttagaagtttgtgtgtgtaggaaagttttgatatgatggaaaagttggaagtacggagaaaaagtttggaactaaactcggccttattatggtatgattttgctgctatatatatacagtagtatatagaaaattaagttaaatattagttttttaagagttaatgttttttttgagaaaaaggtactcacgaagcgtgcatattcatcctctataaatgcgcacacgcacatcctatccctagaagtatctttgacagattgaatcgacatcttgctgtcgacgatatatctaaggaaatgattagccgtaaatacaagcaacagtgttaagtttagagtgttccactgtaaagaacctgatcagtcttaacttttcttgaaacattaaatttgatggtgccttattccgtggaacagtgaaaatactaacattggggccgtagcaatgttgtctcgtactctcgtgcattctgtatcctatttttctcaaagaaagtcgctgtgcaattcgggcaaaatttatccatcggtgatgtgccagaagcttccgtgccggttggagccacacggccacgcacgcatgggcgcgcgcgcacacgtgcgaaagccgcagcagctgctgctcctgcttcgcgtcgtcgccgtcgccgtcgtccctcccacaggttcctcgttcaaagccacgacttttgcttattctccccgtgggcccccgcgacgaccgaccgaccagcggcggccgctttcgtggaccggacaaaaggaaacgaagcccatgccgaaacggcaaatccaatccaaaatcatctcgtgaaaactttcaaattactcatacagcaaattcaaatcccgatgtttcaaataggattaatgttttttttcgcgaacgtgtaaaaaaaattatatgtcaatatattaaaagaaaagagcgtttgatacgcaccgcaatccgtcagaccgacttatgccaaaaaaataaagaaaaaatgagaaaaaaaacgagaaaaagaaagaaactactacggtggctaaacgcaacttaaaaaatagggagggacagagccccactaccctcttaagaagaccctaaaatagcaacaccagctaacaatcaaatggccctcgtagatgattaatctgcaaaccggcaagattactccggggatccgggcgagcgcgttcgaacgcgaattcgagagggaaattgggtgggaataatgatggattaccagtacgcgtttcttctcttttcttcttgtctcccatttggtttcgcgtgcacgcctcctgcagatggatggatggagtagtgctccatacggatttcattcgatagcaggcagcggcagcagcatcttgcctggactggaccgtgtgctttccatgagagctttctgttcgaacacctttgtccccctcctccccgttgcatggagtatgcgtgcaaagtggtgtgtgtgctggtgatggcccaaaaaacgttcgatccctttggctgtctcgtctttgaccatctcgctttctcagtgcgatgcatcatgactagtgagaggggaagagtgtgcgtgtgtgcgtgcatagagacgtcacggtccaagaaagcgagcgtgaaaccaaagcgaaataggcgttctgatggtggttgcaattgcgatgcatgggaacgttttctcgagggatcataatccatcttctacgtgagggtaatatagtagaagaatattgggatggtgagggtagtatagtagaagaatattgggatggtggtttgtaattgaatgcgagagaatgtcctctcgagtgatcggaatctgtcttccgcatgaggtggtgtgggagaagaacacaacgggagaaaaaaaagattgttgtgcttgaactattgaatgcatttacattgtgggggagaatgtgatggatacaaccaaaatttgcttctcttttgatgatcctacttgtgttattcacatcaagaattggggctaaaattaaagggaaaaaaaagagattttggaaacaaaattttgtacgaagaaaaaaagaagaattgtttgttggtgagatttttttatctacacctacgttgactatgtgagcttgtttgcttactcgccgccgccgccggacccggcgatgtcgagtaaggcggcgagcacgtccggcatgtccggccgctcctgcggcgagtcggcggtgcaccgcatgccgagcatgagcatgtcccagagcaccgcgccgctcgacgccgccgcctccctcgccggccacccctcctgggccatcctccggctccactcgaccaggcactcctcctcgccgccgtcgacggcgcgccgccccgtggcgagctccatgagcagcacgccgtagctgtacacgtcgcccttggtcgtggcgcgccacgtctgcccgtactccggcgccacgtaccccaccgtgccggccaccatcgtgctgacgtgggtgtcgccggggcggaccaccctggccagcccgaagtccgtcaccttgacgccgccgtcgcggccgaggagcacgttgctggccttcacgtcgcggtgcaccacggcggggcggcactcgtggtgcaggaacaccagcgcgcgcgccacgccgatggccgcgtccagccgccgccgccgcccgaacgcggcgtggtcgccgatgagggactccaggttgccgccgtcgaggtactcgtagaccaggatcttggccgagccggcgaggcaccagccgtaaagcgtgaccaggttcgggtgcggccacgtgaaccccatccggtcggcgagcacctccatctcggcgcggaactcgcgctcgccgctgtcctcgccgccgccgccgccgccgcagtcgcggagcctcgcgagcttcttgaccgccacgtcgcggccgtcggggagcacgccgcggtacaccacgccgtagccgccacgcccgaccacgcggtcgtcggagaagccgctggtcgccgccacgatgtcgcggtacgtgaacgccgtcttgtcgagcctgaacaccttcaccccctccgacgacgacgagcaacccgtcacgcacgacgacgagcacccggacggcggcgacgacgtggccgacatatggaacgcgccgcacttgcctccgccgccgccgccgccgccgcacttggggttctcgcaggagagcgactcggggtccgggtcctggtccaccggaaacctcgcccgcaggttggccatgatgaacaccaccgtgccggcgatgaaggcgatgatgagggagaagacgaaccacagcgcgatggttctcggagacatcccgcgccctctaatggcggcctgtggcgctctctgccggcgagggcctcgatcctgcaacgtgatgagggggtcgccgaggaaggagagctcgtcgaaggtcccgagctggccggtggtcgggacgtcgccggagaggagcgggttgtacgacacgttgaacttgttcaggccggtcaggttgccgaggctcgccgggagctcgccggagaagttgttgtacgccaggtcgagtatctcgaggcacaggatgtggccgatctccggcgggatcccgccggagatgctgttgttcgagacgttcagcacgacgagcggcaggtggctgatcgccggcggcagccggcccgtgagctggttgttgtcgaggtggagcaggctgaggttccgcattgcgccgatctgggatggtatctcgccggagagcttgttgccggagagctgcacgtagccggagatcgtgttcgacctcaccggcgacgacgagttggtgcagatcgggatgatcccgtagcccttgaggaggcgatcccatatgctgcggcaattctcccgcgtcatcaccgtgtacacgaagttgaacggcgggtaggtcgccggaatccaccgcctcatggcctggcactcgccggagccggcgagcacgctgacatccttccggttcttctcgaacgtcggcgcggggttcctccctatctctgccatctccggcgggatcctgccggtcaaccggttgtcggccaggttcagccagagcaagctgctgcagttgccgatctccggcggtatctcgccggagagctggttcccggcgagcatcagccagagcagcgacgtgaggttcccgatgctcgccggtatcctgccggtgaggccgttgtacgacaagtccagcgcctggagctcggcgaggcggccgtactccggcgggatcccaccggagaagctattcgccgggagcatcaggtacttgaggctcttcatgtcggccacctcgagggggagctcgccggagaactggttgaagctgaggtcgagccttgcgagcagcggcagccggagcacgccggaggagacgatgccgccggtgtagttgttgtggtgcaacacgaggtacttcaacgtcacgaactcgccgaggatcccctgcatgtcgccgccgaacgcgttggtgctcatgtccaagaactgcagcgacgtgcagttcgtcagctccggcggaatccggcgatcgaatcggttcttaccaaggatcagcgtctcgagtccggcgagctccccgatcccggcggatatcttgccggcgaaaccgttcccccacagcgacaggtacgtcaggttcgagcagcttgcgatggagtccgggaat

SEQ ID NO: 6683 - DNA, 7882 bp, Oryza sativa
  unsure (1)..(7882): unsure at all n locations
aatttcagctacttacatgaacaggcacatgatctggcggatttagaagttcctttcacagaggaagagataaagagagcggttttccagtcaagatcagatagtgccccgggcccagatggtttcacaggtggtttcttcaaaaaatgttgggaaatcattcaacaggatctagtccaggctgtcaacagggccttctcctccccgccagaccgtcttagactaataaactcagcatacatcatcttattacccaaaaaagagaatgccttccgtgtaggtgatttcagaccgataagcctaattcatttcttcgggaaactgctctccaaactactagctaacagattggccccgagactacaacagatggtatcagcaaaccaaagtgcgttcataaaaggcaagaacattcaagacaacttcctctttgtcaacaacatggtaaaagagcttcactcctcgaaaacgccggcgattttgctcaaactagatatagccaaggccttcgactcggtcagttgggcctacctcgtagatcgactaaaagcgctaggctttggtcatagatggattgactggatcatttctatcctggcgagctcttcctccaaggtgattttaaatggcagggcaggactcagcttcatgcatggtaggggccttcgacaaggcgaccccctatctccgatgcttttcattctggcaattgaccccctacaaaaactcctcgccgcggcacaggaagaagacctccttcaacctctacaccgacgaatagcaaggtttaatgtcgccttgtatgctgacgatgcagtggtcttcacacggccagacaaacaggaacttcacacggtgcacagcattctacaacatttcggccaagccacagggatgatcacaaatctaacaaaaagtgaagtctactccattagatgtgagaaccttgatctacaggacatcctagcccctttcccagcacaacaaaagaccttcccctgcacttaccttgggcttcctctgcacatcagaaaactccggaaaatggatgtacaacccttaatagacaggttctcagcgcgactaccaaaatggaaaggaaaattgctaaataagacaggtcgctcagtcctcatcaaatccactctgtcggctctaccaacctatcatctcacggttttccctcttaagaagtgggcagcgaagaaaatggacaagatccgcagaggatttctttggacaggcgccgatcaggctaatggtgggcactgcctagtgaactggaaaaaggtatgcaaaccaaaaaatttgggcggactaggtataactaacttggagttttttaccgatccttgcgtcttaggtggctctggtatgactggaaagcagatgggaaactgaaagttcaagtgccattgatttggttttgatgattaataacaaatccaattatgtgagactaatatttttataagcattttttgcctagtctcatgtggatatganagtggagtgttggtggacctaaatcacaaggatgaaatgcatggagatcaagctatatgtatcactctttctcttcatatacatattgatatgtttgtatataatatttccacgtgattggcatatgcatgtgagactaatgttttgtttgagtattatctcttatttagtctatttacattgagaacgtggagatgatgaaggtatgtttttattttaatatctatatttgagaaatgtcttctattcttgtataggataagctctcaatgtttaatattttgttatgcatactcttgcttcacacaaatattttgtatgcatacatttagggggagcaaatcctatactttagttatgcatgtaattgattaaagttattcaccttcatttaattgggatctttacatttgaacatatatttgagtatatgacacttgtggtgttgattaatactcatcatttattcatatccttttatacatgcgatcggttggtcaacataaggaggttgacaaccggatcattgggactaataagtttattgagttgaatgaaagaaataggtcccaaggattacaaaagtgttgatgcttaagtgatatcattacacctaacaataccaagaatgacaaagtgaggatattgaagatgtgtgatacgaagtggctattatggcaagacggtgaagggcaagcgatgctcggtcgcgatggaccatgcggcggtgaagggcaagcaaggggcttggcgccgaagaaccaaatccggtggtgaagggcgagtgacggctttgtcatgatggaccatgagggactatttgaagctacaagtaaccgcatcaatcatttgaagaatatatggtgaaacggtatcggcattggtctccctcaagacaatgaaagaaagataaaaaaaaaggcattcctaatagtataattatcttcttatgtacatttgagtttaggaatgccgtactattaagagggatgcaacgtcgaggtgtttgtgtatgtctcggtgctcaaagtgacctatcatagtgctaccttgagagaaacccaagctttaacctatcctttgagtggttttagaccttgtttttcgttgacttgggtagtcctctgagtgagctttccatagagtctaagttcataaaaaaacggactcccgagcgaaaagttatagtcgttttactctgtgcttttcggaaagtccgaaaaattaccggaaactccgataatttttcggacaacttcgaaaatttccggacattccgaaaatggctgcgaatctgagatttgcttctgtaagttttcgaacttgtccgaaaatgcttttcggaaactccgaaaattacagtcttggcctccaacggctagtttttgaggggctcgggtatataaactcctccacccctcctttgagttgctgctgctcttggggagtattagacacatccaaagccaaatagcatccccatttccctacctttgtggtgcctctttgtgagggggatttgagaaggggagagagttggattgagagagtgaggagttgagagctagtgagcttcactccatcctttgtggtgcctctttgtgagaaggatttgagaagggaaaagagttggattgagtgattgagaagttgagagctagtgagcttcactccatactttaagcactcgagttcatagcaagcaaatcttcgattgtgtttgttactcttggggactaaggtctcctagacggctaggcgttgccggtgagcacccaaggttgtggtgtgccacggaaagtttgtgaaggcttcgatttcgcctccgcaagggaagaaatcaagagtgaaaccgaggagtgcatttgtgcaacctcgtgagaaaagggttgaaataggcccggcccttgtggctcctcaacggagacgtaggatccgtggattcgaacttcgggaaacaaatcgcgcgtctcccctcttggtttgcccgttcttgcattctctcatattgtgcttgagcttgtttttacccgatctacttgcatgcttatttgatttagttggtgaccttatatcttgcttagataccttatttgtcaccttttgattcatatacattttgtttgtttgagctacaagttcatagctagtgtttattccgttatccgccgaacttttcgattgagaccggaacttccaatcccataccggaagtttcgatttgaatcaaaagttatcatcactctaatgtgctatgaagttgtgataatttttaggaacacctattcaccccccctctaggcgacattaaggtcctttcagaaaccatggcaaggctccaccctaccatgcgatgaaacggacaagcaactcttcagggcctctacaatcatcacactaggcaatgggggcaagacaaagttctggcacgacagatggcttgatggccaatcccccaaagatctatctccttccctatacaagcttgctatgtggaaaaacaaaacagtggcccaagaactagaaaaccacaagtggttacggccactccgaaggatgaactcgacgaccgaggttcgagaatttatcctgctctagcacttgatacaacaggtacaactggatgaagacagggaggacgatctaatgtggaaatggaatgcgaatggaatctactcagccaactcggcctacaaaattcaattcactggaagcattcaggacaatcgtgctaacttcatttggtgagcaaaaacagaaaataaatgcaagttctttggatggctcatggtccaaaagaaaattctgacgtctgacaaactccaaatccgaggttgggacaacagtccaacttgctccctctgtgggacagaaccagaaacagcgacacatctcttcatggattgccccttcgcgaaacaggtatagacaaacatttggttgaaactaggactcaacatgcctaggtcttcttccttcaatggaaacatgatggattggtgggaagcttgccggagagaaatgatcaaagagcagagaagaaattttgatggcctcttcatctacacgacatgggggatttggctacaaagaaatgctataatttttaacaatgactatggtacagtgtcacatgtggttgacttcatcatcaacatgtgcaaagccttcgatgaagcgcaaatcgcttagatgataaaacgccgacttttgctgttagtggctttgcactttctcaaagtgctgtaacctcctccagtgtaaaatctgaagacacctcttggaggtgtccatgtacgtgaaactatttctttctcctctaatgaataggtagagctcctgccattatcccctcaaaaaaaaaaaacttcgggactagtagctatatatttgtgtcacattttctttgaaaaagtccaataattttttaggaaaggcaagcgtttttacactaataaattatacataaatcaagataatttttaataccttacactataatttttctattaagtagaattaggataaaaatcaatttattatctactttgaaagagaagagaagatagaacagatagaaactcaaaaggtaagtagtatacggtagcaagcatatgtaagtactcccttcgtttcaggtatataacatgttttgattttggtcaaagttaaactggttcaagtttaactaagtttatagacaaatatagtaatatttacattatcaaattagttttattaaatcaataattaaataaatttttataataaatttatcttgagtcgaaaatattactatttatttctataaacgtggttaaatttgaatcagtttgactttgaccaaagtcagaacatcttataacctgtaacggagggagtagtgactaaaagaatatgacgtcatattattttagcaaaattgtttttcttcccttgaaccgcgtgacatgacgttttgagcccgtttggtagagcttcaactcttaaatttaactctaggagtttggtctgaagtaaagttgtggagctgcacaaacccaacttcacatctctagttcattttgtgatagagctccacccaactccactcctattttaggtggagctgaaactgtttggctgggctctaggagaggtggagctggagttgtgccaaacaaaccatttcttttcgttttaatttggtccattaatttgacttccttttgacatatcgaaatcccgatcgacccatccaaatttgtgggcttaaagaaagcctgctttgatggagttcttttttcctatcgataagattcagatatatatgatccgagaaaaaaataaaataaaaagattgagctagatactttccacgcgaggtaacaaaagtcgattaatcggatgtcatcgacggtgacattttaaaagatggactttttatcctaaagtgaacatgtcctgtatatcatttgaaatagttttgattttttttttataaaaatatagtttgataagatatatcaataatcatcatatccctacacacacaaattcattatacctcaacatgttgcttaaaagaataaattatactctaactacaatacgcacaccatttcatgatcgtatttttttttcaccaaatttaaacttgtatgccgtgaagtaataaatcgtatattaatctgccttgtccttgtccattttgtttaaaaaaattcataactgttttcactgacttgcaagaaatgagagatggtatatatccttaaagagagagaaaaaaaatgctttcactcttttttcttcaattataaaagaaactatttttttcttattattatattgaaagataccacgtgcgcacactagcgcaaccgaaaatagaatagtcccaattaattcccaaatcactagtagtggaaccattttaatactaatccagtacaaacagacgaaccattggaaatatttggaaaataataagatttaagtcaaagaccagtaacccctatcaggacacgacacgctaaaatgatctgatcgagggcttattttaagccagatagcggtggacgagccgacaatcagctgacaaacacgtcctattcgagcccgatatctcttgatcgctttccctctagttgctgtcagccaaactcagactcaaccaactactgcactagacagtcaaatttaatttgaaataatgcacaaacttagcaagatttaaggagaaatttaacacaaactcacgaaggacaaagtggacgatatatatgataatggcaagtgtgtacagtaccttagaagtgacgattgacaacgctgtattttttttggacgggagagtaagccctgtttattttccaaacaaaatttttgactctatcccatcaaatatttagacacataaatagagtattaaatgtagaaaaaaaaccaattacatagttcgccagaaaattgcgagacgaatcttttaaccataattgtgcaatgatttgacaatatggtgctacaataaatatttgttaatgatggattaattaggcttaataaattcgtcttgtagtttcctggcggaatatgtaatttgttttgttattagactacgtttaataattcaaatgtgtgtccgtatatccgatgtgacatgtaggggtaaaattttttgccaactaaaccagctgttagtactactccctccggcccataataatatagtgtatcacatccatctatccagattcaatgtgtcacgttcctctaaaatctcttacattttagagggggaggagtgctagtttgttctcatcgtattcatgactgttcatgtaagtacttcatgctagttacatgattactcgcatgaacagtaacaagttgtcctaggaatctaggacgcatgccgtcagttcctgcatactatgtatatacaacacagtgtactgacaaagcagtcacgaggttgcacgccgtcgtgagctgtaaactaatctgccgatcgaccaatcgacgaccaaactaattaaccaagggatcgatcgatcgatcgattcgaggcagcagcgcacatgttgatttatacgcaccttggtgctgctggggtcgtgctgcagcggggtggcgatgaggaagacgaactcgcagccggcgatggcgggctcgaaggtggcggcgtcgtacatgtccgcctcgaacagcaccagccgctccgccgcgccgggcatcctcctcagcagcgccgtcttcttctcatcccctgtacgtacgatttcttcagatcagcaattaatccacagattctgaatgatggatttggcgatcttagcagctgagatcgagatcgaggtcgatggaattaatcatggaaaagagagagagagag

SEQ ID NO: 6684 - DNA, 9071 bp, Oryza sativa
ccccgctcgcccctcccaccacgtgcgcacctgttgggcccacctacttctccccccctttttccacaaaagatgtttcacctagtgtacttataatgtttcactatttatagatctaatgttgcggtgaattaaaatattcttttgtaacaaaaacccacatattttggaagctctctattaagagaatttggtttattttttgtttcacctagtgtactcacagtgtttcactatatatagatctaatgttgcagtgaacgaaacattccattgcaacaaaaaacccacatattttggaaaccccctattaagggaatttggtttatttttttgttccaccgaaaaatgttttacctaatgtactcacaatgtttcactatgtatagatctaatgttgcagtgaactgaaacattctttcgctatttgctgaaacattgtttttatataaggtgaaacaacactcgatttaaacgagtgaaacattttcgatctacttagtgaaacaattccgatatacctggtggaatatcgtgcaatatttaaaaataattcaataataagataattttttcgtcggaatatatctatgtgtggtcttgttttgaagatttaattacaatgaatttaatggtgtaatcggatcatgatttggataaataatttagaagaaaaatcagtttaaagtagttttgcacgtaaatcggacgctgacgttaacgcccgattttaacctcctcccatcggacgcccgagcgggagtcacatccaaaaaaccggcgacgataaaaaaacggatggaacaaaaaaaataaaccggaagctttatgtatttcttttattagatatagatttaacaaacaacgttgaaaaaatattaaaaacaacttcaaattaaatttaaaaatacaaaattttctaactaaggcaatcaatggggctccttgtgccatgatcgaagcttaagggtacgaataaaaacaaaacgaagtctgtatgtacacgttgtaattctattaccaatctctctgttcagtgagttcacaataaaaacgattgctttgggtggccttcggttgtaacgagctgggttttggattctacagtcaggcgtgtcaatccgtgttcggttctgctactttttgttgtgccatgcatggtggccatggaccaacatcgtgcacgtagtgtcgaacgacgatggatctcgctgcttcgtccgtgtgcgaatcggacacatgcgactgacgtaccaagccacggtaaaaacatcttccccatttttataatagtagagatagagatgtataaaaaatataatacttatatgaactttttatatatacacaaacattatatggggagtggattctaatccctcgaggagatatcccctcgtatacctttttcttctaaattcgatgcaaatagttgtgaaaaattctgaaaaaaattgacaatgtagagtataatggtacctactagtccaccaaaattcatgttcaaatttgatctacacatcgagaaacaaaaaagacaaatttagatataaacagtacgctactattcatacgctgaatttgtcttttttatatctcaacgtgtgagttgagtttggacttaagattttgtggagttgtatatatgtgttgtatgaatgttgtcaaatttttccagaatttttcataaccgtttagatggtttttgagcaaacgagggaacatcccctcgagagattagaatagtttcccattatatgtatatatacaaagtccatatacgtctatatacaaaaactatgccgttccgtccgcactcttctccgcacttccacgtgcgtgttgtccggccctcttccgtctttcccacgcggcacgtggcgcgtcacacggtgggcgccacgcgcgcctaggtgcggattagggatttcgcaaggcagtgcgtgcatggctgcatgcactctctctcttaaaaaaacataatctctaagaacttttaaatgaaagatatattttttttctttgtaaataatatctctgtagaattggttgtttcaattgaacagaatcctcactatctaaactaacaaagcggcaattgctttgcatcaaacacgtgaataagtatctaaataaacactgcactgctgactactatcctcttaatcttctatatttagttgctatccttttgatcttctttagttgctgccactatcttgctcctctacatcatctaccggcttctccaaatcaacgccccaaatccgcacgaccacatttctcctagctccggttggcggagttgtcggcactagctctcctccatctccatcttcagccacctccgcttctgcctccaccgcggcgatggccgctggagcaggagcaggtgtaggtgtaggcggcgcggcgagttgtccgggcggtgcgagggagagggtaagatcaaggtccttcctgtagtgcttcctcttgtggccaccgagcgccactcctgtcgggtactctttgccgcatacgttgcacgggtgcttgccctttggcttgccggcgccgccactgccgctggcggtggccatcttgtccctgttgatgtggccagcgacatggccacctagcccctggtgcgactcgtactccatgatgcaaccctcgtacttgcacttgtacggtccacctgatcgtgatgctccgcgtgtgggtagccgagcctggggatgaacgggcgccgccacctgcggcggcagcgacatcggctccttctcgttctcggcgtgatggaccctcatgtgcccgtgcaccgccttcctgctgccgaactccttgttgcacaagtggcacgggaacgacgcctctcgtcgcgccgccacgggggcagcgtcgtcgtcgccggcgccgatcacgtcgccgccgtggtcgcggtcgctgatcgtcccctccgaaccggaagaggtagacggcgtgggcggcgaaggaagcagcgcgaggatgtcgtcgaggcggcggcgccgcttgcaggccgtcgccggcagcacgccctcctcgtcgtcattgtcgttgtcgctgtcgcggcgggattggaacacataccggcagccgtcgtcgtcctcggtcgcagaagccgaattcatctcgacctcttccagtggatcggcatggcggctgctggacttgccctccatgatcgctccgatgccccttgttcttgctccgatcgatctatctgatggagatcgggcagcacaagcaagtagggagtaagtaatcactagggcttaatttgcttgatcgatcgctaagcgagatttttcctagggttttgctgcagtggagagagagagagagagacagggaggaaggaggattgtgttgtgggtgacggcagcactgaagatatctagtagtagaccgtgaaatacacaggattgagtcggtatgatgcgtgggcgctaagtcgggtgatccacgtcaccgtttcgcaccacaacacagcaacgaaacggaactgcagtaacaagtaacaaccgagatttcgtacggatataggagtatatatcttcttttgtttctagaaacttttttataggatatttcttactcgtttttaggagagaaattaactagcatacgtatacgtacgtatacgggcgcgttctctgatcacgtccatcgatcaatctgcgcttgcttcaacatacatacagggaagatctttatttggatttcagaacaaattttaatttgggcctgatgaggttcagtaattataattagtgggaggtgctccttaacgtgatttctggtgtggataagaatactgtttcgactgttatttacttctgttttgctgtgggatttgacgatggccattgacaataacttcccaacttgtttgtgaattcatatgccagcctcaccactctctttgaggctcgtagctctcgacgatgctaaacgttcagggaggcacaggcaccgtggctcgtcaggaaacgatggttttggttggggtcgtcggagaagaaaactccgacccctactgctccaaattgctgggccctagccattttgcttttgggccttccggcccactagattcgatggcggcccactcgattcgacgggcgacactctgtggacttcagcagattcccctcacgatctgataaacctgcattgggactacctatacatttgtcgacaaatttttccccaaaaatttgacagatgtaattatagtacaatcgtagtgtaattacactgtaacttatatgtaattacactgtaacttgcatgtaactacagtgtaacttatatttaagtgtcacataattttgaatcgttagatctattacacgatttgtttaagtgaggaagaaaacaaatcatagcacacacatatgtgaaagaatttgttcccacgacctccattttaccgaaataacatgttacggagagatttttgaaagttacatacaagttacactatagttacagtgtaattacatacaagttacagtgtaattacactacaattgtactgtaattacatctgtcaaatttttggggaaaaatttgtcgacaaatgtatagcaaaatcgacctgcatttgctcgctagataggccccgtttggctggggctgtgccaaacggtctagattcaccaaataatggagcggagcggggtgaatcgctccaacaaattatactaccgagatggagcggcaaaaacgtcgctatagtttagtttattgctcagttaaagacggataattgagcaggaacgaatttaccaacggataattgagcaggaacgaatttatcattcatcaatccgttctcacagaatgtacgcacacggtatacatgtacaggtcaagcgaagcaagggattttgctacacaacacatcacatcagactatcagagctctcccagcctcttggcacagtccacgctgctgtccagcgtctcctccactccatacctgtacttgaaccctaaatccacaagcttgttggtgtcagcttgcactctcaccccctccccaatgaccctgcgaaagacgaacacaaaaccaatctcacaaattcacaacacaaatcagatcaaagccgggtcaatgaaagttgatctgatttcaaaaaaaaaaaaaaaaaagaatctcacaaattcagttactacatactgtattcaacaacaactaactaatcaagataaatacgtaatgaatactacctcatatatacattaaaggaaggaggtagcatatcaagagttggattggtgacacatactctttgagcctgatctcgatgtcggggaacttggcggcgaagtggtcgacgcagtccttcatattggggtacccggcggcgcagaggaatcgtccggcgatggacggctgatccatacagaagacgtgcgcgtcgcaggcgtcctcgacgtgcaccagcggcacggaccccagcagcgcctgcaggaacttgagggagttgtgggagggctcgtcgccggtgagcggcgccaggatcaccgggatgctgctgctccacgggcatggctggagcgtgtcgccgccgacgaccgcgcacgtcagggtgaccacctcgaacgccggcgacggcgaggagccgttgtagctcaggagctccttctcggagagcgtcttggatgacacatagccctgcattatgcaaaatccatcagaaaattagtgtcaccgtgagagtgatcgagttggttaattatgttgatcgatcgattacggacgttcaggtaatcgttggtgaagtcgcaggtgaggttgggaggagaccagcaggactcgttgatgaagtccttgtagccgccgccgctgccgtcctcccggagcggcgaggcggcggtgacggagcccgtgtggatgacgcgacgcaccgtcctcgatcgctcgcactggtccaggatgatgcgcatcgcgtccgtggtcgcttcggcggtgttcttgtactgcgagagatggaattaacaaattaagttactgatgatacatatgaaaattagcaacgacaagttatgggttaattatatggccttttgggttcaatagtatactccctttgtcccttgaaaaaccaacataggttgtgttcttacccccaagttttccaactcgtttccctcgttttctgcgcgcacgcttttcaaactattaaacggtgtgattttttaaaaaagtttctatataaaagttgcttataaaaatgatattggtccatttttttaaaaaattagctaatgctccctccatctacttttgatagtcatatttccaaatctgaaaattttatttttgataggcatatttcaatccaacaacctatcatcttaatgattttctcgaatttaatgcatgactctccatttttccacatatgattggctacatgggctttgagaaatgtaaatattaatgaatcgcttgtttacgatgaatgactagtagcatgtttaaatggatgataagtagaattacttatccttggtctgtgtgttaagatgaaatatgactatcaaaagtagatggagggagtacttaattagtcatgtgctaatggactgttccgttttccgtgcatactgttccaggttggaaacatgctccagcgaacacagccatagtggtgcaacaaagacatatatatatctctttatagattcgttatactcacgtcgttcaatactagattcgtttttccgaggacggatgcgagcataccttggtgctggtggggtcgtgctgcatcggggtagcgacgaggaagacgaactcgcagccggcgatggcgggctcgaaggtgtcggcgtcgtacatgtccgcctcgaacagcaccagccgctccgccgcgccggggaactctctcaacggcgccgtcttcttctcatctcctgtcaagatatattatcagttttatcaccatctccatgaattggaaacacgaagcagagagaaagagagggagagacattggcagagtattcgttgtactgcataccaagatttctcaaggttccatggacgacgcagcctcgttccaagagcttcttgacgaggtaggccgcgatgtagccgctggccccggtgacacacaccctgctcatctctctctctctctctctctctctctcttctgaaaccgatcgattcagtgagtgggacgaattgtgaatttgtgatctcagcagtagttgtcatcgcactgttcatatccatccattcctgccctgctgacctgtgtggctaactgagtgcacccaagactttcgttgtttgatttcctttcctgcacgcaagtgggtgtcatatgtggctctgaacgaaacgagtttcaggtccatatctcgcaggactgaccggcttgagctgaaaaatatatagctcccacgagatatatgcattaaagatcactacaataaaatcctttattcgtgatggatgataacctacataatgtatgcctcgtcggtgatcactagtaataagaaaaatatcaactgttacaagtgcggacctgtcagagatgactatatctcaaaacagtccaaaagttgtgatccgttgatgatgactataacccaacatttcctcacatctcggatcgatctgcgtttacgaatattcgagcaagaacgaatttgtcgttcattcgtttcttaccgaacacacacacggtatacccatgtgtataaggtcaagcaattcacgaatttttgctacacatcatcacatcagagttctcccaacctcttcgcgcattccacactgcaatccagcgtctcctccaccccatacttatacttgaaccctaaatctacaagcttcttggtgtcagcttgcaccctcaccccctccccaatgaccctgagagagacgaacatgaaagcaaccacacacaatttagtcatgattcatcaattaatcaagatgaattaatatgtaataatcaagattttttttggtcacacgtactctttgagcttgatctcgatctctgggtacttagcggcgaagcggtcgatgtagtccttcatgttggggtacccggcggcgcagaggaagcggccggcgatggacggctgatccatgcagaagacgtgcgcgtcgcagacgtcgtcgatgtgcaccagcggcacggagcccagcagcgcctgcagaaacttgaggacgttgtggcagagctcgtcgccggtgagcggcgacatgatcaccgggatggtgctccacaggtacggctggagcgtgtcgccgccgacgaccgcgcacgccaaggtgaccacctcgaacgccggcgatggagaggagttgtagctcaggagctccttctcggagagcgacttggatgacacataaccctgtacaaaatccatcagagaaaatgtcaagctctagtaccagttgatgcggagactgaaatagggattgggatcctctaacgtgaagtcagaggaacgtggtgactgagatatggaccccgccgctcacgggcccaccagtcagtgatcacgtaagagggtagttcacgtcggaggatcctcttccctgaaatagtttgttaattagttggtgattaatttaacattacgtccagatgagcattggtgaagtcgtaggtgaggttgagtggagaccagaaggactcgttgatgaagtccttgtagccgccgctgccgtcctcccggagcggcgaggcggcggtgacggaggccgtgtggatgacacggcgcactgtcctggatcgctcgcactgctgcaggatgacgcgcatcgcgtccacggccgcttccgtgttgttcttgtactgcatgcaaaaggcgacacctattattatctacgtcttttatatataacgtcgttgttttcttttaaaacgtttgatctttcgtcctatttaaaatttttataaatataaagaaaatttaaatcacgtgtaaagataaatttaagttatatttaaaaagttaacgataccctgtattaaaagatggattgagtatgttttgatgctatgatccggccggagcatgtg

SEQ ID NO: 6685 - DNA, 9778 bp, Oryza sativa
atcgccatccgcccgcccccgggccgccgcccaccacccgcccccgcgccgccgccaaccgcccgcccccgcgtcgtcgccccaggcggcggcggctggatttggggaaccggctcacctctacctccgcccccagcctcgcgagcgagctccgccgccctccaccgctgaccgcccgtgtccgtgtgcgcgcacgagagagagagcaggggatctggaagaggttgggtcgaagaggggatgacaggtgggcccagtgttttttatgttttttttttgctgagtagtctgccacattggcgccacgtgtgctagtactaagtcaaaaccgctcataacagtgttaggggggtaatttgtccggtattgaaagttcagggtgagtaatatctggttttcgggttcagggggaaattcggccgaccgcgatagttcaggggggtaattcgtactttttcctatcatatatccatatgctgggccggcatccggcccaggctaactgcctaactaggatttcagtactgccgctactaatactacactgaagagcacagtatagctagtgaaccaaagtaccaccaaacatggccccccatattaacagcaactggtctaacgaataatgagcagcaaatttcggttacggttccttgtgaggtacatacacggttgaagtcacaagggcccgaccatgtggcgctcgttctcttagcttagcttgatgcaatgatgtttgagttacaacatgtcaaagtgccaccatgtcgatccggcctctgcatcagctagagaatgtacacatgttgagaactatgagagggagtggtacacttctcgccctatttcttccttaaaaatggcacgaatatataccaatatgcatatgcatgatgcgcacactcgttcaattactttcttacttcctccgtttcacaatataagtcattctagcatttcccacatttatattgttgttaatgaatctaaatagatatatatgtctagattcattaatatcaatatgaatatgggaaatattagaatgacttacattgtgaaacggagggagtacatattaatcagatcttaccaaagaatattgatataattttacttagacatgcttctttccgggacgtgatttagcgagcacacgtgagtttcaccgataaggagaccacatgttgtcaatgataaaggtggtggtggcaccgctactatcttctaaagcagtatatccgaaagtgtttttcatgacaaatctagctatattatttttcttatgttaaattatagtattttttaattagttaataattaatggttgtaaggtttgattgcacctattctacaacgatatccaatcgagaacagaggaaggtacatggctggtgcagaaaagactcaaaatagaaggagaaagcaaagattctgatgagttctacacttgtctgctactgtcctacctaacgttttttttgacccttgtcagtggcatctaagattttggccgttgttattgataagattttagccgttttacccctggtcctcccccaaacctccggtagtacatctcgttaacctaaaagaagcaaaggcagcagatcaaatggcgattactttaagcagcacacactccatcactgctgtttgcacgaccgatcagtgtcattccccaagttcaagctctgccataaactgaaccctgcacgaacctactaacaaattatatttaaacagcattggcacttgacaatagactatatacttctatataaaaaaaattgtcccagttaggacagtggcgacatcttctcttgcgatctcccttttgatattcgatcggcgacgagcccatggagatcgagtaggcgccaaagattcgaaagctggaaagatgagaaatgcaggataaaaatagagggggaaggggcagcccggctggaccgtggaacatgcgcgagagcggctgcggtgccacagctgcaatgattcgggagtccactcgcaacagcagcagcagcatatattccatgagcaccagcggcagcagctagccgcaccaaccaatcgacggaggaatctggcgtacgtcgggtcactcaaaagcggacgagcagatcgcgccccgccgcggcggcggcggcggcctcgtcgtcatcaccgtttccggccgggtccaaagcgggcggcgccgcgagctctcgcgaagttgcccgtacgtcgggtgatgcgtcgctagcttgctcgtgcgtgcgtgcagggcggttgcgtcgcgtctgggcgtgttgctgttgtcaagtgtcaaccagcttatttcgtggtcctgatatattacttagtgttgtattggttggctttggacaaccaaaataatttggatagggattctatgtttttattttcaagggtctaaaagagaactagaaaacaataaaaaaaaacacctagaaccacttagaaaattaaattttccggtggcttataagggtctccagatgcaagaagcacccaaacaatccagatttttacccagactcgaaaatgctgggtaggtgtaaaatctagaaaataaactagaagcaagaagctgagtagcttcttcgcattaacatcatacttacatgtctagttcgaacctcaatgttcgaaactcttttcctcagcaaaaagaaaaaaatgatgtatattagcacataattaacctgatccatgtctagttcgaacctcaaggtttaaactctcttcctcaacaagaaaaatgatatagaatagcttattagcataataattaattaagtattagctaaaacaaacttaatgaataaattaatattttttttctcaagcaattttcttatagatttattttgtaaaatatatctttagtagtttgaaaaatcgtgcacatgaaaaaggagagtaaaaggccgttttggaaccgatctctctggcatggacaacggagcctctcgttaacgcatgataattaagtatcaactaaaaaattgaaaaataagttaatatatttttttacatttttttaaaaaagtacgtcattaagtatttcggtaaacgtgcgtgtgaaaaaaatagagagtaaaagataagaaattatagtgtatataatacagcctaaacgactgaacataccatctcattttatttacaagaattttagtcacggagtaaacaacagcatgaactctcctctattttcttccttttcctttttggagacgaacacttgttttgatatttttggtatttacgagtactgactgcggcaggatgtttttagcatgagaaaagtggtttggtcggatctgtcagcagctggggtaaatgcggttattgcaaaggggaccaaagcgtggagcggagtggaaggagtggcatgcttggctctggcgtcgtgggccctaccatcacaccaaccgaaaataatgtaacccggcttgcagcatcgtcttgaaatggaactgttttggaattgtttttgcatcgttgtcaatagaaaaccatgctgaaatttgatactagcagatttttcaacagaaatctgctaaacaaaattattacagagaatgctagtagacactatgtacaaaaattgtgaaatatacagaaaaaaacaggtgctactagaaatttgtgaagttagcttatggcctgtttggcacaactctagctccacccctcatagagctggagctcagccaaatagtttcagctccaccaaaactgggagtagagctgggtggagctctctcacaaaatgagctagagttgtggagttgggttaggcaactccacaactccactccagacccaactcctagagctaaatttaggagttggagctgtaccaaacaggcccttagtgctatattggttggcttcgactgttaattagtagtggaaaaataagcagtgaaatgagaaaaaattttaaggtatgaatatgtttcttagcgatttaaaagccaaaattaaaaatagaagtaaaaaaaatataaaaacacatagagagtttaaaatttaaattttgaccgcgacattaccaagaacaaacaaacaatcagggctcctttgatttataggattggcaaatgattttcataggatttaaattcctatggtttttttcctatatgttcttttgattcatatgaaagaaaggaaatttttcataggattgtatttctatgcttcacattttataggaaaaatagtaagatgtgtgacctctttgtgagaaattttctataggattatatttctatgcttcacatttcataggaaaaatagtaagacgtgtaacctttttgtgaactttcttttatttttcccatagcataagaaacatactactacttcaatttctgctttttctctatttctatatttttcctatcctgcagatcaaaggatcacaaggtgttattttgtccgtagctgcacatgaaactatagctacgtttgaatggttttgcactaaaaaaaaatcattgcaacagttttttattagtcccaaaagccaagcattccccgcaaaaaaaaaaaaaaaagccaagcattaacctcacgaaaataggctggcgtttcgcggtgggcaggagaacgaacagagaaacacaggaggccaaaactgcaaattgcagcaaagcaaaaaggtagcggtgggtgcggctcagtctcccaggggtcgcaaccgtagatgcgcaaagaagaagaagaagaaaaaaaaggttaaaaattccgtaggcgcccgtggcgcagatcaaactcgcacgcgcacccgacgcatcatacacacacactgtctctctcactcactctgcatctgctgctgctgctgccactgccactcttgtccagaggccaccacacactctctctctctctcactcactcactctcctctactagctcgtctccatctcttctactcgtccaggcctccaagaatctctctgttcttgctgcttgcttggtggtggtggtagctttcataatggaggcggtggtggtggcggcgctggtgcttctcatgtcgtccagtctcgtcgcttcaggtgagcgagcttaagctcagctctccccgggggagggtctttttctaacctttctctttccgtctcgtttagatttctgtcctgagtgagtttgtgcctcttaaataatggctgggaactgcaaaggctgctgctttttgtttctgaaggttgattttgttggagttttggggggatttgttcaggtgttgttctattctacacttctacttgtcggtggttctttttctttttttgttctttgatgtttctcagtttctgcttggttcatccattggtatgtttggaacttggaagaagagatctttctgtttggttcttccattttctaggaaagatcagcattgcatgtaggagtacacgctacttttgttatggtttgtgaactactttttttttttcagattcccctttcctaccttgctatgtcaaacagtactagccatgtactgcttagctcttgctgttcatctattgctgaagaaaataactcaacaaggaccaaggacaagaaatctcttgttctcccctctgagacagttggagatgtgttcttctcaagttgatttattttttttacatttttactttctaaaacaagcaaaaccgttactacgccgattttctcctagttttctgctctttctgcgcagacgctactctctcttcttgattgctttcgtcacattccgcatcccatctcttcatcaagaaactggcataaaaactgccgccttttaatgaaacgcacgagttaattaatctctctcattgaatctcttctttttttttgtgtgtgtggtgtttcttggcgaatgcagattggtgcgtgtgcaggtcggatcagccacaggcggcgctgcagaagaccatcgactacgcgtgcggcgcgggcgcggactgcaactccatccacgagcaggggcagtgcttcaaccccaacaccgtggtggcgcactgctcctgggccgccaacagctacttccagaggaacagggccatgggcgccacctgcgacttcaccggcaccgccaccctcaccaccagcgacccaagtaaaaaatgattcaccacccaagtcacttcaattcttgttttttttttttcacgaatgcgcaaaaggattgcacgtcaatatattacttcctccgtttcacaatataagtcattctattatttcccatattcatattgatgttaatgaatctagatagatatatatgtctagattcattagcatcaatatgaatatggaaaatgctagaatgacttacattgtgaaacagagggagtagtagtcacttcaattccttcccagcatttctgtccactgtctactgcttgattaaatttgcgctcgcgtttcgggttcaagaacgcgtttgagtactggctgtcataatgtcattgagcgcttgcaagtttttgcggcaagtgtttctgccttgcacgattagaaatgtttggatggtgatgagtgggagtggtgactagcaatgtgaaggacgagctgtacagatgatggaattaagatttgtcgtgcgttggggcaatgcaagcatggcgtaatgggacgtgctttaattcaaccgtaaagtatgttgaagttttttttagcttgtttgcttgtgtcaccttatctcaattataaggtctctcagtctgatatgttggctagcatttgagcttgtggtcagttaggacaaacgaaaaggaaaaggagatgtcggtgacatctttttgatagctggcatggaagttcatctgagtgtgggatgatatccattctatgtatttttgttattttcttcattggttagagacatatctattcctcacacaatctcatattatctttggttgcaggtgtttctggctgctccttccctgctagtgcaaggtacattattaacttcactttaactgactgagttttattaagtatcactaaggatgattgacgtttcaaagtggtaaccaccaatgaaacttttgcattgtgtttgagcagaaggttcttttgaacacactatctgcctccattatatagtacatgttcactctgaactgcaatactaagacctatgaactgaatgtagccatctgttcaatgaactgaatgtgttacaacttccttatctcttttgtttgcttgtcaaagtcgtatatgctttgttattgaaaaataccaaagagtcaataagtaagtatacatcaccattaagaaccaagtccatctgttatttaaagctagtcttgtacctcatcctcaactactcatccataccaaaatgcacacctatgcctttccggcctgcatttgtgatgtacacatgactcctgaatgatctatagttgatgcaagtatcattgaaggattcctatagtatggtgtgccatatatctgaaggcaactgagatgctttgcaagttgaaacacgcaagactcttctggatttcgttgattgtaatatcctaacaacatttccatactcatgtgcagtggtgctggaacatcaaccactccgaccatgggaggcacaactggaacaatgaccccaggaaccttcacacctggaactggtatgggcacaaccaccggcaccggcatgggaacagggactactaccggcaccgggctgggcgggctagggccaacaggcacaagcagcatggacaccgcggcagcgggattgcacctaagagccgggctagccaccttctgcaccgtgctcctctcgttcgttgcgatcgcatgagggttgcacccttgaagcaacactcattttcgctgattgaaagaacccgatttcggtggttgcaggagcaatgtgatctgtgaaaagaaaaaaaaatgaacagaaaccctgatcctttctgaagatgtcatcccatccgaaaacccactattgcctgccaattcttgtttggtgtcgatgggtgtttgtgtggggtgagtttctgtactcccttttcttatgtcgtgtactctgtaatttggtagtaggatgtctgtctctttcatgcaaggactcccactatttctttttctttttcccatctttattatcttgtaaatctagggaaaaccagtaggtaggctcaaggttggttggaatgagaaggttgttgttgggacaatgccatcttaaggctgttatcaacttatcatcaagttgctcatccctgaagatggttgtggctcacatccttttgcccttcagtatctctgaaaaccgcaaaaaatgagagtgaaaatgtgagaggcagaattgaacatgtggtactagtatagtaggaataagccccctttgattcaaaggaaattcataggaattctaaaggattttattcctataggaattttttctatatagccctttgaatcaaaggaatgaatcctatagaatcatgtgaaattcctatggaatgcctaatgccatgcaagttttgtaggaaatctagcatgaggttttacctcatggaaactttcctacgagtcttcatctctcctttaattcctgcgtttttcctgcggtccaatcaaacggctattcctgtgttttgcaatactctcgtttgcacttgcatttctgccagaattctatattttttcctattcctccgtttttccattcctacgattcgaaggggccctcagattgtgcagatgtggctcctgcagagtgacattttagccctttagctgttaggtaacgtggcgcatcagtgctgctactctgcatcgctgaaaccgtcgtccgtttcttgcgcccatgtgggggttccatcgcggcgtcgggcgtcttgttgttgcgtagcgcatcgagacagattctcggttgatacttgaaaaaaatattgtgaaacatgcacctgcagctctctgatgaccaatcagtgtgttggtacgaagctagtacaggacacaggcatgcatacagctaagctaagccaaggctgtgtttagttcagcgtaaagtttggattttaattaaaattagagatgatgtgactgaaaatttatatatgtatgacaggttgatgtgatggaaaagcactgaagtttgaatccaaactttaaatctaaacacagcccaaagccaaagctgccaatgatgatggagcaagagcaagagcaagtgaggaacttgatgaatgatgatggtgtcaccactgtcactcacgcgggcctggtgatcggcgcaggcaagccgagtttaatggaggcagtaatggccgcgcagaagcagggtggatgatgcaggcaggcggcagcgagaggggtggggctcgactggaatcatggctgtctagcgcgcgcggcgcatcaggcgagaggaatcagggggggttcggggggtgacacggcccagttaaccttcgggcccacgttggacagaacagattggatggaaaaagtacaccgaaggtccctcaacttgtcatcgagttacaaaatcatccttcaaccgtaaaaccagatatatgatattatgaaaaccgttctttttgcccagctcgctaccttactccgctcggcctacctctcttcggtccagtccacaagtggacccgcagggcccagctcgtatatccaattgccatctacatccttcggaagacagcccctatgataccggagccgatccttccattaaatccggtcgaatctttctcgatctcccaaaatt

SEQ ID NO: 6686 - DNA, 13478 bp, Oryza sativa
gtataatatttctgtaaatattaaaaaataaaaatttaaaactgaaaaaaaatcctttgcctccttgccacgaaaatgcaactaactacagcaccgtatggtagtactccgtagtacgatggttgagcacttccttcctccatcccacagagctggtcgttctgctgttcaaaatttgttccgtaaaatttgtcatcctagcatcgatcttgaccagcgaactgggcatcaagtcaattccatttgaatttggctaatgattactctttctctgtacaacagtgccactacttaccatgtgatagataatagtattagtagtcattaattaattacgtacagtaaatttgttttgcaatctaaattgacaaatgcaactattaaatgaaggtaatatgatcatttttatttgatgttaatttgttggatcaaccttaaaacgacgggctttctgggacaaaaggagtaatactttcgatgttattagccgtttgcatttaccattttctccctatggtgataaataagattctgtcaaacttttaaaatttagatatcaattttatattaacaataagtttactagtattatgatggtattttcaatataaatatacacatgctatttattttttaaaactaaataaaactagtgattgttaaaattttaaaagttcaactcattttttttaggaacgggcatgacctctgccatttcatttatagaagaagataaaaacagtagatcacctcatttaatagaagaaactcatctgaacgtattaaatactccttttgtaaaaaaaacaaaaaaaaaacaacctcgtactccctctataaaaaaacaaggttgtcatttttgggacggatgaaatatttagtagtacgacggtaggaagtaacattctttttatggaaagttcagtgttgtagggaatgaaacgctggcaaaaattgcacactgctctggacaaccagatattcataatcataaatccatttattaacacacaacgactcaaaacaacgacatcgatcgaactcgcacacccagttacactcacatccatgctgaaaattaactatccacaagatcgagcccgcatgctcaccggcaacagttcaaatataccctctactcgatctacttcacaccggattaattaattgcacgtaattaatcgtgatcgatcatggcttggcctctggctcggccgggaagtggaactcggggacgccggggaactccggcttgggcggcaggtcgacctccgggaacggcggaaggtgagcctccgggaagaacggaggcagctccaccaccttgggcagcggcggcagctcgtgctccggcaccggcagctccgggaagacggcggccgggtggttcggctcctcctgatcttcctcctcggccggagccgtcgtcgacgacggctcctcctcctccagcctcctcgccgccgcgccgctcgcggcggcgcacgccagcagcgccgcgagcaggagggagatggcgatcttggaagccatgtcgttatttgcacgcactgatcagtactgttcactgatcagtttgcctctatttctgtcctgagatgttttgcaatgtgaattgacaaatgcgtggtgtaattaatttataggccgcggaaagcgcaaacacacgcgcgttgatggagtagtggttgatctgcaagtgttcttacttaaattcttagtagtggttggtttctgtgtgtttttgtctatgatttggttgagaaagaagctagtcgggttggcgagagcgccgcgcagatcctgtgtacaagggacaggtacgagaacgtatgcaatgctttgttggtcaccgccacaccggttaattagcaggaaacaagaacgtctaagcagggaagtagagtgccaacaaccggtggtcgagcagcattgttcgttctatcactgttaaataaaaaaatttccactctaggcagggtcgcaaggccgatgatagccgatcggttttcacggttttcgatgttttgatgtggcttgaaattatttttgggttggaatattcaatattacatattgatctatcttgtcaatttttttgaaaatttttcgtaaccatctagttgacatgcaataaacgggtggacgtccactcgagctattagaatacatctctgtggtcgaacaacattgttcgttctatcactattaaataaaaaaaattctctgggggcggagctccaaaccccaccgtgcgcgcggcatcatgctagatactagtaacaggcagggttcacagagcagatgacagccgatcggttttcgtggtttttccatgtttcaacgtggctcgaaattaatactccctctatccagaaatataggggactttgtttcattagtttgtccataaatacagtggatttctctttttcaagacaaccaaggaatgtcagccatccaaaatcaaccggtttctgtcaggattaaaaagataaagaaaacgtactagcactactactccacactgttcttggcagaaactaaaaataatttcagaaaacgtactggtactactaatttgtttattgtgcctaggatatcttttcagagaatgtactacttactcttccttaaaattttgttattttaggcataataccttatattccgggacggagagagtatttggttggacttttcaatgttttatgataaatttaagggaaaattggaaccatgccattataattttgcaaaatttaatgttttatgataaattttgatcaaatttaaatgtcaagcattaaatttgatcaaaattcggtcaggatttatcgaaagtgtccttatcaattttgaggcatagcgatctgtaaggtaattttgattttttcctttttcattttttttccctcgtcatactcccgtcggccgtcgtacacgtaccaatgtacgatacatatcgtatgaatcttggtatacgtacgtccgagccgtacgatttgtgtccgaccgagtcatgcaaccaatcactgaacttgtttactaccatgtgggcccagacaaacagcatatatgcttatacatacactagtcggacgtataggtcggacgtatagcaatttcgatatcgtacggagtattctacatgcaccaccacgtgtggcaccattctacgggggtggctaattggcgtgcacacgctggcaccccctcccccgcgtgattttttttcactttctttttttatgctttcattttgcttttttttttatttttttaaatctttgttttcaaatgtttgagttaaaagttttaaaatcttgatttgaaagtttttaaatcttaacttaaaaattttcaaatttagacttaaaagttttcaatctcgagttaaaatttctcaaatatgagttaaaagtttttaaatctgtgttaaaagtttttaaaatttaacttcaaagtttaaatcttaaagtcaaaattttataaaactaatttgaaagttttcaatcggttagtaaaaataatcttccagaaaaaaatattatcttaactattgtcgttatataaaactaatttagttagttaggctaaactactcccgaggtggtgcgcgccgggtagctaaatgggtgccacctatttactcaccaatcttaaagcatggacaaactgtaaagtaattttgaattttatttctcatcgtattcccgtcgtatttctgtggtacacgtacgatgcgtattgacggtattgtattctgccgcatccagagcctcgttccctcccctccagtccaggcctccactacacatcctcgaactcccctcttcgccgtcgctcccctcagcgtcgccgccgtcctctgcccgtgtgccgccgccgccttcatcctcatccgccttcacgccgccgccgccgccgtccgtgttcccacaccgctccggtattcctcctcgcctctgagcgtcgtctgcccaatctctggagtcgacaagattggtggtggcaaccgctccgtctcaccgccgtcggccgtcctccgccaccctcccgctgcctctcgtcggtccaccactacgtctaggcgatttccgcctcgatcttgctcgcccgtaaggtgttcgatgaaatgccgccgtcggggctttttcctcgtcgagcccttgccgagggagccggagcgctgggcaggtcactccctcttgtcggcggtggttcatggacgagactggtacatggcggcggcggggggtctgaggcggaaggcgaggagttcccgtacgccgacgtgccgcggcctgggaggaagtgggagcggaagccgtacgtgacgccgatgaaggtcctcatccggcgggccaaggaggagcggcgcgcgcggcgggagaacccgtgccgcgtgctggagcgcccgccggagaacggcctcctcgtgccgggcctcgtcggcgtcgcgcaccaggtgcacggcgcgtgggagagcctcctccgcgggctcaccaggctcgtcgagggcggcgccgtcgccgtgaggcggtgcaggttctgcccggaggtgcacgtcggcggcgtcgggcacgagatccggacgtgcgagggccccggcagcgcggcgaggaacgcgctgcacgtgtggcggccaggcacggcgcgggacgtcgtcggcttcccctactgctaccacctgttcgaccgcgtcggcaagcccagggtgtcgcacaaggagaagtacgacgtcccgaggctcccggcgatcctcgagctctgcatccaggccggcgtcgacgtcgaacgctacccggccaagcggcgcacacgcccggtatactccatcgaagggagaatcgtggactttgagccagacgacgacgaagatgacagcgccgacgacacaggcccatcgctgccttctcttgccgccgatgaagccggcaagatggaggaggagatgacggtgtgcgagctgggtgcacggacgctgcagtcgtggctggacatgcgcgccggcgcggcgaggctgatgggcaagtacggcgtggtgacgtgcggctactgcccggaggtgcaggtcgggccgaaggggcacaaggtgcggatgtgcaaggccagcaagcaccagcagcgggacgggcagcacgcgtggcaggaggccaccgtcgacgacctggtccggcccaactacgtctggcacgtccccgccaccggccatggtggcgacggcggcgccccgccgctcgccaacgagctgaagagatactacggcaaggcccccgccgtggtggagctctgcgtgcgcgccggcgcgcccgtgcccgcgcagtacaggagcatgatgcggctcgacgtcgtgccacccgcccgcgacgagcacgacctcgtcgcctagagcacgccgcccgtggcgcgccgcacggggttcgacacgagatgggatcatgggaatggctcctcgcctggcaatggctcctaccacttactacatatatacatctatatacattgtgaatgttgcaatagttaaaatccacaaatgtgggttccatctatatggattactttagctatatacattggtgttgcccttgcaacctgaggagatcatattcactgcaacagcagaaaaggacgcattcttcttgcgaattgcaataagatgagaggggatggaaggaagaaacttgtgggctgttgtacttgtgcccacatttctccaagtcaattattcgagttactgcggagtggagaaacattctgaatgatgcatatcgttgttgctgctgcttcagaattggacaaacataaatgaagaagtttatggcaactttgattgagaatgaagagattcgatcagatgaggttttcttgttctaccacagtggatcttgacatcgacctgaaagtcatggcaattttgattgaggaggagcaaatttgatcagatgagttcctttctctccctcttttgttaccacggattaacatttaaaactacgacattgctttctcaagtaccataaaatcacacttattcccaagtgcatttccagcagcccgagcacagtgaaccctggaatggtgaccaccagttgctcctttgcttcctttggaggagacactcgcgggcgctgctagcacgacggagatggccatcttgttggaaggcatatataatccagctgaagagatttcgagctcgagttttggacgtgtgagaaaagggagatgagcagtgcaacttgtatacgccacagaatacgacgtccttgatctgcaagtgttcttaattggtggtttctatactttatatggtttttgcctatgatttcagctatagcaccgttggtttctgtggtttttgtccatgattttccgcgagaacaccgtgcgtatccagtgcactatgttcagaaagtaagcgacagagcctgtgcagaagggacaagtatgagaacgtatatgcactcctatgagaacgtattcaaggagtgcatattggcgcaacaatctccgccgccgcagatgctttgctgaggagttatttttgttgcaactcctagtttctagtagcttggctaataacctgtaattgtacactaatacaaggcagggatcatcattgctttgctattctcttcgccaaaatcgtacggatacgcactctcaatgtttcatttctacaccgttaagcattcagtttattcaagtaacactagtacgacaacctagcagtaaccttcactataaaagcttcaactatctaaaagaccccaaacaataatttagaatatatgattttctgaggtaattccacgaaataaacaaacaagagtgataaacaaacaagagtgataggtttcatcagaaatgtggtgctttcccttaaatcatcttccttgtgcataagcagaccccatctgataaattatgtgatgtattgaatctgccaaacgattacacattgttccctaccaaaattggcacagcttccttttgcaggtatctttccatacataacattctgttcaattctgaacagcagttagatactagatcctggatatcaaatcaggatatttttcaatcaattgagatgaaaaatgtttaaacctggtcaaaaacgagggaacatcatcacactatttcaatccctgaagctatacacagcttggaatcagctcccccactgatgacgctatcccctttccaccagtccgcacataaaacctataatcaccaaaatttaggacctcgccttttgttcaaacatgtaaaaataaataccacaaaaggaataccttgtctttgtgtgactccacagaagccagtggccactgcaacagaacagaaccattaatggtctatggcattttgataaaataacttgaagagaaaagagtaatcaggaaggaaatatattattagaatcttactgctgtccttagatcccacaacattactttcccatcaaatgaagatgataccaaatgaaaccacgaacttggatgccatttgcaagcactgatccagcttttatgggaggaaaactgaaaaattggagctagagttcctgtttgaggataaagagtattagctaatttgaattccaaaagataattagagcatggttttgcttccacatttaccaggtttacgagggtcccataccctcaagacagggtcagagccaccagcagcgattagtgaagagctctcaccaccacaatccaagcaattcaaggccttcccagatacctatggaaaatatttacagacatcggatgaattaatttgtgaaacagagcaagagagtagcaaaagctttgactctccttggcaacagcacttttttggacagtgtgcagtagttaaaacatagctagtgcctttctaattcaaagtgccagattccacgaagcaaatttcagaggaactcaggacaagaaatgtgcagatgccaattgatgacttaatgagcacaaaaaaaaaatcccttgctgctattatgctggcagaacattatcatcacgctgtccatgcattttaatacttttatttttaaatgtgtagatattttttgcataccatattccatgtctctttccctgtttggacatcccactgccgaacagaatggtcccaagatgctgaatatattgtttgtcgctcaggccaggtaacagcagaaacgcactgcgtatgtcccagaaatgttgaagtggcagaaccctgaagtgcaacattccaaactgagatcagcagggttgtatcatgagttcatgacaataaatagtataaaacttcacaataaaagaattgccagaattaaatctcccccaaattttagcaggtgcatattaaaaattatcaaagcactggaaattcaaaatcaatacccagcacattataaagccaaataactggagccaattaaccaagagatgaacatattttagtacttcacatgatggcaccatgcacataagaccaaagaatttggactggaaagtaaaatgacctcaaacagagattcttcaggtccagatgaatcagaatttgtccttctcttcttcactgagacagtgtcaccatcttcttccgacccttcgactgaccatagcttaattgagttatcccaggaaccagaacatatctagttacgaaaaaaaatacgttaaaagggccttagaataaaatactaacatatagcactgatttggaagaccagaaggataattaccatgtttgtggaagggtctactgcaacactctgaacagatgatgtgtggccacggagaattttgtaagccccaatttgctttggaacactgactgatgtatcaaacttgagatccaggagtggagaataaatgttaagattggatgaagaatattactcatgaagcatgtcttggagggaaaggcaaaatagagtatcttactatctttaccttgaataagcgcaatgacctatcctttgatgcagtgactacatgcagcctgtcttcagtttcacctggaataacattattggaattagtagatatttaatatactgatgttatatactgtttggggaaaacaattagtataagggcatgagtgagcaaatatgttgtgtgcaagataacctttattaatgaagcgagcagaagtgattccgtcactatgtccttccaaaatatgtgtacattcagatgcatctctccatattctgggcaagaaaaagcaaatcagaaggttgagattgaagacatacaacagttggagttggtgttacagtcattttgtctaaaggggtagaattaaaaataataatagcatagacatgggagatgaataccttgcaagaccatcatagcaacctgttaatacgaaactgccaaaagacgaatagtttagtgatactggaaaccaagcgaaagaaaaatatgagaaaaggttaagaaagaacagtacatttgaattatcagcctatgatctattgtatacatatgtaaatgtattagttgcataatagtaatggtgataagtatggaaccacaaggaagacaattttgcgaagatctttagttgggctagcggtaaaattatgtggtagaataagagcagtatgagattaggatccaaatttagatgtagtattgagctcatacatggacttgttttgaatgcatccttcattttgtcttcttaagataggtaaactgtgcactagtcgagataggtgaactgtgcactagtcgattttagcttagccctgggatgggcaaatctttggctccacagtccattttagttgagttaagaaattttccgcagaatttgaaaatattgatcagcaaggtggactagatctaaaatcatttgaccacaagagcaatgttgctgataaaccttcttgtaataagtgaagacaatagtgacaaaatcagcaatccaggtatagttttgaattatctaaaagattaataacctgttatcatgatgctagacaaacatttgtgtcctgctatttgctcgaagcatgtcctatggaaaaatagaccacctaagtccacgtaaaacagaaaccatacctcgggttcgatccatcaactgcgctaacccagtcatcatgcgggcatggatcctcctgcttcctcggtgccacagcttttacatattcaagctcaagcaccctctcctgcaaaaacgctcacacgataaccccgcacaatgtcacagaaaggtccacaccacagcacagcggaattctcccccaaaaaacgaacatcgggtcaaaaattcataccactgagatgcccttggcgaggaggaactcctggagcgggagccgcacgagctcgccgtcgacgaggaagtcgaagggctgcgcctggtgatccggggaggctgcccaaaccggaggaagcgagtcagagagatccgaggtccatccgaggggacgcggggggctagggttctggaaaggggaggtgctcaccggcgaggaggaggctgttgacgatctcagagaggcccatgcgggtgaggtcggcggggacggcgatggaggtgggcggcgcgcgcagcggcgcggggagcttcgtcaggaagcgcacccgcacctggcgcgaggggtcggaggcgccgccggagtccatggcggcggcggcggcgtcggccggcggagaggaggcggaggaggcggcggcggcgggaaggggagggaggggttttgagagggtttcgaatggggaatttatttggttagggttttggaggatgtagggcccagtagcagtgacatcacgttcgaggcaggcggccagaaggggagaagaagatgtccattttgcagaaaacccctccaactatgtgtatgttcaaattggtaccaaaataaatcttaccaaaatttagcaatatcaaaattttggtaaattgacaatattgttaaaattttggtaggattttcttaataatgtcgtcaaaattctgtacacattgtcaatattggtaacaaactaaatgtagccatataattattaattttaccaaataatggtatagttgaaaatgtcatcaatttgaataggccctatattctgacagtgtttatgtgtatgaaccacctcaactgttaattcaaatattcaatcgcattactccatttttcataatttgcactatagaagtacccatatatctcatgattggaaatttagggataccaattgatacaaggttaatttgcaaaattcaatcgtcgtttattggaaatttagggataccaattgatacaaggttaatttgcaaaattcaatcgtcgtttattttgcaaattctaaatgccttcaacggcaactttagataaagatttaacctattataatctctagaacaaagtcaaatttatagagaggggcacttttacactggaaaaagtccacttccttcaaccatgggttgaatttcatttacgtcccttaaccgtaaaattgaatatgaaacatcccaacatcataatcaatgtaaatcgagtctctcgattatattaagggtacttttggctgacgtgaagactacatgtcttattaacttgatctctgtcctacatgacgcctactagcgtttacatgatgctagaataaaaaacaccgatggaacccacacgttagtggtaatttagctacttttttggaacaagtatgtggggatttggttaaaatttttggaacaaatatgtgaggccacatgtcaatgggtgtccggtgaaaaaaatgcaatggatccacgtgtcatcacccctctctctcctcttctcttcctcaatattctatctccccaatcttctcattggtagccctagctgtcagccaagcaacgtgctcgtcgtcaatactggcggtgagggtggtcgcggcctttgtagtgtgtggacaacgattcccgcatggccttggtgtgcacatcctgagctccagatctagacgacgactgatgtattttgttggaagaggcagggagtgctcagtggcaacccagcgtcctcttcgacaatgtacaagtcaccaaccgaaggggtgattaggacccacctctagcatctccgtgccaagtttgcgaattgcgaccactggcaccgattgacgatgggaggagctcaacagggaagagagggcctttttatctttgtgattgacatgtgggtccaacaaattctattaatatttaaggtataattatcacttgcatgcagacaacatatggcgccaacgttgcctaaaaaccaggtcaatgtgtcactacgtcccatatcagccgaaaacgctgtcaatattgtcgagagatttgaattgcactggttttgaaagctatgatgctctgttccagagtttctggtcgaggtatgcgaatcaaactcgaccaatactgaagaacgcagaatggacctttttagcttttcccacgctacctattctagcccaagttagcccacagatatcatatatcatataggaaaaagtacgaattacctccctgaacaattgcggtcgtccaatttaccaccctaaacttcaataccagttattttttaccctaaactttgtaaaccggatgaattacccccctagatcgattcatagcgggtttggtcctacgtggacgcatacgtggcagtctagtcagccaaaacagataaaaaaatatgggacccacctgtcagcccaatccctcttcttctctccttctcttcaccccttcccctctctctctcactccatggcgcaccgaggcaggcgacaaaataggcagcggtggcggcgaaagaggccgcggcagcagcagcggcggtggcaacggaataggcagaataggcggcggtgagcccacttgtcgtgtcggcgcagcggccgaaccaaatcaagaacgtcgtgtcggcgcggcggcgcgggagcgggggcgggggcaggggggagcggcggcgagcgcatgctgccggccgcgccgcggttggcttcccgcctcgccggcgtgctgtcgcggtcgtcgtcagggcccaggccgaggcgacgtcgtcgtcgttcgatcgatcgatctgcagcggaggtggagccgacaaaggaggagacagccatgtcgtcgaccccgacgggcggcggcgcgggcggtcggcttgcgagggccggtgacgggcagcggcgcgggtggtcggcacgcaagagtcagcaacgggcggcgtcgaggtgctcggcgacgaaatcctccgcgagatactcctccccctccctttccccaccgcgctggtgagcgccacgcccgcgacgccggcttcctcttcgtcgtcctgggtcgcacgccgccagtcttcctctccgccgcctccgcctccggccttgttcctcccgacggcggctgagcctccgccgagtgggagctcgtggactgccgcgactatctcctcctgttccgcaaccacggcgacg

SEQ ID NO: 6687 - DNA, 6129 bp, Oryza sativa
tgaggcctttgaggatttctgcattggcgcgctccacttgaccattgcttctggggtgggcaggtgaggcgaagcagagcttgatgcccatgtcttcgcagtagtcgccgaagagttcactagtgaattgggtgccgttatccgtaataatacggttaggcactccaaaccgggccgtgatgcccttaatgaatttaagcgcggagtgcttatcgatcttgatgaccggataagcctcgggccacttagtgaacttgtcgatcgcgacatacagatactcaaacccgcccggggcccgcctaaacggtcccaggatatcgagcccccagacagcaaatggccatgaaagtggtatgatctgcagggcctgggccggctggtggatttgcttggcgtggaactgacacgctctgcatcgccggaccaggtcgaccgcgtcattgagagctgtcggccaatagaatccttgacgaaaggccttgccaaccaaggtgcgcgaggcggaatgggctccgcactcgccttcatggatatcggcaagaagctcaacgccttgttcctgaggaatgcacttcaggaggattccgttagccgcgcgccgatagaggatcccttctaccagcacgtagcgtttggaaatgcgttggacgcgttcactcccttcgcggtcctcaggtagagtcttatctgtgaggtatgcttggatctcatagatccaagcaatcaatctaagggagctaggagcgctcccctcgggtcccgaggcctgggctccgacgggcctcgggggccgatcaggcgcgtccgtctcccttaaggggtcgggtcgcgccgacggctgggcaagcctttcttcaaagacgcccggtggggtctgggctcgcgaggacgcgagtcgtgagagttcgtcggctatcatattatcccgtctgggcacgtgccgaagctctatcccgtcaaaatggcgctccatgcgccgtacttggcgcacgtaggcgtccatctgcgggtcagagcaccggtactccttacagacttggttaacaaccagctgagagtcgcctaacaccaagaggcggcggatccccagtccagctgccactctgagtccggcaaggagcccctcgtactctgccatattattggtcgctcgaaagtcgagacggaccaagtatctgaggacgtctccgctcggagaagttatcgtgacccccgcaccggcaccctgaagagacagggagccgtcaaactgcatcacccaatgggcggtgtgaggcagctgcgaggggtccgagctggcctcagagactgaaacggtctctggagccggggtccactctgccacaaaatcggcgagggcctggctcttgatagcgtggcgtggttcaaagtgcaaatcgaactcagaaagctcgattgcccattttaccacccgtcctgtaccttctcgattatgcaagatttgaccgagggggtaagacgtaaccacagtgacccgatgcgcctggaaataatggcgcagtttcctcgaggccatcagaatagcgtaaagcatcttctgggcctgagggtatcgggtcttggcgtcccggagggcctcgctaacaaagtagacaggccgctgcacctttcggcggggccgattctcttcgctaggggccatatccccggggcgctcttcgtccaagtggcctctcggggcgcactcgctttctgtgccgatgacctcggggtcggaggaggacaggggcggccttcccacagtggcctcggggccgtcctgggggtcgggggctcctggcgtcgtcggacgagcgggcagaggcccaactccggtcgtcaggggccttaggccaccgttcggctcgggggcctcttctccctgctctcccctgggtcgagtccgcacagggttagcctcggggtcaaagggcgataggtgcggccttcccgcagtggcctcggggccttcctgagggtcgggggcacccatcaccgtctgacgagcgggcagagggccgactccggtcgtcagaggccttaggccaccgttcggctcgggggcctctcctccctgctcgctcccgggccaagtcagcacagggtgggggtgcgcggaatgaggattgtcctcatcacgctccacaaccaacgctgcgctaactacttggggggtcgccgctaagtagagtagcaggggctcatttggctctggggcgaccagaaccggaggagagctgagatatgccttcaatcgaatgagggcatgttcagcttcctccgtccaagcaaacggcccagagcgtttgaggagcttaaataggggtagcgccttctctcccagcctcgatatgaaacgacttagggcggccatgcaaccggtgacacactgcacatccctaagtttgctggggggggcgcatccgctctatagctcgtatcttctcggggttggcctcgatgcctcgggcagagaccaagaacccgagaagtttgcccgcaggtacaccgaatacgcacttatcggggttcaattttatgcgggcggagcggagactttcaaaagtttcggctagatctgagagtaaagtctcttggttgcgcgtctttacaaccaagtcatcgacataagcctcaacattacgtcctatttggctacccaaagaaattcgagtagtacgctgaaaagtaggacctgcattctttaacccgaagggcattgtcatataacaataggttcctatgggggtaatgaacgcagttttttcctcatcctccctagccatgcgaatctgatggtaaccagagtatgcatctaaaaaacacaaaaggtcgcaccccgcggtggagtcgacaatctgatctatgcgaggcagggggtaaggatccttaggacatgccttgttaaggtcggtgtagtcgatgcacatccgaagcttgccgttcgccttaggaacgaccaccgggttcgccagccactccgggtggatgacctcgcggatgaatccggcctccagaagtcgcgccacctcctcgcggatgaaggcttgacgttccggggcctggcgccgcactttctgccggaccggccttgcgcccagccgtacggcgagacggtgctcaatcacctccctggggaccccgggcatatccgccggtctccatgcgaagacgtcaacgtttgcccgcaggaaagagacgagcgcgtcttcctatttgccatccaagagaccaccgatccgtgtggtcttggacgggccgtcgcccaggacaacctccttgaccgggacctcatcgcacgtgactatccgctgcctcggggcggcgggggcggatgtaccaagcctctcgtcgccaccctcgggcttggacacgacggcgaggcggtccgcgcgctgctccatacaagcgagcgcgactttgaggtcgccatggacagagatggggccatcggggcccggcatcttcatctggaggtaggcgtagtggaccgccgccatgaacttcaccaacgcgggcctccccaggaccgcgttgtagggcagactgaggtccgccacatcgaagttcacccgctccgtgcggaaattggcgggtccaccgaaggtgaccgggaggtcgatatgacctagcggccaagtgtgccccggcgtcacaccgatgattggctgggacggccggagcatcatccccggggccttgatggcatcaaaggctgcgggggaaaggatgttgagggctgctcctccatcaatgaggacccgccccaacttcacgttgcaaacggtgggggaaaccaccatcgcaatctgccctccccgggcaacgcacggtgggtggtcggtctggtcaaaggtgagggcaacctccgaccaccgcgcccgacgcgtcgcctcatgagtaggggccccggccagaagctctcgcttcatagccttgaagctccggcgagaaacgtgagcacacgctcctccatcgacggtagcaatggtggccccaggctcttgaaaacctaggtcatcatcgccatcatcgatgtcctcggcgggggccttctgcttggcctcacttcgccgatggccggaaggaaccgccggggacttgccttcccggcgctcctgcctcctctcctcctcccacttccttgtccgctcagccaagcttttgactgcgcgacagtccgcaaggtcatggagggaggtgttgtggacggtgcaccacttgccggtggggcgctccctgctgggagcgctggcctccttctttttgtcgctcgcaggcctcccctttcgggtggcccgcgaagcgccctcaacggcgaggacatgaccctcgtcgtcggaatggactgacctctttttcctcctcctgtcacgccgccctgtttgagcagcggatccgggggcggccgaagctgccacaccggaaccggaggggttccaagtccaggcctcctccttgcgagccactcggtccgcgagctgaaaaagctctgcggtagtctggggctccttggaggcgatcttttcgagcatgcggttgtgccgcacgccccccctgaacgcgtaaattaccgcgtgtgcagggatgcatggtatggtgttgcggacttgacagaaccgctgaatgtacgagcgaagcgactcatcatcccttcgctgtactgcgtgtaagtccgcttcttcacctgggcgcggatatgtgccctgaaagttcatagtgaactgctggcacaaatcctcccaggagtggacagacgcgggtggcaagttcattagccaaccccgcgcttgccccttcagggccatgggaaagaaattcgccatgaccctgtcatcacccccggcggcctcaatcccggtcgtgtagacctggagaaactcggcggggttgatgctgccatcatatttttcggcgatggtgggccggaaccttgggggccaacggacattccgaagactcgccacaaaggctctacagccgacaccaccaaccgggggcacggagggctgatccccacgtccgtgtcgaggtgacactctggacgaggaagcgccctccgttgcgtgggcagcacttcggtcattgcgccggcgctcgatgctggtgcgggcgtcctgctccccacgcagatcttcccgggtcgaaggagtcgacgaaggagtggcagccgaacggcgaacagcggctgccgctcgtcgtgccctccgtcttgacgatgcggagccggtggtagcagcaccagaggccttggtggcggaggaccgcccaccagcatctaggcgctgccgcgccgtcatgaccaatttggccacgtcgtccagccatcgttgggctggagactccgggtcagggacgacaggcgggtggcgtaagagcgcgcccgcagcttggagcgcgccctggggcgtgctgccgtcgccgtagacgaggaggcgacgctccccatctcgccgttcttttccgtcgcccgcgatcggtgaagtcgcggatctttcgaccctctcgagcgcctccccctgcttaggactttggcgtggagggggcggtggagtacgagctcgacggcgtgggttcggctccccgtcgtcgccactcatactcggagagaggtcgtgcgcctttgcttgctcggccatcaggctgaacaggaaaagcttggcgcacagggcagagtgcgagagctcagaagacacacgctgaaccccctacctggcgcgccagatgacggagcgtggggctcctcaccgggagaccgcacaggcccccctttgccggttcggccgggggctcagggtgagatcccaagctctctctgtacgtggaaagatcgcgacctatcgaaagagcatgagacacaagcgatgtatacaggttcgggccgctgagaagcgtaataccctactcctgtgtttttagtggatctgtgtatcaaggagctacaaagtgtgagccaacctccccctttgttctaggttccgaatcaggaaagaatccaaaaaatcccccttctccatgggcaaggtcctccttttatatttcaaggggataccacatgcaccctccctttccaaactggacttttcttctcttcataaatggacggagatttgcacggttgccctccga

SEQ ID NO: 6688 - DNA, 580 bp, Oryza sativa
aaagctacactacaagcccagccgttgcccacgctggcttgtggtaagtacgataagttcttccagggcatcccgcgaaccggtccttaactgccatgagtgcgaccagcaaaaccatgcacccacagcccaccatgtgattcattttattaaccaacaccagagcggtggtactaatccaacattaccattagaattaacagtctaaacattaatatgattttccccattgtgaactagttgaactaagcactgagagatcccctcataatttccccaaagcgtaaccatgtgtgaataaattttgagctagtagggttgcagccacgagtaagtcttcccttgttattgtgtagccagaatgccgcaaaacttccatgcctaagcgaactgttgagagtacgtttcgatttctgactgtgttagcctggaagtgcttgtcccaaccttgtttctgagcatgaacgcccgcaagccaacatgttagttgaagcatcagggcgattagcagcatgatatcaaaacgctctgagctgctcgttcggctatggcgtaggcctagtccgtaggcaggactttt

SEQ ID NO: 6689 - DNA, 1519 bp, Oryza sativa
gacgcgggggagtggggaggagagagaggcgggattcggttttcgaatcccggccatctcgggcgcgggcgcgagcgggagagagaggggaaaaggcgcggagagcgcggcgcacgcgcgggcgtggtcgacgtggcccggagaaggcggaggcgtgggcgcggcgacggttgcgggcgcggcggcgcgccggaatcggcgggaggagggagacgggtccgacaggtgggccccacctgtcggcgaccccgagagaggaggcagcggggcggcctgggctgccggactgggcctcggcctgcggccggcccagcaaggaggagggaaggaaaaagggaaatgggccgacggcccatttgacaaaaaggaggaaaaagaaaggaaaaaagaaaaagaaaaggaaaaaggatttttccctggaataaaatattgcttgctcaattttaattggttaaaattatttctagagctctgaaaattccactaaaaatcctgttaatgaattttgacatgtagaactcaagaaaaattccacatgtcaagtctgattattatttgcattactttctttagggttttctcctgatttcacctgcattttcttagggtcatttgcaaattaccattttgacttgggaggaaaacttcggggtgtgacagggctagtgcctggggagatccacatgtcgagactggccaggccgggaacgtggtgaccgagggttatgggtgacccaattgtgggtttttgccgattcccccccggagttcaccacgccccggggcacggctcggttctgggccccgtttggcgatttttagccgacccgagcccccgagggcaggattgagcacgagtgacctatttcaagtcaagattcttcaaaaggaaaaaacagcacagatacaacctttaggaaattgaaactgcttttattgaaattctgaaataagagaaataagaaagtgcatgtgtggcagcccccggccaaccctgcacgcccgagggggtgcggggttggcccgagcctgaaacctaacacccgacccccccctcaggggtagaagcgacgaaggtgctcgatgttccatgggttaggcaactcagtgccgtcgcccgtggccagccgtatggagcccggccgggggacgccgatcactcgatacggaccctcccacattggtgagagcttgctcaatccagcacgcgtttggacgcggcgtaagacgaggtcgtcgacgcagagtgatcgggcccggacgtggcgctgatggtagcgccgcaggctctgctggtagcgtgcggctcggagggccgcacgccgccttcgttcttccaagtagtcgaggtcatctctacgaagctgatcttgatcagcctcgcagtacatggtggtccgaggagacctcagggtgagctcggatgggagaaccgcttctgcgccgtagacgaggaagaaaggcgtttccccggttgctcggcttggtgtggttcggtttgcccagagcgccgctggca

SEQ ID NO: 6690 - DNA, 678 bp, Oryza sativa
attggttgtcattatgccataccgagatccatcggtgtcgaacaatagagcccacttctccttaggctcattctcaatccactgagagaaatttctgatggccgaccctgacctccttctcattgttggtgggtcatcatgtaatgcactaagaggtatgggaggctcgtcaccttcaacttgtggtctgcgagattgctcatctgtttgcttcgttgtcaactcatccaacttgtcccacaactcattaaatttcttctcttggttctgtgcacagagcctcttaaagagatccataagatgcttgttcttgaattgcttgtacaaatttgcacccatgtgacgcatgcaccaccgactccgaacatcaggccacttagctggaagtcccttctcatcccaaccgttctgcaagtagtcaatagcccgcaacatacccgcatgacgatcatgtataaggcaaacgttgggcctcatacgcaccactgcaatgtgcactctctctaggaaccagtaccagctttcagtgttctcactctctacaaatgcgaaagccataggtagaacctggttgttcccatcacacccaattgctgtcaatatctgacctcggtatttacctgtcataaaagttccatctatgcatacaacaggtcgacaatgcacaaaagcattgat

SEQ ID NO: 6691 - DNA, 4462 bp, Oryza sativa
agggcgattttgtactgtgctctatattttttttatataaatatcaatagttatcaaatctttttatattgaaaactatacaagactaaaatctccaagactggtaaaatacaattttattattttttagggcatatttggaatgttaccgtacaaatattttgttaatgccaaaatataagcaagttttggcactaccaaatatttggtatggtaaaattgcatttgatcatatttggtttgctgccaaaatgtaaaattgtagtgaagaatgttgtacataatctcaattctagattacgtattaccaattaataggcttccattttcgtgtgtggtgtggtagtgggaaagaagatatgaagaggttgccttcagattgtcaattatatagcgtcgttttcactgcaatatatgtgaactcaatgagatacattattcattagatgtgacaagacgatcacgcgtgggcgtgattcactttatgtcaacaggcagcgccgaaagttgatagtgataactcgagctgccgcttttcatgtgtgctgttgtggactgtgcgcgctactggatatggcactaccgtgaagcgccgaaagtgtgttgttgtgagcataagttgttcaagcaccatacgaatgaaaagaactacgtagacgagacaaacacaagtagtactgcagtagtaatagcaaaagtagtactgctttacaagtttgtaagccaaaagaaacggtcacataaggactgaagaggtagaacactactgacgaggcctcttacccctgtccctcctaccctgcgccctaatgtgcccctgggagtacgtgagtcggtccgggggtacggcacggccaacccgtcctgcctgtacaggtgtgacctctggctgctcctgagtgtgcgcctctggagctcctccaagctgagaggagcctagtacgtcctggtggtctgcaccgtgcaagtcgtcgtcgtagaactggctagtaggaccagtcctaccggcgtgagacgaagaggccccagtaccgaagatcccggctgcaaatcctgctggacaaggaccatcagtttcgtacaggtatttaacagtattaataaaaagtaaagtaccgtgtgggtgagggatcgacgctccgtgagaggaagagctggcgaacgcgcccgaagaggtggcgaacgcccctgcggagctcgcggaagcgccggtcgtgcctgcgaacgcgctcgaaggcatacgaggtcctgcgatgaggaaacgtgcagttaaaaaatggtgacacattcgtgcaaaagctgaaacaaaaatgaactaatatctgggctgaactgtaccgtgcgaaaccggtgctgtaggtcgcactgctccgaagctaggggcgctcgaagacaaacgaggtcctgctccgacggtaggaccgcgaggccgtgggtgtaccggaccagctggaggtacgacgtccacggcgctgcgacaggagaagacgcgcatgaccgcacgcatcttctcctgcatccggtcgaaggtcgacctctgctcaacgtcagtcaagtgcaaacctctgctcaacctcacctggactgcggtgatatcggcactgatatcccgtgccgcatcagcctatgcaagatggaaataaaaaattcagtagttgtcctatattatgcaagataaatgacataattgttggaagtaatacaaattggacgtaccgccacgaagtagtctcggtcacggtgcgtgggatacgcgtccgtgacagcggcaacgtgcggctctggggcgtctggagtgaaggtcacacgcgcacgagtgcgaggaaggtaccagcgaaggtagtcacggtagttctcctccgtgtgtgggaagagctcgttgatcacctcctctgtagctaacacccagtcgtcaacgtactgctgtacacgtggagcccaaagtgcgcctgctagctgtccccgtcgagtcaacctgtgaagagaggtaaattgtatggctcgatgatgtaattatcataaaaatttagaaatgaacaatccgaactcacgagtggtcggcaggggggacggtcggctgcacgttgcccggaaacacctgcctaagtccgaactgtctcatcacacgctgcgggcagtgaggctcaacgaaaatgtcgaacaccatcggcaggatggtgagccagtaagcctggtcgcgtgtgcacaaggacgaaagtcctagcggtgctctcgcagcgacggcctcttctgtgtacggctcccagatgacgtcgctcggctggagacggtcaaactcgaacacgaagtccgggtaaccacgtctcacctggacgtgagcgtaacgacgctgcaataaacatgatcggaattagacatgttatgtgaaggaaaaaaaaaagaagaggactgataaacttataacgcagcgaagttgcactaaccccacgtcgacaccagtaagtccccatcgtgggaccgtcctctggccactgcgcgctgcgaccaaccccgtagggtgcgctgtccaccactagtcgccctatggcaaacctctcggctgcccaaagctgaagcaacataggacagccagcgatgatcgctcccgcgtcagtcttcgtgcacgcctcacagagggcacggtacgtggctgctagcacggcagaaccccagctccactgcggcacgtcctgtggctgagcatccgcgatggaccgtgcgtagtggaccagccggaagtccacagcgtgcccgtgggtgctagtgaacatcacccacccgaacaaccacaacaggtacgcctcaagggagcgtcggaccgagtaatcatcagcgtcagggtgcagaaggtccgcctacagttaagaatgaaatgttagtacaaaacactcagccggtcgcaaataagcatgtatgataataacaacttatttacttacagtgaactggagcaaccaagccttgctaggcccgactgtagagtacggaggaagggtggtggtcggtcctaggtgtggaaggcgcatcacctgctcgaagcgcgcagtgatatcctccttccacccaaaaacaccgtcgacgggaccaactggtgctcccgccagcggtagcccgagcaggtacgacacgtcctgcagtgtcggagccatctccccacagggaaggtggaacgtgtgcgtctcaggtctccagcggtctacaagagcggcaaggagtgaccggtctgcatcccaccgcttcgctgggtcacggtcgtccgccgccgcctcaacaagcctacaaagtggtagaaggcctgccgcacgcaacctgtatagagcaaacttcaaacataagtgcaaaacaaagcaaagttgagttcaaatgtgaacatacgcgtaccaaggaacgtgacgggggtcgacacgcaaccactcgcgcgacgtgcgtggacggaaggtgccgagctgtgcaccctcgactgctgacaggaacgagcggtggttcctgtcaatcccacggttcaacagcgccggtgtgtcgtacgccatacctgcatcaaataggttgatcagaaacatataaataattagttcaacataagtaataaatgttcataagcgaattactaacacatattaaacaagagtacaaacaaacaaaagtgtttagtccgaacactcatcacgataacattatgatacaacaccgaatagttcgcaatactactagtacaacaatagtcggaggtactcattacaacaagattgaattgtaattacacgatagaagtatttagtccgaacactcattacatcattttatttcctaaatcgaaagcattgttacaccatggaatcgcctgctgcgcgacgacgccttggccttgcgcgcctgcttgttgttccttcaccaggtggtcgcctaccatcacttgcctgtccagatggactagcatctgcgccgcttggaacttctgcattcttcgggcatttcttgtaagtatggccgcgcagatcacacttgctgcagcgtaaagtcctcccacctgcttctgactcatccatatcatttctgatgcgtctagtttggcgtcgaccctttttcacccttaactttgatggatctggaatataaaaaacttgggcactcagcgttgtgtaagatcctgagatcccgaacccatatatctcctcactccatgtatgaaagattgcttctttcctgaaataatttgagacgtacacattgggagatatgccacaatcaccggcagcagcaagaacgtgtgagcaaggaaggtgatgaagcttcggcttcatacaactgcaggtacatccaccatccgccttcaagacacattcctgcacggcttgcttgcgatagataccacgcctgctcctatcaacacacattatttcataccgatgcacttgtgtgccttgagcaacaactctatgtctccgtgcctttttgattttat

SEQ ID NO: 6692 - DNA, 855 bp, Oryza sativa
cacaacacaactcaaaacagtgcaccgttcctggatcataatcaccccctctacaatcagaggcatggactccccagcgacccccatggacttctcgccacttcacagtctggcacactataatgaatcatgctatacaaaagataaagccattgcccatgctggcttgtggttggtacggttaatgtttcacaacagtagctcgcgaaccggtccttaattgtcatgagcacgactctcaaaaccatgtgctcacaacccaccattaatcatattttaattaccaattaattatcataacacgattaaccatcgtgagctaccattaaaaataaccataaataataatgtagtatatatgattcatcccattagtgagctaatgtttctaagcatggctaagcaattatatctaacatctagttgaaccaatatatataaagctcaactagtcaagttataataacccaaggtatcaaggaatagggtaatcaatgcaaactggccataataaaggaataggttcacaccacccggtgacattcaaaaataaatgcacagttgaaataaatagagaatttaaatatagaatcaacatgctcaaaggattgtgtttaggatctgtgtgacttgccttgcaataatcggtcttcaattaatcttcttgatgacttccgacgcactcacgaacctttgcaacgacggaaacgacaagctaacacgtaaaacgaagaaaaagactaataaaaaccaaataaacagtacataacaagtaaacaaacacgtagatcataattttagatgaattatgagacttgaacggcctcattctgaatgcaaatgaatttattatga

SEQ ID NO: 6693 - DNA, 2708 bp, Oryza sativa
acctaagtaggcgcgccacgccacatttaatgtggcgtatagcacgcctaaattggtctgtgaccggtcgaatgaccgacgggacccagggtgtcaggcgcactatcgcatgtgtcagggggcgtacatcccgtcctgtccagtcagtcatgatgatgagaggtcttagcctcccatcccggccagagtcggttcattcgctctggtcaattagggttcccgtttcccagtgcaaccaggagcccagaagactacacaccttaaatggtggttgacaggggcaccccccgtgttaggcggcaagatttggcaggcctcatcatcaagatggtatgcgcttgcttcccaagtcaagagacaagacaggcatttaatgcaaagattgtaatccttctccactaagttgtgtttttgggcccatgtggtaaccccttgaggtataaaaggaggtccaggcctagtaagagagagagagcttatgcccctgatgatcaacaccttctaccccaacaaggagatcttgtaatttctcacaagatcagctaagcacagaagtagggtattatgcttctcagcagcccgaacctgtataaaccccttgggtcagatctttttggggggttcaaccccatcttcacacatctacacaggaatctcgaatctcacccgctgccaaaccaaaaaagagggacctcacggttccctggtggaggagttcacctttcgacagccttgatgtgttccggtagcttcttctcgtctagcgtgtatgtgtggttcggcttacttatcatgcacgggtttaggtaggcaacaggcttttttatcacttcggcctccacgtaattcatcctgccaacaatggatgatcaaatgagctacgcatataggtgtagtgatctattaaaacgttcaagtctagcacttacagacaccagatggcaatcaaattggcgtccagcctcttcctacagtagagggaatgcatatcggagaaatggacttagagtagacaaagacctctctagaagatgttctcccccacagcaactgtgaatgatgaaatgcctttcatggtgcttgccctaatgtaccaatcgtgccgccttcttagttgccacggtccttctcttagtttccagtcgtaaatgaatggtttgtcattctcaaactcgtgtggctcatctagagaattgatatagttgagatagtgataaaaggtatgtttgaacccttttaattttcttttatcaaactcggcatttacgatatctttctcctttcctcggaatgccgttaccatatactgtttcttggacgcactttttgctttgtgcttgtgcgtccttaccatcactagcacatcggcatccttaggttcctctggttgcgatggctctggttgatcaggcattgtctgttcaggcaccgcttcaatttcacccgccgctagctttgtaggctccgcttgtacaggctctgatggttgtgcggaagacatttgtcgtattgctagctgtgattgttgctttgcaagcaccgattgttcttatgcatcctttttagtcggaggtgatgcaacaggaggctctgatcctggaggtgatgcaactggtggctctggtctagggggtgaagcaataggactatccctcggactagctacgactagtggacgtgatgataataccgatatccttggtggacaatcagttccttcagttgaccctagttcaatatcattcttgtgccatagtatgaattggtcgacggcatctccaaggtacacaatctactcagtagttggaaagtcgagcgcgtgcatccagtaagcctcaatgaccgtccggacctctaccttggcgtagtcatccggaatgtcttggcaatgaaacctgcgacctggtatgaacctcccagttgcaacgagtattttctttcccgccctgccgaccggaatcaagagcttgcacggagtatcctccgttacatcatcgaaaggatagctcagctcaggctctaaaacagcagcaccgtgcatcattttctgactccagtatatattgcattcgtcacgagctactgccctagcctgagagtcaatctcttccctgtagcgatcacgcttcttgtatgtatgagcatcctgtttgaatccatccttccagctagtctttgaggatactccccgtacacggccagagtgctccggtttgcccaaggcataggtcagctcgtcccagtctctatctggcacaaacgtccaggcctgttgctgcgtgatgatgttcttcatcttgacagctacctcctggagcttctgatccttgaatactacatccccctcagaggtgaaggccggtgttcttgcacgcacccagttcctgcttcgtgggttgtgatttttcataggaatcggtttcccagccttctccatctcttcatcttgttttgccatttcttcaccgcttgccggtaaccggtcgatcccaaatgatgtggatattcattccttcttgctagctcagccatcttctagctcttctccttttcttccgccgatgtcttaagggcaatgaactcatcccactgggcctgtgttatccttccgtagtccttaaacggcgtgagtcccttctacatatatttcttatttaggtctattttccagtttcgccacagcttctccatagtcttcaacgcatatt

SEQ ID NO: 6694 - DNA, 7420 bp, Oryza sativa
gggatgacgggtgggccccacccgtcatcgagggtggcgggcgggcccgcccgtcagtggcgcgcgcgcgggaaaagcccgagtgggccgcggggaagaggagagagggggagggaaatgggccgagccggcccaagagggggagggggggattttaaggtttttctttttataaaatcattttaactttgtatatttcttaataattattatttgtgctctgaaaattccactaaaatttatttacacattttaggcttttaggaaatatacaaaaatcctctaagccttatttgacttttaactttgcagattttaatttttggaggctttcacacggattttaattattctaagcataatttaaaggatgtattttagggtcgttttgggacgtgacaccattcgagagatacatgggaattctgaagtcctacgttcggaacagagcaaaaccagaggggagcatcattgaaggttacacgaccgaggaagccattgagttttgtatcgattacatggccgagactgatcctatcggagttcctatgtctcgccacgaaggaaggttggcaggtgtcggcacaactggtagaaaaagaattgttcccgatcaagcttcctacgcgcaggttcatttcgcagtgctgcaacatatggctgaagtaaccccatactttgagaagcatttagcgaaggtccgacaggacaatattggtcgatcagatatttggatcaacagagaacatggtgctcgcttcaacgaatggttcaaggatcgtgtagcacagtcgaccgatggcccaagtgagatattacaaaggttggcaaggggtccatcttgggatgttgacacatggcaagggtacgatatcaatggatacacattttacaccgtcacacaagatgagaaaagcacagtgcaaaacagtggagtccgtatagatgcatatcaggatcaagctggatcgagcacatactttggccgcatagagcagatatgggagctgaactatctgaacttcaaagtccctttgtttcgttgcagttgggtgaatatccgcacaggtgtcaaggtcgacaaggaaggcttcacattagtggacctggccaaggttggatatgcaaacgaaccatttgtactagcgaagcaggtcgaacagattttccacataaaagaccccgcaaacaagaagatacacgtcattagggatggcaagcaaagaattgtgggggtgaacaacgtcgtcgatgaagaagaatacaacaagaatcttcatgtcagacctcagatagaccttgacgatgatcccgaagacgaagtggcttacgttcgttcagaccattcggaaggcatatcactgtgaatgatcatctatgaaaataagtgcgttgttggatcggaaaatcagttggcataattgccaaggaatactcgcaacaaggattgttgtagacatgtcacaagggccttcagccgaacctgccgaaaccatcaaatcagcgagacgccaactgagtccacgaggttcctctcaagcgaagccaaaagacgaagtcaggagggttcgtcaccaagttcgaagggctcaccatcaagtttcccatccaggtgaagaagcaagaagggttcgccaccaagccgggagggctcatcgccaagtctccgctctgggtgaaggcctcagggtgaagcacaatgggttcgccccatggaagatgggtttcgctagggagaccagctagcagcatggcccatgaaggctgttcacctcttacgggccaggccaggggccaatcaaaggtcccatagttagaatggatactgtatgccccttttaatgtccctatccatataaattcccctgaacatattgaaccgtagagggtatgggcctgtagtaaggctataaatagcccaatagggccatgtaatgggggatcccctaaaaatttcataaattagcacgttgtttactattcaaatcattccaccaagagagccacgtcctttgacgtgaagttcttgtcattttgacaacaaggattagaatttactgttacaattaatagtttctttagttagggatctttgtagtgatttatgcaatagggagcaatgatattggtagaatcagatatttaccttacagtttgaaatcatcattaagtattgtttttgattgatcgtggaaactggcttgagtactgctcctgggactattatagtgctaagctaaataaagcccgtacaacgaagattggtacatgacttgtctctatcagtctgttgcatgaaatttaacgagcatgcttaggagttggagacgagggagaaatttaaatgatgagtgattggaggaaaaaataatactctagaattagacttacttttacaagttttgaatcctatgaaattacaattaatttattattatgagaaggatggagtaaataatggtccacggtacttgaacattgatagttcaaatattataggagcaaaatcaagagatagtaagtactataatgtgtgtttataggggtaaatttatgggcgctatcagcacatgcgtttgtaccgtgtattaaaaaaaatgatcagcataggtactcactggtgagtaagttgtaagccctcaaaaaagtgtgcaggggatgttccaccgccaaagcgtgttttcccgattcaatcattccatgtggttgttacgtgcatgcatagtgcgcaatagtgtttctgttgcttgtgtatttttttaagctctccaaacaactaaaaagagttttcatagagagcccaaataatgtgattaatgattgtcccattatgcagtctgaacatattagatgtacaccgaaatgcttgaaagaaaattatatttggtcgattaaaatctaaaaatcagttggcataattgccaatggatactctcaacaaggattactcaaacctctatgttgtaaggaggctacactaaatattttattattaattggtccaattagttgccaagccctttatgtatatgtaaggatattttgtgcattttttttaaaaaaatgtttcacgatcactataacatgcatggagtagaaacaattgacatactcatttgtaatttgtgtgtgtgcccgtatataagcatgcatacattcatggtacatcaatttggcacgtaggtgtagtttaatgcaagaattaatctgagtgtacgggtaaaacaatttgcatggcgggtacgaggttggtacaataacttaagaaataatgcaacaacattctttctatacacattcagtttttaagtaattattttgtcaatatacatggactaatttgtactaatatacttaaattttgcaattctagtaactaaagtcacttaaattttgggtttatagttgagagtgaaaaacaaattggtggtgcaaaaaggatgaggaacataattcttatatattaaattccagactgtaagctaatatccttcgaattgtgtaatgtcatatctaaagaagtggaagctgaaacatttcttgaaaaaagacgcgtccacgtcatcaataaaccttaaaacgtccggtatttttgtagatcgatgtgagccatcagattacctaaatggcgaaagatcataaatgtccgtcttgaaaattctattcatttgatattttactattttcccctccactcccccatccaccagtgttaaacggctcctcttctcctgccttagctgctctctccacaccgccacttttgcatcccctcgccgccaccgccgcctgcagccgccgcctctgactcctatccatcgcgccttggcagcaggctcctcgtctccctagccatactgcctccccatccaaaccgcaccgcgtcccccgtcggacccagacgcgcggagctcaagggcgctagactcggctaggctcacaacggttcaccgactcagcctactcgaccacaagctccgacgctgcctcctccccatctaaaccgcagctatctcatctcatcttacaccaacagcctctctcctcatcgccatcaatggcactgctgatccggacgatttctcatccaaatggttactatgcaagagggtttcttgaagagaccgaggaattagtgcatactaatcaccaacccgtgcgttgcatgggctattattattaatattataatattttagattctaattatagaaaattcattagatattttttaattatatcggtttaaacttaaagatatataaatcagatgtcaattacaacatggatagtataaactgaagaatcaaaagtattttcagtagtctgttattaactacaatagcctattgttaaatagggcattgttatttaatttttaatcgtacctatggtcatgataatacgatccaagtaagtactgaccagatttataattaatgttttagctcataacgagtgctctattagtttggtacactactacgaaaaccatctttcgtggcggtcattttgggtttccgctggcagaaatcgcagccgtcacaaagcaaaggccagtgaaaatgtcgatcttcgctagcagttatttaccgccagccaaaatgcatcttcgctggcggccgagaaaggaacgcccgccagcaaagagatctcttcgctggcggtagccttaggacggccgctagcgaagccaccgaagacatgtccttgctggtggcggacataacgcagccgccagcaaagaagtatctccgcttgcggtagccttaggtcggccaccagcgaagataattctttctttgataggaaacatattttcaaacaccaagtcaaagaagatagtagttcccatcccgggcaggcatgaattgaaataatagtttccatcccggataatagtgaatacatcctagcatttgccggcaaagccaagtaagcgtgatcagcgcttacccacaggaacatgaataaagatccaaattgcactcccatgactacacatgttccttgaataattgaaaactagaatcaaagaaccaaattgaaatcatattgcgcatccatggcaagcatggaacttgaattatttacccagaaccagaatccggaatattgaaacaagaataatgtcgtaaacataggataaacatgaaaacctaaatggcgtgaacaacaatatgaatataagcggtcacatgtcacatagaaatatatcggaaataaatagatagagcaaacaatccatgaatcacacaattagttcatcatacacttgcctccaaagaaaggttggtatcatgcacaatctgaaggaccactacctaatcacaaacaaaacctcagcaaacacattcaaacatgcatataaaacaatgaaaaaggtgaacctactgtcccatcccatcaaaacgcaataacaaagaacgccgtttggactataaacaagactgctgcttcaaaccttcatatcttaaaatatgaaaaggctatggccgcaaataaatacattttggaaatacgaaaatgctatgccattaaaatggtctaatttgcgctcgaaagaaggcttcacaatctgtccaaaatttcagactatccgcaccaaaacaatcaaaactggagttctactcgcccaatcagggtattcctgaccaatatggaaagctaagaaacacctctacaactttgtttataggcggcttgggtgattccactgtttaacccatccaaaaactattcaatctactactatccaaattatgacataaaaacaacagttatactaaaaaattcatatcgtctaaaccagttgagataaaaccgctctctttggtcagaagatagacataaatattatctacaacttcctaattatatacactttcacaaaaaatatcatttagtcctccgaaacttcgaaaaaccgaaacactgtaaatctgccaacgtgcagaacagccaattcgaaccacaacaacaaaactccttctctaaccttctttatccaggaattaaaccactaaaactaccatagaacaactgatacaacaaggggataagcctcacctagggttttccttctatatcccatgggaaacgacgaggaaactccgatctaacccctcctccttctcatctctcctcctcttcgttccgtttttccacattgcttcttgatccaagctatgaagatggagatctagggagggcaatttgttgtagaggggagatatgcgaacacatgaggaacaggaggaaggaggcgctggccagggagaggggtgggattcggtttcctaggttttaagggagaactaatgggcagggtttatgagccttctcatgttggcccacttataaagatatttttcttttatttatttctattaacatatttattttaacaagtcaacccaaactaaaaacctaaatatatttttttaatatacggggtattacaccttttcatgatgcctttgtgctatgtaagttttcctctcttcgggactcatcgcctttgtcggtgatatgggcatggggtctcaagaccagagggaggaggccaccccccaacaccacatggccctccctcgaggggagtctggcccgaggtggggtggcggccactccttcctagagactagatggaggaagctgccccccaatgccacgtggccctccctcgaggagagtcaggcccgaggtggggtggcggccactccttcccagagactagacggaggaagctgccccccccaatgccacgtggccctcccccgaggggggtcgggcccgaggtagggcgacagccactccctcatgtgactaggggtcgggttcccccgacgccctccgcgagtcgccacgtgcggtgggttaggtggccaccttcgagcgctcacctacccgcattaatggtgacctaagtaggcgcgccacgccacatttaatgtggcgtatagcacgcctaaattggtctgtgaccggtcgaatgaccgacgggacccagggtgtcaggcgcactatcgcatgtgtcagggggcgtacatcccgtcctgtccagtcagtcatgatgatgagaggtcttagcctcccatcccggccagagtcggttcattcgctctggtcaattagggttcccgtttcccagtgcaaccaggagcccagaagactacacaccttaaatggtggttgacaggggcaccccccgtgttaggcggcaagatttggcaggcctcatcatcaagatggtatgcgcttgcttcccaagtcaagagacaagacaggcatttaatgcaaagattgtaatccttctccactaagttgtgtttttgggcccatgtggtaaccccttgaggtataaaaggaggtccaggcctagtaagagagagagagcttatgcccctgatgatcaaca

SEQ ID NO: 6695 - DNA, 2645 bp, Oryza sativa
ccgcaaaaaaatgaaaaaaaaaacgcagtctggcctatgccgccccgccccccctctcctgcgtgcgacacgtgcccagtcgtgtgcgcgaattagggatcgctccatggcgaaaagttcaggacacacgcatgggtttttgctatataagaatctagatagatacctcccctgtgatgtgcaggaagccactcgagagctttctctttctgtgtgtagtgtgtgcaactaggaggcttgttccatactagtttgctaggtcatggaaaagagcgagattttcgtaggagcacactcatatgcagctatatgtgcttttacactcatcataggatggttagctcactgggtatacagatggataaatcctccatgcaatgggaggcttcctccgggctcaatgggcttccctattgttggtgagaccttccaatttttcagaacaagtccatcaatagacatgccaatttactacaagcgaagactggagaggttaggattcaaatagttaataattaactttttttggaatcagtatgctatatatagttaaactttaggagaaagaacattgttgatatgaagacactattgctctaaatatgaacaacacacacaataaatctaagttcggtgtactgaactatcaggtatggacctatattcaaaactaacataggaggccagcacgtggtcatatcccttgatcccgaggtgaaccagttcatatttcaacaagaggggaagttgttccaatcctggtttccagaaaccacactaaacatctttggaaagaagacactcaccacgtataatagaactgctcacaagttgatccggagcttcgtatgcaagctctatggccctgaaaacgtgaaaaaatcactcctgccagaactagagaactccatgagggaaagcttggcgtcatggataggaaaacctagtgtcgaggtgaatgatggcgtgtcaaatgtaagttaacatctgcatttctacataagtattcacaattgcacagtgctcataaaatcatcatgatgttttactatgattaatttctattgtgcagatgatcttcggcctagctgccaaacatttgattggcctcgacatcaccaattcaggagaattgaaaaagaactttcaggaaatatttcaagtgatggtttccatcccattcccaatatattttccagggacctcgttttaccgatgcatgcaggtaggtctttatatcatccaaatagctttatgaaaatacatattttaagaatattaataagctctctaaagttataaaaattgtgattcagttaccttgattttttttttcattcctaatgaagggtaggagaaatgtatggaccacactaacaaatgtaatgaaaaagaggctaagtgcacctggaaacaaattcggcgaccttgtcgatctgatagttgaagagctacggagtgaaaatccaacaattgatgaaagttttgctatagacactctatctgggctcttgtttgctagctttgcaccgctatcgtgcaccttgactacaacttttaagttcctcaacgacaatcctgaagtttttgacaagctcaaggtatgtatagttctttaggagtgaatattttacatgtatattgaataattaaagaggatcaaacattgaaattttgggctgatcctaaacaaaaaaattcgttgcatctaccattccaggaggagcacgaaatgatactgaagaaacgagagggtgcgaattctgggttcacatgggaggaatacaagtccttgaaattcagtactcaggtgatttcaagttaatgtatgcttggattgaagcatcattggtgccaccctgatgcatttggcaattgcttttaaattgagcttgtttcaactgcaggttgtgaatgaaattaatcgaatcactacggttatacctggtggtttcaggaaagcactaacagacgtgcaagtaaacggtaaaaacttttttttacaaaaacaataaggaaaatgttgtgcatgtaggtcatgcaattgattattagagtatttgcttttgcacacaggatatacaattccgtctgggtggctagtcatgattagccccatgggagtgcatctaaacccaaaattgttcgaggatccactcaaatttgatccatggagatggacggtaagtgggaatattacattctaatcttctcaatgggatttattaaatcggtctacgcttaggttatatcataacttatattaaaactaatcacaaatacaggaggagaagagaatctcgatgcaaaggaatttcatgccatttggaggaggaatcaggatgtgtcctgcggcagagtttaacaagctttttatcacactctttctccacatcgtggtgaccgagtataggtacatacacaagctcgcattcctttgttgtacattatattatgctcacttttcagcaaacacgcaagaaagttgcacaatttttattaaggaagaacattgaataggctgggaatgaacgacagagaagaaataacctagaaaaaacagaggaaaacagaaggctataatcttatgccatgaattgaagtgctcgactatggtctatctccgcggtcctcgcaccgggaag

SEQ ID NO: 6696 - DNA, 3586 bp, Oryza sativa
tcgcaaatatccatttaaagagcatataaacttcaaatggccataacttggccatttgaacttggaattggaccgttcaagtctctaatttttccttaagaagtcaagaacccatttttgggctttatttctgcttgttatatggagtttattagagtaaaagccttttcttttccattggtcgtgtagacgctgcagcttcggaagatccgctcttcgtggaagttgaagccggcgtttgggaaagcgagcaaggcaagtcacatcatccttgaacatattgaatcccagtttataaaattattttgatttaaattattgcattgtcgctttatttaaattcccgcgttatcactgttttatttagccatgcctatttacctttgttatgaccttattattattgttattgttattattaccttgttcaccctagattaaacaaaaccccaactagtggatactctactcatggtaccactagtatgattttaggtagatgcttcgctgtttaattaggtatcattaggtggttttacaactctagactctgggatattctcatcacctggacactttggaattgttggattattgcggaattggattcacaccgccccctctattcaaaatccccaaaatggttttaggctgggctcggggtgcatggttttgatagtagcacctcggccatataaggaccggtcttcgggcctctgttgcaaagcactaccgtacttccacatgtctagtgggtaaggcttagtttgtggctcagtctggttataaacaaaagtacacggattagagatggacgaagtcgggggtcgatggacatctctaggacaaatgaaggctacacgagctgcggcccggtagtcgagatgtcatggcacagggctggtgtcctgctgctaggggctcaatcctgcctacctgtcccggaggttccggccgtaggtggggttgggtcggtactcttgtctatggctaggatgggttgaaaactatgtcacgtcttccgtctgtataccgtggtggtatgtggcacgtggttgcacgtgagggagatgtgtcttgtgggtaaagatgtacacctctgatcagagtataatctattcgaatagccgcgccctcggttatgggcaagccgagcaatgtacccaagttagtgttttaattcttaaaacctgcttaacaactaaaatgtggaatggttggcctgggttggcttgggacgagctaggacccagggtcgggttgccagttcggtctgaatcatcgtaggccttgggttaaggcaggttcgtgagggttcacggccttgattaataatactgtgtaactctaggatcgtctctataaaatggctttgggcaactaagtgacttttaaatgctgttttctgtaaaacttaacccctatattattatccccttgtactcccttgcattaattatgcatctccggtgtggcttgctgagtactgtggttgtactcattcttgctcaatctttctccccctttcagtaagagaagctttggagaagatgtcttaggtggagtcttggcttataccccagttgagcgcctgtgaagttggagccgtaggcccgcaagtccgctgctgtttatttttgattgtcaggccttaagtgcctttgtaataatgtaaatattatcgatataataaagatgtgtcttttatatcatgtttgtgtggtgtaccccggcttttcctgggacggggattaatacactagcgttcgggaaaaggaaattttctcggtcgcgacattagatgatcggaacatgagatgaaccgatagccgcttgggttgatgagatcaatcggtatgtgtgttggtgacttcactggaatgtctagtactcaccaaggccgagcgcaattgtgttcatcggatagtccgatgtccacaagaaccgcacgccaatgagaaaaacgagccaatgagattgacttggtttcggcataattcgattactccgttaaggttttgacatggcgaatcgtagatgagatctatgtacacggctagcgggaccgccgtgtgcgttgccccttagatttcgcttagggttttatatctatcttattttattgctgttgtatatttgatatgacatggtaggatagattccctcagaaaaattaagtgtaatttatgctcttccaataattgcacctattacggttgtgatcataagtgataggtttgccatagcaaagtgtcactttttatcatgataaaataggatagatgtcggacatctatctgcggagattattggtttacttgacaaggagatgtcaccccaacagcacgagagtcacatatgatgtgattagcaaggtgttgcttacctattttgatagttatctagctgtgatgccaaagctcactagacactaataaaaatgaggatcttgactcactatgttattagagggaattttgtttcacaatacatagtgggagtatctttcgttaaactgtttaatgaaaggttaaatgtagacatggtgctgattttgcctacatatatttctattgtagatcatggcagctcctgcaccatccagttttaacttgcggtctattcttgaaaaagagaagttgactggaacaaacatcatggattggtatcgcaacctgagaattgttctcaggcaagagcacaaagagtttgtgcttacacagccttttccagctgacttgcccaacaatgctcctgctgctcaacgtagggagcatgaaaagcgatgtaatgattatcttgatattagctgtctcatgcttgctactatgtcccctgagcttcaaaggcaatatgaggcattggatgctcatacgataatcacgggactgcgtaacatgtttgaggaccaagcaagagctaagaggtttaatacctcaaagtccttgtttgcgtgcaggcttgcagaaggtaatccagtgagcccacatgtgatcaaaatgattggttacaacgagactctggaaaagcttggttttccccttagccaagagttggctactgatttgattctccagtcgctccctcccagctttgagccgttcatattaaatttcaacatgaacaacatgaacaggaccttgacaaaattgcctgggatgctaaagactgccgaggaaagcattaagaaaaactccaaccatgtgatggttatgcataagcgcaagcccaacaacaagaagagtggttagaagagaaagctaaactctgatgagatcacgagtactagcaactctaagaccaaggttcaaaggacagggcctgctaaggatgcagagtgcttcttttgcaaggaggcaggtcattggaagagaaactgtaagaaatacctagagcagctcaagcagaagcagcaggatggaaagagttccacctcaggtattaatgttatagaaattaatcttgctacttcctctactgattcttgggtatttgacaccgggtcagttgctcacatatgcaaatcgttgcaagggctgaaaagaagtaggagcttagcaagaggcgaagtggacattcgcggggg

SEQ ID NO: 6697 - DNA, 8318 bp, Oryza sativa
catacacaagctcgcattcctttgttgtacattatattatgctcacttttcagcaaacacgcaagaaagttgcacaatttttattaaggaagaacattgaataggctgggaatgaacgacagagaagaaataacctagaaaaaacagaggaaaacagaaggctataatcttatgccatgaattgaaaatgctcgacaagatgatcacccattcattaaaaaaaaacttccactgaaatattctaacactattttcttttcgtcaacctggtgaatagatggaaggatatcgacggagggaatgtaaagcgtatctccgaggttttggtcgctcaagagtatcatattcaactagttcctcagacgtaacatacctatgggatattcatctataaaaaaccaagtgtcaatggatcctacggagctattcgtacatgtacttcaatattttcatcatatggtcctcttatgtgtgtgtgtgtgcaagtttgaatttccatatattgttccatacttccattaaagtctcatatgattttcctcgaatttgatgaactagccgccaaaccgtgcattgtatcacttttcatatattgttataatatcattaatgtattggttatctatatcacttttcattgttctaagtcagatcgtgataaagtactggtagtttcattcaagttatacgttgaaagcatgtcacgagggcctttgactgaacctgccgaaacaacactggcgaacaaggcagagccattttggtgaaacaagatggcgaagcaccaaggagaaggcaaagacaaagctctttgccatcgccaccaccgtgccgaagatatacggtgccaagaatgggccgaaccgtcaaggacggcccacttagcagcccaactaggggcccatgaccaatttgtttttaattaagagcgtctgcagcataaacataaaatcgattttacagcaaaagaactgaaccatgcacgttgtagctatcgaactgtatgtgtcggataacaaatcgaactccagattggagtcgaaaggaactagtacaaacctattttactatgcatacgtgcgtgaaaggtagactagtgattggttgattcattttttgcgggtcccacaaagcaattttaacgctacagctatcaaactgaaattttattcggctcttggatcagatcagtcgaaccaaatactacagatgccctaaatatcgctatcataagactaaccatgtaaattcctctataatatgtaaccctagggcatgtaatctataaataggcccaaaggggcatgtattagggaaatcccaaaattttcaatcttaataaactgcttttgcttttccactatgtgaaccctgccatttagtaaacacagttgttattcgacaacagctggtgacgatcatggggaaccctagccgaaatcactgatgccaccaaataagtctgtgagtgagaaagtggtgcggatgaggtgtgagagcgaaggagaagtcgaggcgagcaagggcaaattggccgcaggggccgaagctgaagccgagtcatgaagagtcaaagctgggattcagcctgccagagcagagggcgaagctcgagtcgaagcgaccacaactcaagtgactgcttcaaccatagctgcggtgactactttcgttagtccagaagtcgacgcttcagcagccccaaccatagctgcggcgactactttcgttagtccagaaatcgacgcttcggcagcccaaggagcggagatttttttagagaaggatattttttacccggcctctatatcctaccggataaatgcagtatttttcaatttagaacttagcctatcaaatagggaacttaaccctcaaataacccaatctgaaatttgctcttatgaagatttgaactcagaaccttatggtgctacccaggtcactgcaaccactaggctacatgcctaaggaggggagatgaaaaccatgcggcaagacacactacgccgaatgcaggagcaacaccaggcgtacgaagcagctatacaagccaagtcaacagcttctaccaggccagctgtcacttcattggcaacgaccactgtggcattgactgcttcgacgccacaagtttcggctgcaacaacttcatcgctattgccaatcaatgcctcaagtctctccatactccaaatcactatcgcgcaatcgaccatggcaacatgcacaacttcaatcgaccacatcttccgcattttcacttctgaaaattaactagtaatttctgaactaatttgtgcataaaattcttgtaaaggaatcattgagataaacaaatcgataatttaatatatagattcatcaataactaaaacgattgaatgcttacaaagaaaagaaacaacagcgaacaaacgatatagcgacggcttcaactccactcccacaggcatccccattgtggtataagccaaacgtgttctctttcacaactttcttcaactgaggttgattgattattgcaaggtgagtacatcgaatactccgcaagccacacagcaaatatggaagtgcacagggatgcaaaggatggaataatagggttcatttgtaaaagcaacatttggcaaacatttgagaattgtaaaacattagagtaattaattatcaatattaatcaatcattaagcatcacacccatactacataggcccaactatctatgaacaaccattcccgattgcactgatctaacctctaaactaagaattatccattccaaaccatgagctaacagttatcatcaattaccatcttattattattattactagtaatttgcccgtgctaacgctatggaattttttttaatcattcgggtataacgcacgttatgaattaaatttaacatttgcaagaatttattatcttttgaagaatcaatgtctagactttgaagttcctaaaaagggataatacatagaatccagaataatcgaccaaaattcataaatattagatagacgagtttctgatttgttgtttacatagccaccttaaggactctattgtcaggttaaggtatgtcagaatatgagacaataggatcacagtatctagaatttctaccatcatatgtaacaagataatagtacaatagttataattcttttttttacaaaatcaaaacataaaatcattatagtaaagacttattagccatcaagctcatgccgttcgtcactgtacatctacaatactcaacaagtctaaaattataaggaacttcttttagccttgaatgcccagtagaatttctatagaaaaacgcgcatctgctgtttgtcatagtagattggatttggcaaacaactaaaaattctatccaaaaacacacatttgctaaagcacaatacatgttaagattgttagtgatatgccctagaggcaatcatagagatgattgtatcacatactatgtttaaatatttatccgacattgttccttgaaatacataactcattattggttaatgaatatgtgattctttcatgagactctttatgttgtttgttactatttctaaaggatccttgatcaaatatcatatgtggaacaaatatgtttaaatgatcagcacatgtattaattgatgatcatgtctcatggatcatggcatagagataccaaattaataatgtggacacatgttggtgaacatgttgttggatagacccaacatgagacactgcaaaagccatatgtgttgtgtcatcagtgatctcatcatggttcctaacatgtgtagtagcttacttagggactgctaaacgctactctaattctagaggttaaatccagtaagttattactgaaattctagaggttaaatccagtaagttattactatctctaattaactatttatgaaatcaagattcatcttacagggtcttttggtctttactgaaccttaccccacataactatttatatatctagttttgaagcccaacagcacaattaccatatttcttagcaatataaaatacttcttgctgctagctacatgatgatacaaataattttgaactataactaatctttctacttgtgagctaaatcaaaatatttataccctattgtttacacatgttctgcagctgaaattattatatgatccttttactgatttcagagatattcttgttcatattatgatggatgagaatgcaacacacaactcctacacatactagtatatgcatcacacaagaatcatgtcatgatatgatttcacttccattttaatcttctaattacctgccatgctttagggtgactgatatgttattcccttctgactttgcagctgctcctctaaactatggttcaagggttctcctgatggaactctgctggaacaccacttgctccttcttcaggttggtttctctgctatctcacttcagcatctccttgctgctttggtttatatggtaagataagtgaaaatcttgattggcatctggatttgctacttcccttggttttcctggagtttatcctctttcttgatttctgctccatcttgcttgagctactaatggttgcttctcctactactcctctgacctctcattcactcaccctagcctctcctggctgtacacacaaggctgctacggctgtggtgaagcatgggtgagatgttgaactactgatttgctagctgtgattatttctctttagcttgagttgaatccctagctgaactgctggtgttgatttccgttgcggcagctgctgctattgctctactgcggcaggtgcttgaggtggttttccaaccgatgcaaccgaggctggggttcactgaatagcttggttgatgtatatgtgaatttggtgaagactaggtgactcacctactttagttttgatggttgtttactgactgacacctaagcagtgcttgatcggtggagtaatgtgggatttcactaaattttttctagttagataaattctgatacaattaggtacttttacacttgagtccctcggggtctctaaaattgaagggtactctgagattagggactgatttgtaattgttctagaactcaagagtttttctgaaaactaaatgattattgaatctttgactgaggtgtttcagtttatgatatggtatcaataaacaccttatatatgcacaatatatgcgatgcatactgtataagatttctagagtacaattatatgcatatatgtatgcagacctgtagtggtaaattgtaaataacgaactgtggtttctactgtgcacatgtgtagctcacttcgtgacgactaatctatgctataatttaaccaaaactaaattatcccactcctcactaggtctactctaactaaaaataatgatgcatatggatatgacttgataaataaatgacaaggaaacgatcgaaaaatcatttaagatccataatagaacaacaatcaacatatttataggtcctagccagcatcgtggctcaatcgacaccgctctcagccagtgtgaccaagtcatttgcgtgactaagactatagctgatatgatctttatgtatgtccggtgggtcaatacgttctgctaggggccgctgttgacatgtggaccgagaaggagttttcggtttacagccgagtgtacatgaacctacagggtcgcacgcttaatgggccaaaataaggggattggatagagatctaatatgagcttaattcggatagggatccgaataggagtcctacgggccttggaggcccgagtgatggattctatatattcgtgaggggtgtgaccggcggaggtattgcatcacgtgagaaaccctagctgccattttcctccctgagcaaaaccctagttgcgcgcgggtgctagcacatctgcgcgtggcattccgtccctatacgtgtggataccggtagaggcaccgctggtttgcggtgctgatcggcgtgggagtacggcgaggaggacgcacgaggaggagaaggtcgagccggtgcgattgactacttcctctacatcgacgcgcgctacatcgcgagggttccttcgactccttagcgctttcttccactgcgcagcgcgtcgagtggtaacgatctatgatctaatgcttgcatggttcctggtttacgcggtagaaaaattttgatttatgctatcgtagcctacgcatatcccaacagtggtatgagagccgccttgtattgtttatgatctagatcattgcatatagttgatatgcgggtgtagtagatgagatctattatattgtatatgagttcttagatgtcacgtcctgataaattcatcccgaaataaaaatcattctctaaaaggaataatagaattaattaaaattcgaaaagaaattggcaaacactaaaatacgtacaagaaaaattcaaatgtggcccggagaatttttgttaaattctccttggtctaaaaggagccctcaatttttggtggaattttcagagcacaaataataattattaagaaataaacaaagttaaaatggtttcataaaaagaaaaaccctaaaaagtctttcccccccccttttcccctcttgggccggctcggcccatccctttctctctctctcctcttccccgcggcccatccggcctcctccccgcgcgcgcgccgctgacgggtgggcccgcccgccaccctcgctgacgggtggggcccacctgtcatccctgtcctcccgccgctcccgccgcctcgcccgtgccctagcgccgccgccgccgcgaatcccgccgcctcccgtcgtccacgcgcgcaataaagtggggggaaatattccccgtgattccctctctctttccccccatttctccctctctctcccgcgttcaaacgggcggatttgcccccgcaaatctcgccggcgccattgatggcggccgacctcccgcgccggtttcctcccttccccggccaccctctctcacccccggctctatttaaaccctccccgcacctcctccgtccggttccgcctctcgccgcccttcctcctcgccggatttgagctcgcgacgtcgctctctctctccgccgtcgccgccgagctccggtccgccgccgtcgtcgccccggaccgcctcccacctcggcgccggctccttcggcttcgccgcatcctcgccgacctcgtccacccctccgtttcggtcgccaaccgccggagcgccgccgaccccgttgacccgagccgagccaccgcctccctccgctccggccgcctcctctgtcgccgccatcgccccggggtgagctgtggaccaccgcctcgtttcccccttcccttcccctctctcggccgctgctccgccgtgcctatggccgccgccgggtgaccataggggtgcgggcgcgccgcctcccgccggccgggccgacgtggccgtcttcgggcgcgccgagcggctgccgcgtggggcccggccgtcagccgcccgtgccctcgggtgcggctgacgcgtgggacccacggcgctggccggtgtgagcccgggtgcacccggtccaccgtggaccgtgaggctgccgcgtgggccccactcccgtggacccggtccgcgcgccctctcccctcggctgacgcaataaaccctttttaaattaaaatttaaataaagaaattcgcaaatatccatttaaagagcatataaacttcaaatggccataacttggccatttgaactcggaattggaccgttcaagtctctaatttttccttaagaagtcaagaatccatttttgtgctttgttcctgctttttatatggagtttattagagtaaaagccttttgcttttccgttggtcgtgtagacactgcagcttcggaagatccgctcttcgtggaggttgaagccgacgtttgggaaagcgagcaaggcaagtcacatcatccttgaacatattgaattccagtttataaaattattttgatttaaattaatgcattatcgctttatttaaattcccgcgttatcactgttttatttagccatgcctatttacctttgttatgaccttattattatttctattgttattattaccttgttcaccctagaataaacaaaaccccaactactgtgcactctactcaaggttcccctagtatgaatttaggtagatgcttcgctggttaattaggcaacattaggtggttttacaactctagactttgggaatattcatatcacttggacattatggaa

SEQ ID NO: 6698 - DNA, 2340 bp, Oryza sativa
atctgtgtgattagcacgtggcaatcgtgagacttcattccaaccagctttggatcctctaatttaacgtgcttacttattctcgcacaatagcccgaaggaactttaatatctgccagacatgatagcattgcgatcttctcatccttcgacaatgtgtggcaagctggtgggaggtacactcttcctgtcttctcatctgtaacaggctgaagttcactacgaatgttcatgtcctatagatcgagacgcgcattcaacccgtcctttgtcttgctaggcatattcaacaatagccctagcaagctatcgcacacattcttctctacgtgcatcagatcaatgcaatgacggacctcaagatcttcccaataaggtagccgccaaaatatggattttttcttccacaacctattcttgtcctccttgctacgttttcttttcttcccaaactcattagtaatgtccttcaccatattgtgtacctgatctccggacaaatccgcaggggcagacccaagttctttcttaccattgaaaattttcttctttcttctaaaggcgtgccgtagggggagccatctcctatgacccatttaaaccatctttcttgatttctttagccacctactgtgtgtatgttccatacagtcagagcatgccttctttcctttcacggtttgtccagaaagattacccagcgcgggataatcattaatggtgcagaacaatagaacttgtagtgtgaaagttttctgaccatatgcatcccaagtttccacaccctatttccacagaatctcaatgtcatcgataacaggctcaaagaacacatcgatgtcattgccgagttgtctcggaccttggattaataagcccaacataatatattttcttttgaagcacaaccatggcgggaggttaaagttcgcaatgagaactggccaagtgctgtgagaactgctcatgtctccgaaaggattcatgccatccgtacacaaacatatcctcacgtttctggggtcggcagcaaactctttgtgctttcgatcgatattccaacattgaatccaatctgtagggtgtcttagcaaaccgtcattccttctctctgtggcatgccaatgtactaactttgcttcagtggggttggcaaatattctcttgaaacgatcaatgattggtagataccacacaaccttcgccggaccaccccgctttgacttctttccctcgcccgcgctcttctttcgcttgtatcgagaagccttgcagacaggacaagcatctaagtccgcgtattgcttgtggtacaatatgcaatcgtttggatacgcgtgaattctccagacctctaaccctaggggacagagaacctgttttgcttcatatgtcgtctcgggcaatgtgttcccctgaggaagcatgtccttcagtattcccaaaagttttgtaaaactcttgtctgaccatccactactagccttcaacttcattaggtctaatgttgctgataatttggtgtgctttggcttgcatcctgcgtatagaggagtctccgagtcactgaccaacctgctgaacttcatggaatctctctcgttcatagctaggtcatcaacgtcacgtaacatgtcttgccgcatatcagggtccacatcaaccaattcaccgcccaatggagatgggacaaacatgtcatgctcttctcatctacttcttcatgattgtctgcaccacttctgtctgctgctgcaccattagtacccagatcttgctctccatgcatcacccaacatgtgtatctctccatgaatccccggcgtatcaagtgagcgtgtacttccttttcatcttcccacaaaatcttattcctgcaatcgctacatggacaacacatgtacttggtggttcttcttatcctatccctctctgcgggtttcataaaacttaatacgccatctctatactccttgtaatgacgccttaagccagtcgtgtacatccaacttcgatcccatcgttgacaatgaacaaaatattagttaacatctcataacataagtactactaaattaataggaaatgattagtacccttttacttacttttatgatttttcctgtttttgtttgcaaaaaaattacaaaaattcgcccccttcaacctcccaccaaaatagtgaacagtgggataaactacagacaacggactactggagtatatatagtgtgcaaagtatatctcaatcgggccaaaaaaatgtcatttctaacgggcgcacactaatctctaactggtacaaatagaagcccgacaccgataagagtcatcggtgac

SEQ ID NO: 6699 - DNA, 620 bp, Oryza sativa
gtacccatttttcgatgcggggcttcgatttccgtgcaacgtcttgctgcccgagatacttcttctcttcatgatcgaattgccccaacataggcccttctgctctggttcgggaaggggaaaggagacacttgggaaaggacttagagtcatggaggatcatcgaggacatccaagtcaaggtggaggcccaaaccaagtcggcttcgagtgcaattcagagtctaggatcagtctgcactaaaatgggcacgcaggtcgcatacgtgaccagattggggcgttctctatatggatggaaagctaagaagatatcctttccaatggttttggacacacgtccaaattctttccgagtcaacgggaatcgactgaataagttgacatccaaaatatatcccggtgctgcatcatcctatttgggctttcgggccgtgtatcgtgttggaacctattagggttgcgttaagggttggttgcatgaccctaaactcttgatatcagtacctgtcgtcatctttagggtttgggttttgcttagattattctgtcgagaacagtttcaccgctagatcggtttgtaagacccaacttgtgagcttattcattcatctgcattt

SEQ ID NO: 6700 - DNA, 860 bp, Oryza sativa
attagtgatgtctggctcgatctctggctcggtgtcggtcccctctgtctcggagtcgacttggatcggagtctccaaactggaacccagctgcggagaaggtgtagggatcagtggagtgtgcacaatctccggggcaggtggctgtgtcactgtcgggtccaccaagtaaggtgctgactcagtagccagcataccaacctctcccaaaagagcgtgcaacgctggtgggtatggcagggtgaggaaaaagtagcggtcacgtcctactgttgtggaagtagaagctcctatggtgctgaccgtggctgctcgaagctgctcctccagctagctgacgtgctcctgactctctctcagctgctcctcaagtgtatccatcatcccgcggctgtcgttgtactggtcagataactgctggaactggtcgccgtggacctggagctgtgcctttagtgagtctatctcactgccccaagcctggtgctcctcttccagctgaagctgctgcactgtgaggtcagtcacctcggtctctaactctcccatatgcctctgctggtcgtcgatctctaacagagcctcctcgtaaaagtcgtctactgcctcagcccatcgtgacagtagggtcactatcgggttgtagcagcaaggtgtgtcctgaactgtgcagacggagttgctctcctctcgaaacaggtggtgagcaaactcagtactcaccaactcagctcggtggatagagctaagtccgaggaaggcctaccgggctgcatgctgcatcgcggtctccggtaagacctgacagtggcccatccggaaggcggagtctgactctgaaggaactcgcgtgtgaacct

SEQ ID NO: 6701 - DNA, 549 bp, Oryza sativa
cgactctagaggatccccggtttcctatttgtgcagggagttccgtaatatgtgttcttctcagattaaggtattccaattgaaacagcctgcacaagtctttgagatctctatttctcaggaattcgtagccttctaagtccaatattctcattaatttcatccaaccaaactgcaatgtttctccatcggcaaatatgctcaaggaccggacatggcataatatttctcttgtggcaatatatttcacacctctgctatgaacagttagccgccttatcttctcttgcggaaacaaagtgttctgttctcctactagagtgataaaattatcttcaattgactttgacacaatgatctccaacatcacatcatgaactcggaatgttttaaccttccctgtaaagctagtggtcactggctgaataatgctccggttaatgaattcatcaaagtagctttctgccacctcaaaaacactcagtccacgtttgccagtcacaaagcgttctgctacccatcgctgaggggtaccgagctcgaattcgc

SEQ ID NO: 6702 - DNA, 557 bp, Oryza sativa
tactcttggaggttaccgcctcctagacggcttgtggaggagttgcccggtgacctctccgagaagattgtggaggaggcccggtgccggtttgtgagtggtttggatttcaccaccttcggagtgaaggaagaactaccacgagtgatcgaggcttgggtagtcctccccgtgggcctgctttccaccttgcccaccccttgacgaagggggcgtgcggtggcttcatggttgagcggtggagttgggctcgcctcaacagggagtaggaaaccggcgagttttcgaacctcggtgaaaaatctcttgtctccttatctcatttgattgtcgcatttacatttgtgcaatttatatttctagagacatacttgagatcatatcaccctaggattgcaaaacattgacataggagtgtgatttactttcctagagaattaattgagccactatcaccctaggtttgcaaaacataacttagttacttagttagacttaaccctcaccgagcctagcaacttaggttagttttgtttaggtgtcatttagtttttaaa

SEQ ID NO: 6703 - DNA, 623 bp, Oryza sativa
tctcctcttcctgtttagtaaataagaccaaggaaactaaatctgcatttcctccatttctccccaatgcagttctagcaaattgtggtacaatcttgaattttagtcatgtcattgctacgagaagtaatgcaccgcttgaatcaaaacttgaaattcttcttcaggtaaatcaccacctcttgctgaaacaagtacagtatgagggttaatgctatatttctctttttgataatctcatttactttaaggaagctgggaggggaaatatacttacaatcaagcaaagaattatgcagcctgcagctccaggaaaaagggcataccagagttgcaagtggtgaaactttggaccatcaataaacaagagaggcaagcttgcagctgcaatcatcatggaaatggcgagctttgctatgatgcatttaagtagagtacaaaaacagatgtcaatcagaaatatttttttaaaatctgctgagcacatctaaagcaccacatccctgttgaaagaaagattatatacctggagggtgtgaggcgccttgaattgtcatgaatgctatggatgcagaaagagcagcacctcttgccaaccatccaagcccaaataaagaaagggc

SEQ ID NO: 6704 - DNA, 593 bp, Oryza sativa
taatttagtcttggtattttacagttttcatgtccctcggccttagtctgtttgcattaaccaggaattatggcatagtcatatttccttctaatcacttttttttgggttttcaaactttgagtgaatagtctagcacaggaatggaattttagtaccttgacttttttttaacacatttcaggtcagattctcttgattcaatccttcgacttattgaagaactgtccgccatagacaactgttcaaaagtaatgtcatcaaatgaccaattgattaaagcactaagtaatatagtcaagttaccagataaatttgaggtgagcatgatgctactaacagttcatttatttgattgcatgtcccatttaacgtcgtgtgcagttgaccctgcttactaaatagttttagtctgctgtactaattgatacaaattttaaggtatgccattctggattaaaagcatgaaatatatatttcaagaatatttttttttcttattgaatatatttcgggatcgtagttaggttgataagtgctattacttgtgagtcctcaatagcctcagttcttacctggattttagcacctga

SEQ ID NO: 6705 - DNA, 686 bp, Oryza sativa
agtggatccccccttgttcgtccacagaacaataatttccatgacgaaatggttgagcagtacggtcgggttaaacgttttcttccggcggtgttgcgggacctgcatttccgtgcggcaccggcaggtgaacatgtactggctgcgattcattatctggcagaactgaatggttcgaaaaagcgcatccttgatgatgcgcctgaacatattatcaccggtccctggaaacgcctcgtatacgatgcggagggacggatacagcgtgcaggttattcactatgtttgctggaacgccttcaggatgcactgcgccgccgggacatctggcttgaaaacagtgatcgctggggagatcctcgcgagaagttgttgcaaggtgaagagtggcagactcagcgtattcctgtctgtcgggcactgggacatcctgtcgatggacgtaaaggtgtgcaacaactggctattcagctggatgagacctggaaagccgtggcatcacgatttgaaaagaatgcggaagttcatatctgtaatgaaggtaaatatccatccctgactatcagttgtctggagaaacaggaagagccaccatcattgcttcgtctaaataatcggatcaaacagctactcccaccggtagatttaacggaactgttacttgagatagatgcccagacaggatt

SEQ ID NO: 6706 - DNA, 556 bp, Oryza sativa
gcatccgtctctcccgggccacgtcgaccacgcccgcgcgtgcgccgcattccccgcgcccgttcccctccctctcccgctcgcgcccgcgcccgagatggccgggattcgaaaaccgaatcccgcctctctctcctccccactcccccacgtcggccgtcgaatcccgccgctcccggccacgtccggttcccccatcccctatttaagcatcaccggcaccccctctcgctttttccccattgcgccgacctctcccgagctccccaacgcctccgcgccgtgcaaccacccgccgccgccgcttttgctactccggccgccgctagccgccgctaggctcgccgccgtctcacgccgtcgccgccgttagcttcgcgcggccgaggtccacctcgtccacccctcctccgtcgaggttcgtcgccggagccctcatctccacgcgcacgggtgagcgccacctctaccgccgccttcggccatagatcccgatcgccatggtccatctctctctctctaatctctatcttctccttccttagggctgcaggaa

SEQ ID NO: 6707 - DNA, 625 bp, Oryza sativa
acccgggtaaagccaatgtggtggcagacgctttaagccggaaaagttactgcactgccctatgcatcgagggcatgtgtgaggaattgcggcaggagtttgagcatctcaacgtgggaattgttgaacacgggttcgtagccgctctggaggcacggcctacgctcgtggatcaagttagagccgctcaagtaaatgatccggaaatagcagaactgaaaaagaacatgagagtcggaaaggctcgggatttccttgaggatgagcatggcacaatctggatgggagaaagattgtgtgtaccggacgacaaggaattgaaggatctgatactcaccgaagctcatcagacccagtactccattcatccaggcagcactaaaatgtatcaagacctcaaagagaagttttggtgggtcagcatgaggagagaaatagctgaattcgtcgcactctgcgatgtttgccaacgagtgaaagcagagcaccaaagaccagcaggtttactccaacctcttcaaatcccggaatggaaatgggaggagattggaatggactttataacaggactgccccggacatcatcgggtcacgattcaatttgggtagtcgtggatcgactcac

SEQ ID NO: 6708 - DNA, 668 bp, Oryza sativa
cacaggcttattcattgttccaccttttatttcgtgccattgctaaggtccaatcttgatacctcagagagctgcatgatgtgtagatagtcctaacttaggtccgttggttagaatcatccattcatgtttagaaaagtgattaacaacgtgtgctgcattaaccattaatgtggtcaactctgatgcttgtgctatggtcactgcaggaagtacctatggagaaaagacctgagttgggtccccagtcgttccctacttcgtggtcatggcaaatgcagggctcccctttgccattactccctactgcagcatcatcaggattctctacgggcaccgtcgccgacgccgcccgctcgccttcctcccgcccccatccatttcccggccaccaccagttctacttccccccgaccgcctgactgccacctattctggtggaggcgacacctcaccgtgcatccaccgccgcttgctgataacattcgtcgtttgtccagagagggaccttctccatatgatatccctctctatgttccacctggttatgatcagaattctcacgctcatgattcttttatcttcatttttgagtgcgaaaccacgaatcgtgaccgtgctaccaggtaaacacccttgtacctctttgactctacaataaaattaat

SEQ ID NO: 6709 - DNA, 555 bp, Oryza sativa
atctacaacttttgttttggtcattttgctatatcactctgtttcaataatttgaatttgaatttcaaattatgacaacttcaaacaatattttcaaatactaaatgatttcaactgaaaaggtcatcaacatcaaagttgtataactcatcagtatctataactttattttggtcatttcttcatccgacaaagtgatagtaacattgtttataaaatttacatatctctcctatagtttataaactatataagagatttgtacattttgtgaataatgttataaatcactttgtcggatgaagaaatggcccaaataaaagttataggccttgatgagttatagcactttgttattgataactttttaggtgaaatcatttagtacttgtaaaatgtcgtttgaagttatcataatttgaaattcaaattcaaattgtgcatacaaagtcatagaaaaatgatgaaaataaaagtggtagatcttgataagttatacaactttgttattgacaacttttccattggaaatcatcgactacctgaaaggttttc

SEQ ID NO: 6710 - DNA, 708 bp, Oryza sativa
cgctcctacaaatactcctaggctgccacatggcactatctaatctcaccgtcgattttcatttaaattggtgtacctgttaatttagaccattagattagatctattattaaaaaggtgatagttttttctaaaaaatatgcaactggtggctgtgaaaaggaaagaaaactaaatattcgtacgcaagtataattgaaaaaagaacaaataagcttcctactgttaggcggaagaaaaaaaaaacatctgtgtacgacaaaaaatgataaagccaaaaaaaatgtgtagttagtaccggtggaaaaaacgacggtctaaaataggattttgtataatataaaatataattacataatatacggaagtatatgatctatgatataaatatcaaatatcaaatcaacggtctctaaacattatcttttaaattatttttcgtttaattatatatagtatcggtgtataaaagtaatgttgtggtcctaaatacatcatgacacatcgggtcgacatataataggtaacgttagagacctattaaacgtgctacaaacgcttctaaatagtcgtgtggcactcctacgaatacttctacgccaccacgtggtgttctagtaaattagagaaaaccttgtaaattatgagaaaaaaaacatccaatcatttttattggttgacccactatttttaaactactagattaga

SEQ ID NO: 6711 - DNA, 547 bp, Oryza sativa
ccgactgtttaatgtcgtgggcaggcaatacatagtaaaatgtgtggaactaaaagtaagtgatgaactagaataaccacatttaaacgaaatcgaattatatcgtcttcatatccccccggccccgccgcagacacacactgcaaacagagtactccatccgtcacacaatataagtgatttagaaaggatgtgacatatcctagcactacgaatctagacaggaagcctctctagattcgtagtcctaggatatatcacatctctctagaatcccttatatttttggacggagggagtagaacataaggtagataaaaatactacatataataataatcaagcggtaccattcatccctagatacaatatttctagagctttgcttaacactaacacacagctatataacctagctagcttcatgatgacttcaatatttctcgaccttacttaatactaacacacagctataacctagctatagcttcatgacttgatctaccaagctaggcatgcatatgcaagaacaagaaacagattagtc

SEQ ID NO: 6712 - DNA, 715 bp, Oryza sativa
aggtgcacagttgcacacatcaatccacaggagaactgtagtactgtaggatgaatatggtgcttctttttttttttgaattatttgcatccctcttatgaaagtacgatttctgcaaatacttcttatatcagcattgcttaattacagcacttgttctgtttgtttgcttaattcaatagcttctctatgcatttgtttctcctctaattcaaatggagtcaacatattacaagatattggacggctcgaagcttctctacatttgttttctttactctttatcgatgaataggatggcaattgatcatgatactaagtaaatactctctgtatttaatattacaagtcactttagatttattataaatcaaatatcttttaagtttgactaggtttgtagaaaagtatactaacatctaaaccactaaattagtttcattaaatttaacattgaatatttattatagcatttatattttgtgttaaaaatgttgctatatttctttgtaaatagatgtttcacttgggataaatctaaatagacttataatattaaatggatggagtagcttaattaatttctattatgaaaaagatagcgtctgtgatgatcccacttgtagaatcttagctgtccaagcaaaggaacattgattggaacagctaaagagcggacattagaagtgggaagccgcatccagtcttagcccag

SEQ ID NO: 6713 - DNA, 1389 bp, Oryza sativa
attcctgcaccccgtcctgtttggttccatgagctaattattagcccccaccttttagctctgaattagccctcaaggatccaaacaggtggtttaatttgggggtagagtgaattagcccctctcagaacattagcccctctaaggggtgctaatggggctaattttctgtggagaccatcaaaaagcagccctatctctccctctctctcctctctttctactctttctccaccttttagccttaaattagctcatggatccaaacatatcatcttaggctaatatttagcctaccaattcatgactaaacattagttctcaaaattagccatgggcaatcttccaaacagggcctagttcctctcgcatacctgaaaaagcatcatatgcacaaaagacggattcggacacaactaaaattcaggtttagttatttgttatataaagagagaagatttttcatgactagaactaatatcatagcacggctaacttgtgcagaaggttcgcctgataacactgttcctgatacctctcatacctatgtagacttattatatatgcagtactctttttttttccttatatgtgatgtgtgtcctctggccaatattattgtttcatctgttctgcatttggaggtttatatgacaacatgcataggaagaagagtagtgacaagaggtaggtgctacaaagatcctcatagatgttcatgttcgccagctactttcttcctgcttactccactttttacttttttcatgcaatttaccctaatatgtaaaaaaaaaaaaggaagtaataatgtgagaatcatgacgaggcccttatagatgtcatagtctcacaggatgataatagcagagtagaagtaggtgctgtaattgcttgccgatgtaaatagttaacgtccaatgtggatgcacagcaagctgagtaaagaaccatggtggaatgatcagtttttttagaggccttcatgaatgcagtactgtaaaaaattcatggccattttatggctcattctacactgcacaatatatcagcagtgaacttatcatttcagttccaatacaagcatgtccaagaaactgcatacccatagttcatacatcacgcgataggcatccgcttcgaatatcaaatggttcatgagaatctagacacaatagattatatgcatatcaacgccttaacaccagaggctcgcagatgcttccctcttcaggcagcagcgaccgctggaggaggcaacagggttatctcaacattgtcatgagccccctgtagaagcagctcaccatcatacttaacaatttttctcttcttggcagcccgcaaggtgccgactagtgcttcaaatatgtttgcacaacggtcatc

SEQ ID NO: 6714 - DNA, 1059 bp, Oryza sativa
agaggcgatgggacgacacgacaatgccctcaagagggaatgtgacgcaaacgccatagttgtcggcctggccaaaacctggctaggttttcacccatcgtccgccgcctgcctatccaccactgatgctacattgctccttccctatcaaacctccgtcggcgcgtgggtattgctgcaccggcgcccactgtcggccagcctcaccaacctccctatcgtcaccagccactgtcgcgtcagctttcctcgccatcggttgggccggcctccctgtcgtcgcccataccgaacctcctgacgccacccgctctggtgtaccgttgccactgtcgctacccactctcagttgcaccacgcctccatgccaccggtcattcctccacagcggcctccaggccggcctcacctccacgcgcgccaggtgcgcctccacgccagccacgacctcgcaccgttgtcggctgcacctccatgcgccatggctgcctgtcgccgacggccgaacctccttgctccatcctccaccgccagccgtggcgcctcctcagcctacccgcgctacgccagcgccacctcaagccccactgctaggcggctgccggctctagccgaggaccagatccggcggcacataccgcagtcgccgccgtccctactgcgaccccgccgcttcctcccttacctccaccttcgccgcctctagatctggcggcacccaccacggatttggcctcgctgtcatcgcagccaccccccccccccacgttgtttgcacctcgcggctatcttctcccttccccgcgtccactttcgtttgtcgccgtcgtccgcgcgccggcatcccgcctcaatgccgacgtctttccagcctccaccttcatctgtggtggtcgctgtcgctgtcctcgcaggccgtcggctttgagcgccgactttgcggccactcactcaagcggcgcgaggtaggggagaggttagggaaggtaggcggcggcggctagagtttcccccgagtcacatgtgtgggaggcgacacgacagctaagggtatgcagt

SEQ ID NO: 6715 - DNA, 801 bp, Oryza sativa
agcacttatttacatctttttatccagatttttgaaagaggagtcactcaggaccaagtaattctgatggctgctagagcatcccgaacagaaaatcaagatgctattgatactgcaatagtcgggatgctcgctgatccaaaagaggtacatcgatttgtcagataggggaggaacgactatcttgtttatttgaggaattaaacaccaggaaatatttcctgcaggcacgtgctggtattcaagaggttcacttcctgccattcaatccgactgacaagagaactgcattgacatacattgatagtgatggaaagatgtaccgtgttagtaaaggcgcaccagagcaggtacaacaaaaatcatctgcagatatgttaaaaaagctttgctggaaatttccatttatatgatggagttattgattgatttcataaattgacatgcagattctcaacctggcacacaacaagacacagatagaacgacgagtccatgctgtaattgataagtttgcagaacgtggacttcgatcacttgctgtagcatatcaggttagcacttcttcggatactctttgcacaatttgaatgttttaacattttgagttaattaagattaggaactatccagagtcattatatatgttgaaaaatcattgttccctgggccagtttaattttcattatggtctcctttccctgtcatgtaggaagttccagatggaaggaaagagagtcctggtgggccatggcgctttgttgctctccttccactctttgatcctccaaggcatgatag

SEQ ID NO: 6716 - DNA, 632 bp, Oryza sativa
accaaacaattttcatcagcttaagttatgtttgcccccatccattgttccgtatttgataggttaaacacaagcaggtatgggctttattaccacaggaaataaaaagtagttgaaaggtaactaacaacaattacctatcaacaggtaaaattttcctaaatcctgttggcatgaccaatgtcaacatagaaaggaaaaacagaataaattaaaaaaataaaactatttcagattatctaaattgaactatttcagaggggctataaattgaaaaaaagaagaccaaaagtatacctgcacacggccttcatctgaactgtatatttttaaatcatgtctgtacgtgctatgaaggcgaagcaaaccagttccttcacctatattcaggataacatactagtaagaaaagaatattgagtacaagaaataaactttttttaaaaaaaaaaaaaagagaaaagaaaaccaagatgatacaaggtcatcatgcaagacaaggcagcctgacagagatcacatttcattgagaacattacattacttaaaatgttttaaagcttaaatacatgcaactttattcttaaaaaaaagaaacctgcaacagactgtaatgtcagtaaagttacttt

SEQ ID NO: 6717 - DNA, 984 bp, Oryza sativa
aaatctaaatcaactagtctcaagtaagtgcacaaagaagctagcctatgttgaggtttgcaccctaatagcacaaataaactctatatgtaaacttgctcaaagtaaatttgcacaaaataaaggagacaagagacaggaatttttcaccgaggttcggaaactcgccggtttcctaatccccgttgaggcgagcccaactctaccgctcaaccacgaagccatcgcacgccccctttgtcaaggggtgggcaagacgggagccagcccacggagaggactaccaaagcctcaatcactagggtagttcttcctacactccgaaggtggtaaactccaaaccactcacaatcggcgccgggcctcctccacaatctccttggagaggtcaccgggcaacacctccacaagccatctaggaggcggcaacctccaagagtaacaagtctaggatgcttgctgaggatgatcaagtgctgcactagctataacaatgaagcaatgcacttggattggcttaactcactctctaatatctcactagataaactaagtgcacaagggtatgagagctcttgcaagggttcaagataatgcaatggagtgccaaaaccttacccttgctgctggggagtgggtatatatacccccaaccaccaaaactagccgttggaactgaaatccccaactcagtgctctgccggtcagaccgccattgtgaggccggtcagaccggactactttttaacggctagaaaactagccgttacagggcaatcattgagcccactcaacctggtcggtctgaccgcagtatagtggccggtcagaccgtccacggctcggtcagaccgccgtcggcttggtctgaccggttgcggctctgatagatctgtatcgctaccaaaaaccagaccagtggggccggtcagaccggccttaccacgtaggtcagaccggctaacagccctggtcagactggcc

SEQ ID NO: 6718 - DNA, 706 bp, Oryza sativa
  unsure (1)..(706): unsure at all n locations
ttcggcagatagtcttcgtcttgcacccttcgcntaagacgcctctggcctggcaaggcactcgtacgactctttgcctcacgccgttcttgctccatagtcttcgccacgggtttcggcagatttggtcgaagggcctcatgccatccgccaacaaccgtgcttaccagtattcgaggtagaaacctaataacgatctacccattcttgcggatggttccgggcctcggccttcgactcgaagtggtgctcctcggagtctgacatggctcgactagaagtggtgctcctcggactccaacatagcgatcttggtgagttacctcatttggatagatcactagttcattattattgaatgcatacttagcgaccgcatctttcatggcaacatttgtactagactagatgatcccaaatcacctccaatgcaactatttctatcatctactagcaactcaatagatgaaattaacgtaactttttttatcatctactagcaactcaatagatgacattaaagagagttgctgactatctaaccaactattacacaccccaaatttaaatttaacatttggtttcctccaatatctctccaatcgctaattataccctctaaaacaaaaacatatgctaattttcattctcaaccaataacttagagaaactgtttatttataacatgttgcccgttgccatcctg

SEQ ID NO: 6719 - DNA, 513 bp, Oryza sativa
gcccggcccggtactagcccgacattttttgcttgcgagtggagttgaacggaccgcaccggcgtcagctcacgaggcaggaaagaaaccccaaacccgcgtcgccgacgccgtcgccggcacactcgccttcgcctcgcccaccaccaaaccacctccgatggcgcccggctcctcctccacctcctccccgggaggaaaagccgccgcggtgggcggcgaggcggggaaggagggcggagccgtgccctcgcccgcggcagctgcctccgaccacgctccggtggcgcccgacggctcgccgggaggtggcgcgctgccggcgggcggcgaagcggggaaggaggacgagggcgtcgcctcgaccggctcccgcactccgctggcccctggctcctcctcgggagaaggcgcgctcggggaatgcggcgaggcgaggaacgacgacgaagcgccagcgccagcgccacggctcatcgcctcgcccaccgccgccgccgccgccgccgccac

SEQ ID NO: 6720 - DNA, 648 bp, Oryza sativa
taacaatatcctatgccatgtatcaggaagtctctggaggcgaagccaagcagctccctctgtgggtgtgcctgcccatgcccattcatgtatgatatgcacctgaaaagaatagttagccactattgaaccagcagattggtatatgagaaaagtacaaacaggaaacttttggtttagaaatgatcatctaaacttgattggatagctcccgcttaacagatctaagttatttcaaggaaagagccttttctagtaactttaagaaatgggggttcgattaattgcagttcagtcaaagtaaaataggcacatactgtattaacccggtaggacttttctgagtttctatctgatcaattcagatctatgaagtattcagagaacacaaacaatgcaccaaaattgccagcaagtagacataatctagtaaacctcagcagattataataccacgcaagattcgttttcacctaaacccatgccataagaggaagactttaactagcaaagacctcatgtttgtatcaactatccccgtggcatcaaatttcacatgaagaaaatacattatcatctccacgaaacaccctaaacggcaggataaagtaaatgtacagtccatattctcacacgagaaaatggaca

SEQ ID NO: 6721 - DNA, 522 bp, Oryza sativa
gaagaaaaaaaaaagagcagcaccaattatgtgtatcatgttgttgtgatatgtagacagtagatgcatgataaatctcataagcagaaaatgagaagagaagtaaaacaaccaccacacataaacacaagaaatggaattaaggagaacgaatatgaccttaaactacttccccaaagtattccgcattatcaaccaaccatccatatgaaagtcattggagtgacaaaagaactctgaggggggcaaatgttgacataataaagggctaagttagttctataataacaaaatggctcccacatattatgtcctctcctcgcgtaacactcactcctccaagcaaaatagttaggaagctaagcgtttgccccagctcaaccctcccaggatgggcgtggccacctccctgcgaacctccaccttgattgttgtaataagagttgccaccaccagagcgaccacccctgcctctgttgctgtaccccctctgctggtagtaaccaggctcattatagtagt

SEQ ID NO: 6722 - DNA, 9588 bp, Oryza sativa
cccgcgccgtgacggcgggagccccgacgaggcccgggacttgagccgcgccacgaagtccttggtgtagtgtaccttgtgcatcttgatcttgtcgtgcgccggcgccgcgccgagctcgtcgtcgtcgtcgtcctcgccggcgacgccgctcttgatcttggccggaggcggcggcgccttgtactccgtctcgcggtgcgggaactcgacgagcggcgggtcccgcggcacgaaccgggtggcgcggtcgcggacggggacgcccacggcgggcagcagcccgccgcggcgcgtggcgagcccccacgccaccaggaagcccgccgtggcctgcccgtcggcgacgcggtggtgcgccgcgacgccgagcaccatggacccgcacgagaaccgcgtcacctgcacccgcagcagctcctcctccgcgggggcgccgtcgacgctcgggtgcagccgcttcacctccggcgacggccgcctcctgatgatgaacggcgccgccgcggcgagcggcgcgtccacggcggcctcgtcgagccgcgcgccggcgtcgctgagcagcaccgaccgccgcccgtcgggcccgacgccgagccgccccgcccactcccggtacaccgccagcgtccgcgccaggccgagctccatcgccgcgctgggcgggttcggcggccggaacgcgtagatgatggcgatgctctcgtcgtacgtcgccgtgtcgaacacgctcagcggcatccactccggcgccggcgccgccgcgtcgtacaacggcttgacaatcctcgagctctcgaccttaaccttcatgttgctgcatgcacgtagaaagctagtgaagtatcttcttttgcttgtgcgtggttgcaaactttgctactactatggttttttttggttggttttgtctgccaaatgtggctcaaaccaagcatatatatagtgcaaatttgatgacggatttacgtgaaatgaagtgagaagtggtaagtcaagcaggagagatttttgaggttggatctgggcttgaagccttgaacgaccggttttgctgcactgggaattccataggttggtatatgggttaattagtacttaattatgtgatcatgacatggccgatttctggtcaagtcagctaatggccatccggctagagacaaaaggggaaaatccgagatcatccaagtaacacaaactacaaaatgcaagggaatatgttaatgagttaaaaactcagctgattagccatttcagcgaaaccttacctacctgctgtatatcgagagcctcatcagttgcccatatatgtaaaccttttatatatttactcatagtgacttaaaatctactgctaaaaagttatgtttaaaatgtcttaaaatcaacttaaaaaatcaagtttaaatgttcagattctgcctttttactccaacttagaaatcacatttaaaagttcaaattttggcttttgcttttacttgttaggttaaccaatgggatctaagtgatcagagcatgtaccactattaggcattagccattaaggctctgtttggaagattagcccagggctaattttgagagctaatgtttagtcatgaattggtagactaaacattagcctagagtggtatatttggatccatgagctaattcaaagctaaaaggtggagagagagagagttgaaagagaggagagaggagggagagagagctgctttttgatggtccctacacaaaattagccccattagcacccattggagggactaatgttttgaggggggctaattcactttagccaaaaattagcccatctgtttagatccttgagggctaatttagagctaaaaggtggggactaatgtttagcccatggaaccaataatgccctaactcatggagaaacgctattagccgattagatttagcggtgtcggaggctttgtcattgctcctggccggctggatgagcatggattctgtttgttggaatgctttattattgaatctggaaaacttgtaaaattgttgcggaatacgaaagatctttgtcactaggctccacaatagcgccggctccagtagttctaaatccaccatacatcctaatcctttgtgtcgagtgataggagtaggttgcgttgatcaatctcatcctcacttccacaatgccggccgttagatacaaatgcaactgcgaaaatcaaacacaagttcgtcacttcacaaggtcgccatctcaccgagagggtacccaaagaaaaaaaatatttatcttttaagccttcactaaaataaatgaaaaaaaaccatgttaattacttgcaattctgaaaaaaaaacggaggccactaatctacgggtttaactatgtgccactcttaaaatgtgatgataacagatttgtcactcgctatctatgacatgtggaccctcatatgtgtatggcatgtgggtccagtggcaaatctgttatcatcacttgtaagagttgcgaaaagttaattattcctaacttagcagtcttttgcaggcacgggtccttgcctccatgccatgcatgtatcgatgcacgtacatacctagtttgtctggagagcaatcttatagtacttggggaggtaaaaaaatttagcgaaaaatttggtacattataatacctaagtaccaagaggtataaaattataatagaaaaagtggtatctcatgataccttcttaaggactgtaaaattgctcttgtatgtaacttctactcaagcctagagccagaatgaaatggagaggggtgctactcgcttaatttattctattttagaccaagtttaaactgatatgagtgtttgagtttagattgaagggtgcatatatgatgaaaataaatatacttaaaaaaatttcttaaccaaatttttgggcacccctctctccacccaagctccgcccctgcctactctatcaatagcccgccctttcttcaaaaacataataataaaatggcaacactttaaaaagttttttttttgaacatgacactttaaaaagttacacatcgattttcagagtaagcattggagaagttaatgactgtcaaagtttaatcaaactttatcctaaacgcatcctactatattaatactgcgtatcgaggatcaaatgtgtcatatgttctgctaagaatacttggtacatgcgtgcgcgtgggttgcacatgcatatatgtatgcacaccgcacacgctttaaacctgtagtggatccgaacatttaatattatgaacatatattgtttacgccacgtatgactatcacatgattaaacttttcaactcctcgtgaagatcggatatgttctccctttgtccaacttttatttcatttttaacccatcccgcacggaaaaaaaaaccctactttatacaaatcccaatccaattattacacactttagcagctttgaaaataattacttctccggttccacaattcttaacgtcttggacaaaattaaggtcaattttttataattttaattattaacaactttaaaactatctagtttaaagaaactagaacaacatatataaaatattgtatttattataatagaaaataaattcaaaagatatattttagaaaccatgccatttgtccaaaacgtgaagaattatgaaaccggagggagtattttctatttcaaaaatttcgatacaatgattactcaaaaatgaatttattttaggacaaatgagatgagtaaaaaacgaacttattatgagatggaggaaatattatagtatgtttgaagaaagagtaaaatcaataaaacttcacatattacagtctaagttgcacaaaatcaccgaaatttaacacataaccctaagtataatggtactaaaatttcataaaaacaaactgttaactatttttacatactcctatattaaaattttaaaaaacgttacttgcacactgtaacatttatatggtggatgaaaaactcataaatttaaaatgtgattgttgaacttaaaagcttagcagatcaaagtcaaaatgatcaatagtgtgttttctaaaactttatagcgataatactcggggttaagtgacacgtgtcaaaagccccgtggttaattttgtgcaaccagaccacaatgctttgggttaagtgaaatttactcttgaagaaatttattcctacctaattttaggaactgggattgttgttcattcatgatttatgtgtgcatagataggacaatcatttgcttaaactgtgtaaagttttcaccacatcgcttttggtgcaggttaagcaaaaggctcatggtgcacattttttgaaaccaattcgatcactgaagaatcagtttgaagatgacggtacagattttgcatatgaattagactgatggatatgcttaatgagttttcgcactatggaaaagccagcttatatattctggctaatctaaatagagaatagttagaggtttgggataaaagatatatcacctcaattagaagttaattagcgataacctctactggtattttttagattatatggaacaagaatagtcaaacaaaatagatagtttgggttagcttttgatgccaaagtttcacaatgatcaatcttgaaccaatctttacctccgttagagcatctccaacagcctctccaaatcaaactctccaaacacccatatagccaactctccatctgatttggctagtcaaaaaagatactcactccaacagactctctattaatcctctccaaataaaatcggacccacatgtcagctcctctcccctcttcttcctctcttcctccccttctttctcttttcttcttctccccttccttcccgtcgaggcagccgacgcatggcgcggtggtgcgacggcgctgggaggtgggaggcggcgctaggaggcggaaggctgcgtggggaggcggccgggaagcagcgggaggtggcgcggggaggtaggaggcggacgaggtgggatgcggtggtcgacgacctcgacgacgaccccgacgacgacctcgacgacggcgcccccgatgacgacctcaatgacggcgcccccgacgatgacgacggtggcctcggcagtggggcggaggtgcggcgctggcggaggttgggcaccggcgcggcggaggccggaggggcagcgtggggaggcggccgggaagcggcggggaaaggcgggagacggcgggaggcgtggggaggcgggaggcggacaaggtgggaggcggcgctcgacgacctcgacgacgaccccgacgacgacctcgacgacaacgatggcggccctgacgaccccgacgacgacgacctcgacaacggcgacctcgatgacgacgacggcgacggcgacgacgacgatggcgcccccggcgagacgacgacggtggcctcggcactggccactgggggcggagggtgggaaaaacgcgtggggcccacgattagagaggcgcttttggcttgccaaagttggccagcgcggggagaagtttggccagctagatggcttggccagccagttagctaggctgttgaagtgtgtttttgatccaaaattgctaaaatttaacttggagagtggaataaggaggctgttggagatactcttatactttaaactgccaaagtttatgttctttctctcacttctccaacttctaccctcgtcttccttacacacgtctcccaaactactagacggtacgcttttaaaaagttttctataggaaaaatactttaagaatcatattaatttatttttttaagttttttttataaataattaattaaccatattagtactaatagacaacactttttcggtgaagtgagatggagttcctaactccacctcaaagaaaccaggaactcccttctccaacatatcatcgccctgtacaataattaactccccagctgttcattgataagaagttgcacgtggaaggatcagtgaggagtgaggacagattactttcaaattccgtttacttttagtggtgtgaagggacacatcccttcatctacttttaataggtatatttcatcttggcacataaactaaacataagtaatcctacttatcatccatttaaacatgttactccctccggttctataataattgatgttttggacaatgttgaggtcaaattttataactttgaccatcaataactttaaaaatatttagtttaaagaaactggaacaacatatatagatttgtcttttaaagcactataataaaagtagacatgcatttatttattgtatatattataataaaaaataagatcaaagatatattttgtagaccgtgccattgttcaaaacgtcaattaaaataaaactggaggaagtacttgttattccttataaacaagtgattcattaatatttacatttcttgatgcctatgtagccaatcttatgtggaagaatggagagtcacgtattaaatccgagaaagtcattaaaatgataggtcgttggattgaaatatgcctattaaaaataaaatttttatatttaaaaatatgtctatcaaaaatagatggagggactgccattgtatttttttcagatttttcagagtatttctttaggaactcagttgtaattttttttaatgcgctttatgttcatagtcttggtttttcgacaacgtaatcgaagaggcacgtgacctgatcaataattactccctccgtttcacaatgcaagtcattctagcattttccacatttataatgatgttaatgaatctagacatatatatctatatagattcattaacatcaatataaatatagaaaatactaaaatgacttacattatgaaacagaggaagtattatactcccaactcctactcggtaggactgccattatactggcaacccgaccccttccccagttcccctgccccccagcagttgactcgcgcttaattattgcatctatagaataaataagtacttattcttctcttaaactaattaatatctcacgcttttctgctggatatgtgattgatagatgtatatgtttaaataatgtaaaaatgatgtgaaaataatgatttaatattgctggcatcttgagttgtaaaagacaacaaaattataatgatatataatgtttgcatgatttttaaaatactctagataataattgttagtatgtgataatgtgttacatttacatattcaaggtttagaagtcggtgggcatcaactttatatagtaagataaaatatcttgtttttaatccagtctcaaataaattaatatgatgtaaaaatacgaatatatcattacatcattaatactatatatatgcatctcttagctttgatgtttggttagacctttgacataccaagctctaattaacgacgtttatatctgacgattggaggtgagaatggtgatgttataactcagagtaaagtgtacgggtggtccttaagctaggtccttactctatactaacttataacaaactctatactaacttatatcaaagggagagaaagtggaccccgaaatatttgagactacggagaacagatcagtacttcataaagaatactaattatcatatatataataatggtcatcaatattccatttaactcctcgaccagttgacacctcaatgtagtacagtatatgtgatgataccagctgtggagtatacagccgcgatagatcttccctagttgatgccgcgatagatcatccctaattattgatgccgtatacgttcgcagacctagaaacggagtgtctgattctgaatattggtaggattatgtgctcaattaattatattatctgtgcgttttatcaaattaactgatggtccaggcccaactactaccgattaaaacaaatatgaaggacgaaatatctcaaaaagatcatgaaagtaaacttagggaagaattaggttttctgattttccccccacttttaaataaaaagggataacatacttagcacacgaacaaaaaaaattatggacaggcaaaattgattcgtagaggcggttttcccagccgcctctaacaaaacagatagggttggatttttacaagcagaccactttactatgtatgaaaatggatttcacatgcgaacaagtacattaaggctctgtttcgccattcctggttcccaacgggaatagtacgcacaaaaaacatagcgatcaattagcgcatgattaattaagtattagctttttttcaaaaatagattaatttgatttttttaagcatttttcgtatagaaactttttgcaaaaaatgcaccgtttagcagtttgaaaagcgtgcgcgtgaaaaacgggggagaggggttgggaaaagggtgtgccgaacatagcctaagaccgcttacgaaaatgcatgtaattttcagtttcacaactcaggcgcaatatgcgcgcggcatatggattcaaaccccaagacccctctctccatacatagatttcttaccatttcgtgcacctatcatttgttggctagattcaagatattatggctgtgttcattagtgctggctgggaaccttccctttcgacatagaaacggagaagcacattagcacatgttaattaagtattagctaaaattaacttgaaaaatggattaatgtgtttctttaaacaactttcctatagaatttttttttcaaaaaacacaccatttagcggtttaaaaagcgtgcgcccgaaaaacgacagggggagttgggaacccatacaaatgaacgcaacctttttactatgttgtttttttaaccttacttagggtgtgttcggaatccccctttcctaactcacacaccctctttttttgcacgcacgcctttcaaactgctaaacggttcgtttttttcaaaaagtttctatacgaaaattgcttaaaaaatcatattgatccttttttaaaaaaatagataatacttaattgatcatctgttaatggaccgctccgtttttcgtgcgtagaccaaactccccagcagcgaacgcagcctttaaccttcaaaatcacaatatataacacatgaaaggtccaggatggccaaattgtcgttgttgttgtgcgtgtgcatgtgttaattttataattagtatgctcaaacactgttaaatgctccttttaacaaaacaaggacacgttttacatattttgaataacataagaacttcaataagtcatatttatccatagcaagtagcaagtgaaaaaggattattagcacacaagatgctgtgcaggttgtcatggcaaactactgtacatgctcaaaaactgagctactgttttcttacgaaaaactaaagtgcaaaaggattattaatctaaaaatattcttgcttcatatggtataagttgaatgtgaaatgaattgtaattaattttgtcaagacattgatctcccagcctcgacaggattagacatgatttggcaaaaagtgtatagaatcataatacaatgccaattggg

SEQ ID NO: 6723 - DNA, 10148 bp, Oryza sativa
ttcccacatgtttcttcagctgactaacgtgaaacacagggtgtatgttagcttcttctggcaactgcaacttataagcaaccttcccaatcttttccaacactctgaagggaccataaaactttgctctgagtttcaatgatcctctcagcccaaaagcattctgtcgatatggttgcatctttaggtagaccatatcccctaactcgaattgtctttcactcctgagtctgtcaacaagctttttgattctggtttgagctttggccaagttttcttttaatcttgccaacatatcctccctctgctgtacagttgctcttgcctcttctgaaacatttccaggtatcgccctttccccaatatgtggtggagttactccatacatggcctcatatgaagtgacttgcaatgatgtgtgataagaagtattataccaccattctgcagtaggcaaccatttgtaccattctttaggctcctgaaacaccatacagcgaagataagcttctacacattgatttaccctctcggtttggccgtcagactgaggatgataggaagtactaacccgcaatgcagtacccattgctttaaaaacattttggaatagttcgctggtaaaaatcctgtctcagtctgacacaatagccactggcatgccatgaagtctgtatacattttccatgaaaacttgtatcacatcttgagtgtcaaaaggatgagacatggcaacaaaatgagcatactttgttaacctgtccactactactagaataacatcttttccatgagattttggcaacccttctataaaatccattgaaatgtgtgtccatgccatctcaggaatttgtaaagggtccaacaatccaggtacatgaatatgttcaggtttagctatttgacaggttgggcattcagtcacctgtctatccacatccttcttcattttaggccaataaaaaatcttcttaagtttatggtatgtcaccttcattccggaatgccctccaaaggtggaattgtgaaaggattgaagcagcctttgtctgatatcagttgattgtcccacataaattctgtttttatacctcagtaacccagattgtaaagtgaacccctctgctccttcattcagttcctctccagttactaactttgcatatttctcatcgcccatgtagttgttcttcacatcctccacccaagctggatataccagagtgattgccaagcacttgtctccatcagtatccctcctagacaatgcatcagctgccttgttttcttttcccttcttgtactcaatactgtaatcgaactccattaatttcagcaatagtttgtgctgaattccttctgttaatctctgggttgccatgaacttcaaactttgctgatcagttctgatgaccacctgatttccaagcaaatagtgcctctatttcttcaaagcttataagatagcaatagcctccttttcatatgttgaagagctagctgccttcttccccagagatttgctgaaataagcaatgggtctcccttcttgcatcagtacagccccaattccaataccacatgcatctgtctctaggacaaaaggttgattgaaattgggtaaagccaaaactggacaggaagtcataacttctttaagattgtcaaaagctttttgctgttctacaccccattggtagctgtttttcttcaacagatcatgaagtggtctgcatatggttccataccccttcacaaatctcctatagtatccagttaatcccaagaatcctcttaattttgagacatttttgggtactggccaatccaccacatcctgaattttactaggcttagttgcaacaccttctccggacactatatgccccagatattctatacttcctacagcaaaagtgcatttgcttcgcttggcaaacaatttatgtgacctcagtatgtttagcactatgcgcaagtgctgttcatgttccctcagatctctgctataaattagtatgtcgtcaaagaagaccaaaacacacttcctcaaaagtttgccaaaaatttgattcatgagagcttgaaatgtagctggtgcgtttgtcaacctgaatggcatcaccaaatattcaaaatgccccatatgagttttgaatgctgtcttagggatatcaccttccaccattctgatttgatggtaacccgaccgtagatccagctttgtgaacaccttggcaccattcaattcatctaacaatcttctatgataggcatagggaacttgttcttgacggttttggcattcaattgccgataatccacacacatcctccaattcccatccttcttcctcaccatgatagctggagatgaatatggactgagactaggtctaatttctttagaatccagcaattccttaataatttcttccatagcatttttctgttgatgtgggactctgttgggtctcaagcttggaggttctgctcccaccttcagtggtattgcatggtcacaatccctctttggaggtaaacccttaggttcagcaaatacgtcagcaaactcttgaagcaaaactgctatctattctggtataatggtttcttccttcttctcttctgttttagacaacacttctatgaagaaacccattatccccttatcaagcatcttcccaaattttccagccttaatcattatcttctcctatggaagagtatgatatacaaatttaacttgctggcccttacatgttacctaaagaactctctgttttaggtccagactgattggactatggtcataaatccaatctgcccctaaaatcacatcaaatcctttcaagggaattaattggaacactctttcaaatggatgaccttgtacagtatatgacaactgctcagtttttgtggaagaggagatcatacccccaccagctaccagtattcttctattgccagcttccaaaatttcacacccactttttatagcaaaatcatagttcatgaaagaatttgtactcccactgtcaaccaatgttacagccctccttcctttaacatgagcaatgagagagaaagtattacttccacacatcccctgtgctgcttgtgtagatatttgcatcaactgtccctcctcttcttccttcttagctggactaccaggagctgtctggtatccagtctctccattctcctcctgagtttcttggggttcctattcttctttaacctcctccatcatatgtaccaccttgccaactttatatttatgttggtaattccatggttccttgcaataccagcaagttttcttttctttctccaccccttgagttgtgtttttctggttgacaaatctggtaccactagactgggcaggctggaattgaggtttgtttctattaaattcagattggtagcttagtctcttagcaatacttgccttctcatacaccttagcataccaatatcctgccaacaagttctggggcttttgcccacatacatcatgcttaatgtcagccctcaatcccccaataaaacaactcaaaatgtaagactccgtcaagtaaggatgatcccttttcactaaagaaacacagtcttcgaatttgtcaatgtactgcattacactaccagtctgttttgcattctgcagtagttccacagcttcatgggcattagcttcagtaaaacgatctaaaaccattagataaaattgctgccaatttagacagtaccagggtatggccaaatttctaaaccatttccctgctcttcccactaagtgtccagatgctaaattaacccactgatccacaggggtgccagtcatctcaaaaaacttttcacattgttgcaaccaccctacagcatcctccccattgaacaatgtcaattccaacctctgactcctcaatgacatttcagtataagggtttggtatgacaccatgcaaatatctaggtggttcctgccagtacatacctcctcccgggtttggcatccctgctcttgtgcctacagcagtaccccctggttgcctagttggatatctccaaggctgattagtgtcaatcccataatggttcatccccacatcctcttgtgactctctctcaggaaaattgaaatttcttctctctggtaacacatgagttctagtagcagtggtgaaaactgggccaaaagatgggttcacagtgtttggttcaatttggaagttcacatttcctacagaagtcatggcaccctgtgtttctgggcagaaaggatgggattgtcacagttgaggtcatgcttccagcattaacaggatttacctgagctcccgaagtcagtggcgtcgcaccagccccggtctgaagtccagtggtgttaggtcggggactgaaacccggtggtactgaagaacttccagccactgttgcagtattgctcaccgttgctgctgctgaagctgccaaccctgctgccccccttgcaatgccactagtactagctccagccgttcccccaaatccaggtccttgactcgacatactcgcacagatactgctcagaagtcctttaatttcacccatttccaaccgcttcactctcggatccgccatctcatgcctaatctgtgtgatttcagcacgaacatcaaactccccagcgctgtccaaactgttgggggatctggttcgcgcaggcatcatcgattgactgacgaaatcggctcaaggaattcacagatccctctccccttaagatctcgccgtctaggtctaccgccaacctgagtaggaatcccgagctccggagattttacagagaacacacctgcgtggttctccaaccctcgctcaaaacaccttctcctcgcttctcctcgcctccggttcgatccgcccaagttccagggattttacggtgagaaatccggagatcctcccaaccttcacttggtgaattcgagagccaagaatcgggctttactctgatacccttatcaaacccaagaaaattcagagccaaaaaatggaattctcccctctctcacaatctgttgggcaccgcaagactcggaaaaaaactagggttctaagctactaagacaataatttggttcttgttgcccttctcattagtctcgctgggttatatactcccgagcggatccaaagcatcagttttaacctcatacagcttagattcagcattcaagtaaaagtaaacgagcataagctcttaaacaaaaattacatgacagtggataagagaacagcgaatcgccaccatcgaatcccgctgtaaatacgaatcttcgcatctctaccattcattctcattaaatgacgtcagccaaacggtatcaccattcttcagactttcttcagttatctctgaacttttcttcagttatctctgaaatctccacttctgacacggatccgccggcgaggagaccggggtcaccggatccggcggtcccggcctcctcactaggagatccggcggcttattgggagggagcggcggcggtagcacagtagaggagagggagctgcggcgacgacggcgcacacgagcgcaagaggcggcgaggttgcggtgcgagctgaggaggtgggcgacggcgcacacgagcacaggaggcgggcgaggttgcagagcgagcggaggaggttgcggcgcgcgcgtagggagaggagaggacgggcggctagggtttgtaccggttggcgaaatccaggccgtccgtccataatccgacgatcacacgggtaaggaagggccggcacagcgggacatgtggacggccagatcgaccctacggtgagatcagacggtggaaagaagcgaggactggcgcataattaaccgaaagtgcaggggtttttttcgcaaaaatcgatgatgtggcactcctactcttccggcgttcccacggcttttaagtaaacctatatttgctggccaatttgttgatgattttgttctctcacatcgagaaaacacgcgtgtgttcttgtttcaaaacaaatactccctccgtttcaaaatgtttgacaccgttgactttttagcacatatttgactgtttgttttattcaaaaacttttatgaaatatgtaaaattatatgcctacataaaaatatatttaacaataaatcaaatgatagaaaaaaattaataattacttaattttttttgaataagacgaacggtcaaacatgtgctaaaaagtcaacggcgtcaaacatttcgaaacggagggagtatatttttctttcagaaaagataacttgttgctcgtattgttgtctgagtaatcagctaatgctccactggcatgcgtactcttctgcttgtgaataggcaccgagatttgttattgccgttcaacttcgtcatatgcttagtccatggccacacctccatttttttttgtcctccgccactgcttctgtgtaatagatgagatgactctcctgattaaattagtttgctgatgcatgtgttcatctggtcccagtttacccctaccttgatgccatagagtttgccttttaattaagcaagtcattttgcaatgcattatctgcatgctgcagtttagccattattgtgcatgcaactatcagcaggatggccatgctaataatcaaagacacgagagaccaatttttctgggattcacgcatgcatgatatggtatgcagatataagagcaagtacaatagcagactataagccagctataaacataattcgaggaaataaaaaaggagagagaagagcagcgggttaaagatttgtagccagctgcaactatatttgtgtatgataggtgaaaccagacattattaattgtgtaatatatgtttataggtaattgttgtatgaattgactattaagttgactatagaaattttgtagccaacaattggctatactattaaacttgctctaagctgatgcatccacctattgacagtgtgtgatcagtccatgatgggagggggagatcaacctgggtttatcattaccaatgccgcagcgcactgatgtgaatcatgtgatcgatgatgatcatgaggtttcttacagattaatctccctggaggcatcggggacaacatggtaatctctactgctgtttcccaggagatctttggccctttttaagtcctaacgtatctaaaattatatgtatgtaatatgtgccaataaaacatggcaggctgagagagagctcgcaacaaatttcctgttgcaggacaagtttgtcgagatgggatgaaaggcacaggtttgaattcattctcttttttcaaccatcattctgctcatttgccagtggtttggaccacatatcatcttgcattcttgcacctatggtatgcttccgagccaagctgtgttaataggaccacaatagtttgatgcacctgtagaaatctgctgttgcaagcatgccctgctattgtgaagttttttaattaattggtgattgtcttaaatttggttcaacaatctaaggggctatgggtgattccgtaatccatatacctaaattatccatgtattttttttcaggaccattgtcatgataatattggcattgcattggcaatattaccatgattatatatattggaaaatgaattatctttgcctgttcgtcacagggaagctacttgcagcaggtgaaaacattaggagttcagcgtgctgaagaatccaaatttgttatggtccttagttaagtgactttcagtcttagtcgatcttgccgcgtggtattgtatacgtatgacagattagcgtgtccttttttactttgctagaacacatttttttgcacattattcatggtgtaatttgcgtgacagagttgcttacattttattatgttttgttctctgttccctatattgacattagccattttctactaaacacgcaacttggtcaataatacaactatgtaatactttatgaattgtctgaaagcttaggtgttgttagtcttacgatagaaaagccactatgctctcaggcgcatggtttttcctactccttccgcttcatcttattataaagtcatttaatttttttcctaaccaaacttatttaagtttaattaaatttatagaaaaatatgtgcttaaacaaatatggttcccatcggatggcataatcagccaaagaaaaagccaaattttgaatttttaaacttaattttgagattgattttgagacattttcaacgtagcttcttttacaatattggcttttaagccaccaagaacacatttataaaagtttcacctacaaattcatttttatttcctaataagccgttttagcttataaggaaataagccaaacgatgggacctatatttttaaactgttagatttaataaaactagtttcatattttaaatattgttaaattttttatgcatctgatcaagcttaacaaagtttaactacggaaaaaagtcaaacgatgaaaacaaagtttaattagaaaaaagtcaaacaacggaaatggagggagggagtatcgttttcgttgttcatgttatttcattggccacgccttagtgtttttcattgacctcatccgctaaagttaattagttatagttttactatcagtacatgctaaaatgtcccaaaaaaagccaataagcaatacctactgttttgactttagtaacttttgtactccctctgttttaaaatgtttgacatcgttaactttttagtacgtgtttgaccattcgtcttattcaacaaatttaagtaattatttattctttttatatcatttgattcattgttaaatatacttttatgtacatacatagttttatatatttcacgaattttttttaataagacgaacggtcaaatatgtgctaaaaagttaacgttgtcaaatattttaaaatggagagagtacctttctgtgtgagcggcgacagctcacatccccttctagttaacgagtaacgactagacatgagacaaacccgacgctgcgtgacgtgagtacgtgacgcagcgtcgatgcccgcgagagagagcaatcaaccgtccatatgcctccctcccttccccctgcacgcatctccatgcgctcctccgctgccgctgacacgtgggcccgccatgtcagtgagagggagagggcccgtgagtgggtcgacctatatatgtcgctcttccactccgcctcgtctcgcttcaggccttcagcttccattaatttccttccgtgggtttgcgtgcttctagctccgcttgcttgtctaccggccatgtcttcccgcggcggcggggtagggggccggcgcggtggccccggcggcgccagcagtgtccgtggcggcgagcgcggacgcaaacgcggtcgaggtgctttggacgccgtggagccccgcgtcccgcttccacggggcacgggatccggccctggggctggccgggacggagccgccgcgccggtgccggcgctgcaaccggcggaggcggatgtgctcagcggcgaggtggagacggagatggcggccgggatggaggcgcgcgagggggcgtcgtcgtcgtcgtctgcttcggcgccggcggtgggggaggtcgagccgccgtcgcgggcggtcggtgcgctgccgccgacgtcgagcaaggcggtggtgctccaggcgaggccggggttcgggacggtcgggacgagctgccgcgtccgcgccaaccatttcgtcgtgcagcttgccgacaaggagatctaccattacgatgtactccatcccggtttcgctttgtattttagtaactttttttattaagttgacttctagtacaagaatggattttaaactctgcatgtcacatacaatttctttcatgtcgtcgaaacgattataaaaaaaattcaagataaaccgagtttagttccaaactttttcttcaaacttttaactttttcatcgtatcaaaactttcctacatataaacttctaacttttcttttctgtcacatcatttcaatttcaaccaaactttcaattttagcgtgaactaaacacacccatagattaatatgtagtaatagatcattccacgac

SEQ ID NO: 6724 - DNA, 5086 bp, Oryza sativa
ggttgatccctcacgaaaatttcatcgaaacatagaggagataaactaaagaagggagaagtcaacagcaatgttgttgtcagacactgatgaatacaatcctggactcgaatgattgatacgtcgtgtaatctggggttgaaaaattttcaaaattgatgataacacaaacttttggcgaaatgggtttttgattttttttttcatgagcagcagtatatgtatcagtaagcaagacaaacattgggcctggcttgtgctaattattctaaatttgcgaaaagctgatattaagaaactgatcatatcagagtgaggataaatgcataaatcgtgtgctaaaatgatcagatgaaaagtgtggcaagaagttgatagattgctgtggttccaagcctaagtttgccggattttggttgctaattacacgataatgttgactggacttgactactattcggttcactgccaaaattttggcgagattccatccactttggaaacatatcgagttctcgatttcttccaaaatttcaaccacattttggcacaaatcaaccgtttgacattgctgcgtgctgtagctgtcttgggttcttggctatggcgtgaaaagaatgcatgcagtttagctggtaggtaagatcggtgtgatgaggccagtcgatctcaaactgatctatctgctgttttgtcagtcgtcacactaccaaactgtttcttttaatgaagtttttgcacatgaaaagctaagctcaaagctctacgaggtcaaacggaaaggaagacaaacaattatccacatataattgtcgccaaattgagcatattggctatttatcttcttttgatccaatgtataagatgatgtatcaccactggcgtcactagaatttagagcaaaatgtggtttatccagatataaggagccaaataaaaaagataattcatatacaaatatttatgatgttaatcagtaattatattgtgtcaagttctagggtggtccatgatttacggtgtcacctaactagctcctatttatattaccatgaaggagctgaccttcaccttgagagtgaaacagctaatatattgtcttgccaaaaactggatagtttatgccgtataaaattgcctatggttatttagtaacgtcaattaatttatatattctttggaacaaagctttttttttgaaaagaaaatgtgtgaattgaattcgtgttaaaattcttgcttccgaaagggcccttaaagaacaaagaaatttcggattactattcattttgagttactgaaatgaaacacatttcaatatttttgccgcagcgtgttacacatgctggcacagagtcgtttccaggtcaaaactgaaaataaacgctgttggagagcttagagattctagtgcagctgtgcaggcgatttcagaggagtactacatttgatttcagtggcctaatatgacttttggtttagaaaagtgcggtcttttccattggcctaatatatactccgtactacagagtcagaagtttggaaatgataacgagttagtaaaattccacggttcaaaagttgttggagtacaacatgacaacaattgcatcatttggatcttcaagtcaagtcagacctgttgcagatatagtgataaaaatccttaccgtatattactcttaggttgtgtttagttcctgaaaaaagttgaaagttttaaaaaaagttaaaagtttatgtgtgtaggaaagttttggatgtgatgtgatgtgatgaaaatttggaagttttgggtagttagggggtgaactaaacacggccactatttcggcgagataaattttatgatggtcttaattggtaatcatccaatggatcatatcaatttttactacacgaactattggtaatagaatcaaggagattagttattttattattagtagaatttataaatcaatacagtagcttattttgtttctattgataataatattggtaatactcccaatagatcgtttaattacctgccttttggtgttgcaaaagttaaacggttgatagaattcatggtcaattcttcaggagttcaggtgatgtattgtcaagttaacacacgcataattggagttttataatacttccttcgtattctaatgtatggcgccgttgcctttttttaatcaacgtttgaccatttattttattcaaaatttttgtgcaaatataaaaatatttatatcatacttaaagaatattggatgataaatcaagtcacaataaaataaataataattatatatttttttaataagacgaatggtggttaaaaagtcaacaacgcctagttggagaattgtcaagggaagaaaaaaacagaattcgtttgatgggctgctgctacatcgggctgggctgggctgccatggctcccaagctctcagcgcaaatcgatctacgagtagctttgggcccacttcacagggcccaaactggaggatgcatcgtctctccggacacgattcaccacgctaaaacccattctcgttcccgtgcatcactatcttggtgtgtctcacggttggaattgctggacactcgtcgactccgtttttgccccctttttgccgggcttttatttcctgttgcgtttgggtctttggtatcgaggaatcactcagcgtgctccagagttgagttgagacccaaagtgtgagacgagtatcatcattgcgtcttttgcaccgtaatggctaatgatcagatcataacactccttccccaccgttttcctttttttaatttaatttgtaatctcgcaagactgatatgactacctccgtcccaaaataagtttagtcttatattgtttatgtctaacgtttgaccgttcgttttatttaaaattcttttatgattaatatttttattgttattaaataataaaatataaatagtactttatgtgtgactaatttttttataaatttttctaataagatggatggtcaacgttgaacacggatacccatggatgcacttaattttaggatgaagagtaatatttggatgcctttgcctccttgtacagtagggttgaaagtgattaggatagtttctgtccgaccggaccttttttcagattcggatagtttcagtcgaatatatctaaaaaatttcaactacggaaatgaattcagatttttttttgttagaaataaaaacgaatatgaaagtaaacacaacattttctatctcccccttgcccttacaaatagagataaaatttgaaaatgttgatgttttgtttttaaaactaatggctacatctcttcctcgatttaagaagcttactttgaggggtcttgatatttcgataattattttataccgtattcgtttcgattcgagttcgctccatatctatattcgataatattcgattccgttttcgtatccgggtttccgattccgaattcgattccgagaaaaaaaaatataaaaacaaatatgatagagctagtttccgatcgtattttatccgttttcatctctaatgtacatttgcgtggcataccaggtgggtggatgcaaaataacgtgccctgttttgacaatgttttcccaaaacaaaaactttttttacccatcacatcgaatatttggatacatgcatatagtattaaatatggaaaaaaaaccaattacacaatttacgtgtaaattgcgagacaaatattttaagcctaattgcgccatgatttgacaatatggtgctacagtaaatattttctaatgatggattaattaggcttaataaattcgtctcgcagttttcaggcggaatctgtaatttgttttgttattagacaacgtttaatacttcaaatatgtgtctgtatatccgatgtgacatcaaaaacaaaaatttttgccatctaaaccgggccatagtgttcgctttgccccacgggcaattttcggctacaccatgcatgtaggtcattttcaaccataccattttttttttggcaaagttactaagaatgtgcctacgtttagtttgttgccaaattttgataaatacataagaaatcatgccaaaattttaacaatattatcaacttgctaaatttttggcattgctataatttggtaagatcctctgtaaaatatagtgaaacaatccttgtactgacaattgtgtcgtggtgtgttttccgaacaaaccctcgttcctttaataaagggactgtctatatatctgttgatagaaaatctcacatcccgtctgtcgacgggggatacccgtagaccgaatatagagggtattggggcacgctggtacgaggatctacgtagtacgacatcaagcaaacaggaaacagagattatactggttcaggccccttggtaggtaatagccctaatccagttgatatgggattatataatggaaaccacagattacaaagggattagtggaccttgacgataacgacaagatcgtagtcgagttgatccgactagatctcccggcgacttggctccgataagctccggcttcgtaggctgtggtggatatgttggctctgagattcgatgccttatgtcctcccgtgaggtcccttttatatcgcaggtcacctgtctcccagtaggactcggagggaccggaccgaacacgacacaatgacgacccatttctgaccgagtaggactccttccatctgtgaactctgtgataaatttccttaacgtatgccgaaagcgtccgtatacgcgtgaacataccatatcgatatgtgacgtatatcgaaggatagagggtataccttacccgtaaccctgacaccgtctttcaaattttggaccattgaatgtgcttttaagattcatgcaaaggcattaaccctagctctcctcctcccgttcccctcccgtcgcgcgtccgcacccctcctcccatcgctattcctccgcccgatcccccgccgccaccgtcccaccgcaccgccgcccgccttgccggttggccggaggatgtcaacggcaccggcgagaccaccctagccagcctcct

SEQ ID NO: 6725 - DNA, 530 bp, Oryza sativa
tgctgagacctgcctcaatgagcatgacggcctcctgtacctctttcagcccgtcaattgccattcgaccagagccaatccagttggcattcccccaggctgttctcgcctcctggaaactgaaccgggctttcgaaggaagcgtgaccacgcggcggacaatcgcctcttcaagccagcaaagaaacatctgacaggcctgtcgggatgccacaaacttgcgacgccccataaagtacgcccaggactcgttagcacttgcgcgtgcggtcgagtagctcatctgcgaatagtttcgcgaaagctgctcatacgacacaccaagcccagcggcaatataacgcagcagggactgttcaaaagtcgagtagccgttatcggtatcctgcgccgactgaaggttgagagaatcacccggcaacaggtgtggaacccttgccccacccaggcgaacaggcgcagctgagtaataggacgccatttcaccgagccagcccgtaagtttgctctgctgctctttattatccgcg

SEQ ID NO: 6726 - DNA, 729 bp, Oryza sativa
tcctgcagcccgatcaaacagattgtagtaatgcaagtctacaacagtgttagttggacccaggtcagcctgataaagctccgttgggtctgcattcccaatcctctggcagaatataacgtaagctttgtccgaataacttcgtacaatctggtatcctgttttgtaatacgacactagagtgcctagtggtaccgcgcctgcagaaggctcattcaatagctcaatacctaggagagaggggttgtttgcatatctgcagataaagagtgtacatcttgttagaactatggaacatgtattatgcatattattttgccgggttgttatgcatattattgcttttcatgttattttggatagatctcggtggatccaatggctccttactttcgtgcattttcttatgaatgaatagatttatcatagtaatcataattcaagtaggaaatgatttcagatgaatgaaaagaaaagaaaagaatgggacatcgattttttccccagagcccttatgacattatctaccctcatgccaccaattgcatattgaagaaacatttcattcacctaaagcaattttttcatgatatacaagaaaatatagtggatggatcggtgctacctttgagccagaaaattaatgacatccagtgttttctcgatgttagctggtgaaagccaatctactgaaccatccctacttgcactgtgttccattccgttttg

SEQ ID NO: 6727 - DNA, 934 bp, Oryza sativa
ctgcagccctagcaaaccaaatgaatgagataatgaaatgaacaccgaagctgcaagtcgcattgtttcattccagagcaaccagcatcacctggcattgatcctaaaagtcgctggcaatggtttccgcagcacactgatgaagtcatcccactcctcctcgcgaacaattcgttgctcctgcaaaggcacagccatgaacatgcatgatgcaccaacatttccacccacatactttctgtaagcagcattacagcaaaaaacacagcatatcgcctacaaagcagcacaccgaagaacagcactgaaactaaacaattaggcaaccaccgccatgtttcaatcaaaaatcgcgcgcagagtccggttcacctcaaatctccccaaaccgataggcacgggccaacctatggctaaagcgagcaatcattctcaccttgtaatactcctcaaaggcagggttctcgaggggtggcggctgccacgagcggttggcctcgccgcgggcagcggcggcgggaggagcggggcggggagcgtgcctccagaagctctcgagcgcctgcgtgaggtggcggcgctgcacccggccgcgcttcctgccgccggcgccggcgacgcatcgctttccgtggccgccggcgacgaggaggctgtggagcgagacgggcgtcctcgacgctatcatgttctggttgtggggtatgggccgtgtggccgcgggccgcgtgggtttaagccgtcgggtttcaatttggcgaatttcaatcagattcaaatttgtacattatggcattaccaaattggcttaagtctccttatatttatacaaagttacacacagagactttgccgtcattaacacttggaaaaactagtcgaaacggaagaactcaaaagggaaaaaaaatagaagcaaattgttcaaatgggg

SEQ ID NO: 6728 - DNA, 1117 bp, Oryza sativa
ctattacagtatttaacatcaagtaaaggacgcttgtgaaagatttattgtgccaacctaattaagaacatgcactaaatatactcatctaatcgtgtacacaaaccgataaatcctttgtgtgaactgtgtagtgcaaactgatcagaaaaacaaaattgatttggctttcagttcttggtacaacaaaacaagagaacaacaatgtaaacatttgtgattgaacaagtaagttctttcacaaatgcataaaaattataagtacttgtcaaataattcgaggtgcagtaaattagactgcaattcttcctattacattgtgatgctgaatacaaaaatctacagtttttgtagcgagacataattattattattactaggtgaaaccccgcgcattgctgtgggaatttagtatgataacagtaaaaaaaataacatgtaagatagctagataacataagattaagtaaattaatgtggtttatgataatttaaatttaaatagtatgtagaatggtgattcaaacgtaaaaagtaaggtggtatgactttatggaagaagaaaagtagggagatagtttggaccatagattaatcatctaaaggctaaaaacaattgatgtgatatgacttaattagaggaaaaaatgagaaagataatttggaccatagattaatcatttaagcactaactaagtgaggatgaactatataaatatataggatatcataaaacataataaagatatatattaaaacattttgtgaattattttggatgataatttaacatgtttgtatttgaaaagctcttaaattataaaaactatattgcatgatgtttaaatgtgatgattgttagtggatgataatgtggcatcttgttaattagtggatgatgatgtggcatcttgttagtggacgatgatgtggcatctttgcatgataagcttaaggagtttgtggggataactttatagtaagatatgattaaaaaggggaataaataagatattcgggggtaattttataccttgatgataggcatctggcctccaaacatgagcaccacggacatctggaagagcacacggaaggtgtcccggatgttgttcgc

SEQ ID NO: 6729 - DNA, 1142 bp, Oryza sativa
  unsure (1)..(1142): unsure at all n locations
ttcgccgtcgtcctgctgcttccgccgcatccatcccggtgagcagtcacatcctccgccaccgccgcntgcgccgatcnccatccatccctccagcgagcagggcgggcgccgtcgttcctcctgctgcttccgcccgcatccatcctggtcactggtgagcacatcctccgccaccgccgcntgcgcttgcgccgatcctcatccatagcgcgagcgagcgttcctcctgctgcttccaccgcatccgttacgcacatcctcactttttttctcgaatttgcgttaaccctagcttctgttctagaaatttgcctcaaccttaatactaaaacagtttgatggttcccaaaaagtttcccatgttaagaaagcttggttacgcactaggatttcatgatttgtctatctctttgcaccaccaaaggcaccaagctgatatcctggttgcagcagcaccatgggtggagaagatgagtttcgcagtgttaaaaatgatctagtgatgggggttctgatggcaaaaggatgacttggggcattttggggtgaaggaaggctaggcacaaaccctcttgagaggacagtggtgggttatagctcatgtttaggtttgttctaagggatggtatttatcacacctggacaatacgattttggtaaacctttctagctagatttttggttctagaaagggaataagttgaatgttgtgaggatcattgatgatttggaccacttgtgccgttaactctcctagcgcataaagcttatgtttccctaaatgcaaccgaccagttagatgaagggttgttactatgaattgatatacataacttgtatttgaggtgaacatgttaactcgaacaattacatattgcatggtttctgtgacaaactgtatacatcatcctagtataatgaacaagcttagcacaacttgaatcttgggtcatgttttgccttggttcaaaggtttgcatcatgtcatcaatatgtcatataaagtgtaaaattgtttgtggaatgctagaccttagctattttcttttatattgccagtgaaaatggaaggaaatgctagaggcggtgggcattctgaggcactgaagaactacaatctaggaagaactttaggtatt

SEQ ID NO: 6730 - DNA, 768 bp, Oryza sativa
ctgcacccctactacaatctgtttgatccgttttttgagaaacttaatgcaacagagaacatacagttcatatacaataacagaatgcctcaagtgcaggccttggataaagcgaatggacctcttgtttttattggtaggtcctgcaaaatcaatttcctttgctcttttcttttcataattttttcttcttctctgtaatgaataatggtgctttctcaatttatccaactctgtgcagccattctttccttgtattcggtacatcttaatccccgttttctcatttttcaggagaatgggtaaatgaatggaatgtgacagacgcttcacaaaccgaataccagttgtttggaaaagcccaattagaggtctacggggaagcctcctttggctggtcttattggacagtcaggtgcaacagtgtgcactgggattatgaatggaacaaaaggaataggtacctcattggtaagcaatttatcctgttctaggttctccggagctgctttctaatatccagtcattctatactaaactctattatcaccatatagcatatgcagtgggattgcattagttttgtgattacttttgcttggtttatgccataaagtcacattaagcttggtcgtattaattaacacaggcatatgcgtcatataacggctgatgggtaatagttgctctactagaacttagatgagttgcagcgtctatttcaccttgcagttcgatccagtactctccattttctgtggggctgca

SEQ ID NO: 6731 - DNA, 660 bp, Oryza sativa
ctcctaggtctgcatattgtacttttcctcttactcgacttaaccagtaccaacccagcttctcaacggatttataccatggcactttaaagccagcatcactgacaatgagcggtgtggtgttactcggtagaatgctcgcaaggtcggctagaaattggtcatgagctttctttgaacattgctctgaaagcgggaacgctttctcataaagagtaacagaacgaccgtgtagtgcgactgaagctcgcaataccataagccgtttttgctcacggatatcagaccagtcaacaagtacaatgggcatcgtattgcccgaacagataaagctagcatgccaacggtatacagcgagtcgctctttgtggaggtgacgattacctaacaatcggtcgattcgtttgatgttatgttttgttctcgctttggttggcaggttacggccaagttcggtaagagtgagagttttacagtcaagtaatgcgtggcaagccaacgttaagctgttgagtcgttttaagtgtaattcggggcagaattggtaaagagagtcgtgtaaaatatcgagttcgcacatcttgttgtctgattattgatttttcgcgaaaccatttgatcatatgacaagatgtgtatctaccttaacttaatgatttt

SEQ ID NO: 6732 - DNA, 580 bp, Oryza sativa
  unsure (1)..(580): unsure at all n locations
cgttgatcaggggaagggggcgatggagttagtggtggacgacggggtggtgaacgccttctgggacggcggcggaggcggcgcaagctcttccccggtgatggccgccgtctcggggtttattgaggagccggacggcggtaattcctccgtcgcagacgcagcgccgccgccggagcacggaggtgcgtctgtcgtcggacgggatggctccgcggcggcgccggcggcggccgcagggaggaggaagcggcggagggcgaggaccgtcaagaacagggaggaggtggagagccagcgcatgacccacatcgccgtcgagcgcaaccgccggaagcagatgaacgagtacctcgccgtgctccggttcctcatgccggcctcctacgtgcaaagggtacgtctnctgccgacccatctagggctcacttcgcccaagaccgcattgatgatcttgtagaattatcaacaattcaagctataaataaaataaattctcatgtggatagggcgaccaggcgttcataattgcggagccatcaactacgtcaaggagatggagcagcttcttcaatccctg

SEQ ID NO: 6733 - DNA, 575 bp, Oryza sativa
ttgggaggatttgtggcagcagttcaccacgaacttccagggcacatatccgcgcccaggcgaagaagcggacttgcatgcggtacagcgaagggacgatgagtctcttcgctcgtacattcagcggttctgtcaagtccgcaacaccataccgtgcatccccgctcacgcggtgatctacgcgttcagagggggtgtgcggcacaaccgcatgctcgagaagatcgcctccaaggagccccagaccaccgcggagctttttcagctcgcggactgtgtggctcgcaaggaggaggcctggacctggaactcctccggttccggtgtggcagctccggccgcccccgggtccgccgctcggtcagggcggcgggacaggaggaggaagaagaggtcggcccattccgacgacgagggtcacgtcctcgccgtcgagggtgcttcgcaggccacccgaaatgggaggcctgcgagcgacaaaaagaaggaggccggcgctcccagcagggaacgcccgaccggcaagtggtgttccgtgcacaacacctccctccacaacctcgcggactgccgcg

SEQ ID NO: 6734 - DNA, 795 bp, Oryza sativa
cccgccgctgcgcgccctcgcgtccagctcctttgcccgcgcctcgagctcagcggcccgctgatccagtgcggccctctcggcgcgggcgccttccagattgcggcgcgcctgctcctcccgcgctgtctcgcggagggacaggctgtccgccagcctttgcgccgcggcctcggcctcctcgagagctcgctcccgctcggtgagcgcatcctcgcggaggcggagtgcgaactcctcttcggcacaggcggcctcgtgcgccgccagtattgcctcccggatggcgacggcggcctcgcggtccgccaggtccctctccttcgcgcgggcgcgctcttccagcgccgtggcgcgagcctcaagggcctcttcgcgccgccgggacgccgcctcgttctccgccgcccgccgttcccgggcagcggcggcgtcaaggaccccccgtgcggcgtcgagcttcttccctagctccgctgcctggctcccgtattggaggcggaggtcgtcccgcgcctcggaagacttcaagatggtgatccaaccggtgctgaatctcagctccgtggaggcatccctcatcccccaaggtgtcctccccctctgcagcgatccagagcgcgccaacatcctgaccatcatgcaggcggtcggggcgtcaggggagcgggcccctcgaggccacgatggcgcgggcgtgagccacaggggggaacaatctaccccgggagggggtcatgcttctaggccccgcgacgggagcagccgccctgccgacgcccgggggaagaggaa

SEQ ID NO: 6735 - DNA, 2151 bp, Oryza sativa
attcgctagtgcatagcgtagtaattgtaatattgggtgagaacgagagggagggctgtcagtggtggttgaggagatgaggtcaaatccaccagccccccgagctcggcgcgctggagatggctaggcgggtgccaatgttgggaggttgacaggatccagatggaggtggcgggagggtgttggtcttcgagctgccgagcatgataaggtcgaatgaagatcagattattgagccaagtggacgaccttgttagcctgctctcctgttggagtttttttttctcatgcgggagaagtagaactataggtggacgaccgggcctgggccgaggtcagttggctcggcacggtctgacctatacgtcggatcgggccgtacctacacacgggctgcacacacggcccatgcacggcccaataagactcgggccatgctggcccggcccgaagacacgatagcccatcgtgcttctccatagaataagtatatttcccctcttacctctttgggttgtgtcttatatggttggaataagtctattttgcatccttctttgggttgtgtcttatatggctaagataagataagtccattttagatccctaactattttctttgatcgtgccgtgtcgggccgggccggcatgggcctaacactagtcgtgtcatgccgtgcttgggtctcgggccttatggccatctataaggcccggtttagttccccaaatttttttcccaaaaacaccacatcgaatctttggacacatgcatggaattttaaatataaactaaaaaaactaattgcacagttagagccttagaggtatgggggaaatcgcaagacaaatcttttgagcataattaggctgtgttcagattcaaggatgaaaagttttggcgtgtcacatcggatattcggacacacatttgaagtattaaacaacagactaataacaaaacaaattacagattttgcacgtaaactgcgtgatgaatttattaagcctaattaatctgtcattagcaaatatttattgtatcaccacattgtcaaatcatggagcaattaggcttaaaagattcgtctcgcaattacacacaatatgtgtaattagttattttttgtttatatttaatattctatgcatgtgtccaaacattcgatgtgacagggtgaaaatttttgccaggggatctaaacatgcccttagtctatgattagccataagtgctatagcaactcacatgtgctaatgccgaattaattaggatcaaaagattcgtcctgcggtttccaggcaagttatgaaattagttttttcattcgtatccgaaaaccccttctgacattccgtcaaatatctgatgtgaaatccaaagattttcttttattttagtgttaaacaatacgcccagcacattgattttttcaagcagcaacacgcagtcgaccatttccatcgtacagtgaaatgattgaccaaattacaggggaaatatgcttcagcctattggccaaagctggcgagcaagggccacgcttgtaaggctgagttacaattaaggcttgtaattaattaagtccttgtatagttcgctaaatgtcacatcgaatgtttgatcggatgttagaagaggttttcggatacggaatgaaaaaaataatttcattactcacctgaaaaacgcgagacgaatcttttgagcctaattaagctgtcattagcacatgtaaattactgtagcacttatgactaatcatggactaattaggctcagaagattcgtttcgcgatttccatgcaaactgtatgattagtttttatttttatttgtatttaatactccatgcatgtgtctaaagattcgatgtaacatttttgggaaaaatgtttgggaactaaatcaggcctaagtattaacttaaaaaaaacttgaaaatgtacaaatatgatttttttaaagcaactttcttatatagaatttttgaaaaaacatagtagtaccatttaattatttgaaaagcaaatgaacatgaaaagagagagagagagatgagttgagaaaaagaaaggattaacacagtgcgtgccatgatcgtgactcatgagccttttgccattcggtgagtgcaccgtgtgccacac

SEQ ID NO: 6736 - DNA, 2862 bp, Oryza sativa
cctgcacccctgcagtctgcaaaaacagaacactgtaaacttatatcaaaagtgcaaggcttaatattcacttgcagaaaaaacattaaggttcctgaagttgtgaatggaggatgcattcaggatggcagtatggacgatatgttgtgattgtaggaagaactacagcatgaatgcaatgatatactggcactttaggaggagtagtataggttggccttgtcttccaaagttccgatgcccattgcactatgatttgcagcttttaaaaaggtagggtgctttgtttcctccgaaatttatgtggaagttgaatggggtccgttctctgaaattcatgtctttgcttgaatggtgctcaaaaagagcgtactgactaaagataatgagattggaagaggtctaaaagaagagaaatgacagttttttaggattgatgagagtagttatcacctgtttttcagttgacaagcttactagatagttctgaaatgcaacaatgcaaacatttgttttcagtaataaagacaatgagattgggagaggtccaaaagaagagaaatgacagttttttaggattgataagagtagttatcacctgtttttcagttgacaagcttactagatatttctgaaatgcaactatgcaagcatttgttttcagtaataaaccttttagttctcctaggctgtttagatagctggttaagatgacttaggggaaagatgacaacccttttaggtgcacttgcttctggacaatttagtaggcacaaaaagctgcatgtttcagatataaaatgtatcattttatcattaattagttgaatttctagatagtaccacagatgctggagtatgatagaatctctagtgctgaggaccaagcttgtcgagcaagtggtatctgaagtttcagatgtgtgttggagtagcaactcaaagttccaaggattcagggctgacaagagtacaatactgtttttctgttactgtggaggactactgagcagttttagctggctgtgttttaattgtcctcctaatgttatgtcttgatccatgcagcagttgtttgctggatcaagacttggtatcctactgtttatttcgttatgctaaagatttctcaagtatataacttttgacggttcagattctaataagagatatcagaagagagtttcctttctgggctaaataaaactgtgtgttgaaatgtcagatttggagctcttacaaaagagttaagtgatatccagtcaatgatcaagaacatggatgaatttcaaacattgggcaaagtaactgtccatagccacaccaagattttcatgaccgattggaacgcactcgtagaaatttcatgtcactgacacgttaccaagtcccctttctaacaccatttttgacagttcaattctaactggttgtttctttaaacgaattctaattggttgctactaaaccaacagtgaagcaaagcttaaattcttaaatttctctaagtaggacgaggtaggtatcctggaagattaagcaatactcacctcattgataggatccctcagcgtcctccgcaacaccctaaacctgacgccgagcttctcgacggtcctcgacagcacaccgacggccgccaccacgcccctcacgctctcctccacctcgccaatcctccccgcgaaatccacacccctagccgcggcgccaccgccgccgtcgacacccacctggcaaagccgcccccactgcctccggcggatcaggcttccgatcgccaccgcgcccaccataagcacgtactgcacgacgaacatcctcccgcccacgagccccgacgcgggggcgcccgtcgtcgtcggcggcgggaagacaggcgggccgcgcataccaccgagcagatggcgggcggcgcgaggcagagcagctccgcggcggagaggagcgcgtcgagcgccgagctcgtcggcgcggcggcggcggaagcgcccccgcgacctgcgaaatgtgcaaaacgaactgtctcagctcgaatcaagaaggtcgtgggggggagcagaccgcggccgcggcgagcagccaccagcgcatgcgtttaccggaggcggaggcgcggagaggcggaggccatctgcgagagggagctcgcgagaggagaggcgatggcgagggcgagggcgagggagggaggcggcaatggaggcggaggtgcgcgcgggagcggagcggcgcgaggggagcggggggcggcatgagcgaggaaaggtgaggtgaggtgaggacgaacaaggtgagcagcgcgcggatgcgattggaagggagccacacccagacacgggccgttcttgttacctgggctcccggcccaccgccccggtagttgtccatgagggtaaaagaccgcgatagcaaggataacagtagactataagtcaactataaacttatataaaagaaaaattaaaaaataagtgagaagggttgactctcatgtaagagctaaaacattttcattattaattttatagtgagagaaagagagatgggagaaaaaaataatgccatccttatagttaacctattatacatgttatttataataaggattaatagccaatagtcacctatactattaaacttgctatgaacaaaaagaggctttttttaactagggatgaagacataatgaacctttccaaaatttaactgtgctaaaactttactccctctattgccaaaatataaagcacaaccacctttgacccaaagactaagaaacaattattatcacctcattgtttgaatcatcttaactaatacaatacattcacccaataaaattaaacacctccatttaaa

SEQ ID NO: 6737 - DNA, 3633 bp, Oryza sativa
atggagggagtaataaggtgacagcattgtcaagttttaatatgaaaggataaatgtgatgttaccaaaatttcttagatattatcaatgtttggtacttcctctatttcatttcctctatttcatattataagttgttttaatttttttttctaatcaaatatttttaaatttgactaagtttacagaaaaatttaataacactttgacggagcgtggggctcctcaccgggagaccgcgcaggcccccctttgccggttcggccgggggccctgggtgagattctaagctcctagtctatgtgtggaaggttcgcgagaatggaaacacacaagacacgggcgatgtatacaggttcgggccgctgagaagcataataccctactcctgtgttttggtggatctatgtatgaagaagctacaaaagagctggagaaccagagagctcttactctctccctctctgatcgttctggatccgaaaaaatctcctttctaagtgggcaaggtcctccttttatacctcaaggggataccacatgcaccatctctctcttttttgtggggacttatcctatcttttcataaacagacggagacttgtatggttgccgtccgaatgaccttctgatgggacggcccatacctacctccacttccgccggaagcaggcgcgacgtgggaacatggctgtctgctgacgacatgaccagtgtcagaccggtcacaaatcggtcattcttgtccaccacgtgtcagtttaacaatctgcatgttcgcccttcttcatacaatatcttgcctgtaatggttaggatgaagcctggcatatatctgaccggaaccaacgtgccatctccaggagctaacacgccggctccggctagggacgagtgcttggaggctctcgtcctgacgggatggggcgaggcgtgcgtcagaccgcctgtcgccacctaacccgcaatctgaccggtctgtgaccagtcacagaccggataaacgagcgcgctgtactgcattacgtgtggcgtgacgtgctcacccaaaccgcaataaatgcggttaggtgagccccgctgcgctcacctaacccatacacgcggcgcaaaacccacaaggggtcggggcgcctcggccctcggggccgaggcgggagcggtccgaccccctcggggagacaaagaggagggcgaacacatcaccctcgggcccgacgccccccgagggtgccaggccacgtgggcgattgtgtctgcctcaagcctctagtcatgatactcccggttccatgtcaccgacacacttacaacatcaaattagtttcattaatagcaaaattgaatatatctggttagaatgttttatgttcaaaatatcactatatttttctaaaatttggtcaaaactaaaaaaagttttactaggaaaaaggtaaaaacaacttataatataaaacagaggtagtaacaaactaaatacatccatatcttcgtcaatttcaccaaacaatggcatagtttaaaataacaccaatctgaacaaacctgaaattgtatcatttatacggaaacaatttttggatggtttggtatttttatactttccaatttaactatttggtggagattgcattactgcactgaaagaaattagaattatcaaaatttcatgtggttagacttaggatcggaaactatcactttttatagttcagttgggtgcccgttgtaatccctatttgtagcgttagaattttgcaagattttcgcagggattagtttaattcctgtaaagtttgtctaaaattgatccattgcaaacaaggcctagagctgttttcactcaagaagagtagcagagctgaggtacaaggccactttggaatggagaaattttgtgagaattgaatttcttttttttaaaaaagatgtacgaaacttctgctctcaagcgcttggaagttggaacattaattacacaaattactgtactgtaccctacaaaacagacatgaacactacgatgtagtacttcaggattcataagcatgtgggagttcttatctaaactgacatcctatgtgaaaagaacgggttgtcaacagggtttcctaaaccgtcggggccggggttaccgcgccctggcggtaagcacggttaccgcgcgataagcgcggtaaccgtgaaaaaccgtacgaaaccgtacaaaatttatctaaaattcaaattatttttaaaatttatttaaatttaaggaggttaccgcggtttttctattaccgtaccccgcggtaaggccggtaaacacggtaaccgcgcggttaccgacggtaagtcaaaccctggttgtcaaaaggaagtgaactacttattggaggatttgcagaaacagatagagcacgttggcaaatactactctaccccagcaactgtccaagtgaaactttcatgtgcagagtaaaagaggtcgagcatgcttactctgtcagacaggaagatcctgccttcctgaggattgaagacaacaaaaaacctagagaaggcgcctaccgaaagacacaagatctgtcagaatcgaagttaaaaacaacaggaatcacataatacaagacagagagcatacaatagaagtaaataaatgcaataccagaaaaagactaaaaatgatagtggtttgatctcggccacacatctataaccaaaattattttgtgattccatggcctttcgagtacttatcatcaaagcacattccttgacccagactcttggcctcttgtgtttgctagtatatcattagtaagaatatgtcagacttcaggtcatttataaagatgttgatcacgtgacattttttttctagcctcaaggagtcttccatttatgaacaatttcgcctcaaggagagtcttccatttggattttggacatgacgaccaaagttgtcagttgtcacactagaacctcacatggcaatccaacatagaactgatagtcaacaggatggcatttattggaagttccataattttggctgtatttagattcaaacttccaactttttccatcacatcaacatgtcatacacacacaacttttcagttatatcgtaccaatttcaaccaaacttcctactctggaaggaactaaacacagcctttatcagaacatcactgctaatcaaccaagtcactatcacttaccccctgcaatactcatgccaaacatgtagtaactcccttctcaactctcacctgtcaccagttctcatcacagtgctatatataatagtactagtaaaagcaaaacatttgtacactagaagcaaaaacatggagaaaactgtgaaacacaagcacaagtgagatgtaaccaaattagcaaactaaatcagtactcctcaccatgcaaacacatcacctggacagagtgcataggcatcacagatattttttttgtcaactttgtaaggcaaattagcacatatactaacgataagtacagcctgataaatacatcctgctactgaatgcatcctgaacatactaggagacaccccctcactcaccatcacaccaccaaattaagctaagcagctgcaagtccgcaacaatcagctgcaacaatggg

SEQ ID NO: 6738 - DNA, 3759 bp, Oryza sativa
ggtggtggcgcgggtcacgtgtaggagagcgcgcgtggtggcgggcgtggtggatgggagaggcggcggcgcccgttccgcccggccgcgtggtcccgtgcgccgctgcgggtttgcgccgccaaagggggcgtgggagtccgcggctggagtggatgaccgggggagccgggctccgggaggggggagggggccacctgtaagggcgtggtgagccggcgggaggggccgaggggggaggagagctcgcgacttggcgagtcgcgtcgcgggaaggcgtttcgatcggcacgctgtggctggctgtgggcgaagtcgcgaggttggtacgatgggccgatggccaaccggagtgccgaaccacacgtcaccaccacgatgatgatgagtttgagaaaacggacataacggggtttggctgtaatgccactcagagcaagtttaatagaatagccaactactagctctaatttatctataaacaatctaatagctcatctatacaatagttatatactacactattaatatctggtcccacctgtcatacacacactgcgtcttggaatccgtgctacagctggctataaatctgtagcccgctgctcttctctctccttatttatctccttaaaatatgtttacagctggcttatagcctgctattgtacctgctctcacaaaagtggttttgttaaaatatcaccctcaaatagaggcaacatgtttttttttacttgaagtgaggtaacatgttgtaatgccatttcatccatttcttctcagtttaatgatttttttaatgtttttttcttgctgagatgaccaaaatacccttggatcctatctcatctctccctctatttcttcctcttctttgttgtagatggtgggtggcgctggcgtggctggggacggcggcggcgccgacacggttggggtaggtgggcgtggtcgccctggcgctgctgttgtgacgaacttggcggtgagccccctcatgcctcatctcagccaggaactggggcgagctcggggcagtgtgaagatggtgttgtggctggagacgagttgttggacaagtcaatggtggtgagcgagatgaggtcgccgataaggtggggaagttctcctacgtcgacgcagatggcaccgccgcccctagccataggggcggagctagtgtatattagggggtgcccagaaacatggtcaagaaaattttttagctatacctcatatgtattcaccatgtaagcaccccctcaatacaaacttaggcacccacattagtttaaactcgatctaaagtagagtaaattaagcaaatgacaccaccctccatttcgctctagctccgcctctgcctagccacgccgccaagccgagcagccttcctcacccacgccaacgccgtccccgtccccgtccccatccccagtcgtgccgtcgagtcgggccggccggcgccacccaccatctgcaatggagaggaggaagagatagagggagagatgaataggatccaagggtattttggtcatctcaacaagaaaaaacattacaaaaattattaaactgagaagaaatggatctaatggcattgcaacatgttgcccctgtttgagggtggcattttaacgaaaacactttcgggagtgacattccgtgaaacctcattttgacaatggcaaaatgtcaattttctccttccatttcaatgaaaaatgaaaagctactcaataaattgcacaacatagaatattactcctttatattatctacatgttaaaaatattattttagtgggttttcatacaaaaatccctgactaacatgcagagtgagagagacggggggggggggggacagagagcggtgggtgcgagagcgagcggcaacgaacaacgtgtgggcgggtggtggcaagcaacacatgggtaggcggcgctagaggccgtgccctcgccgctcctccaagaagtcaaagagtgtagtcctccctatcccaagagcgcatgttgtcgcatcctcatattccctccaccctatcgttcctccttccaccaccgcctctagccctcgccctccaacgtggggggcactagaggcgatgtgcaatgagcgtgcgagctgtgtgcgacaagcgtgcgggacgggcaacgctggagactgtgccctcgccgctcctttgaggagccaaagagggcggtccacgtccccaccatcccgtaattcgccttgtcctccttcctccaccccatcatcccattatcaccgatggccaaccgtccagcgacatgcgcctactgcctccctctccctctcctcgcatgccaacctagggtttttttggcccgaaaaccctccaaagtggcattttaaccggtagacaatgtaactcgcccagcgccgtcatcaccttccttgcacacaggtccatcctagcgactatcgtcttgccgtcgtcaccgagccctccttgcgcacagattcattgtcgctggcttctcccctctcttcgccaccgctgtcgtcgccgccgtagtcttcattgtccctcgctgtcaccgtcgacacgcgcgcacggatctgccgtctcgtgcacgagcgcgcctcgcgcatgcacggatttgccgtcggcggcttctcacctctcgtcgccaccgcagctacatcgcgtgcacacagttctgtcgccgtcatcgacgtcgccaagagggcaacttggcgatggttgcgggagaaagaggaggaagaagtagaggttaatatgtaggtcccaacggcatatacttaaaatagagtgtgtagatggagagactgttggaacgaggaacatgtttggctctccaaatcagttggagaggtgactatgggtatttggagagtctaatttggccattctattggagatgctctaacaagtgaaagtaaaacaaagagtgaaatacatggccggtccttaaacttgtggtgtggtgtcacttagatccatgaacttgaaaattgcacgtttagatccgtgaacttggtttgatataccaccaccggtccaatcctcctttaaccacgtttgaccgccaacatggcattacaacatggcaatgccacgtaggcaacatttttgtgctcaacccctccacatataccttgcacataacttgcccttaccagtgtatttcaacccaaatcccctaaaatatccctaaatcggcaagggtttcaacggtgaggttagcggaagaagaccgagaggtagcggctgtgacagcctcagcggtgaaattagcggaaggaggcagtgtagtgcaacggggttaacggtggcacagtgcggccggattagcgacgggaggcagcgcaatgcgtcttgcacgccaggcatccccatggattccccaagctcttccccgtcttgaagtcgccggaagaagatgttgttgatcaagtgcccgttgcataaggataaggttattttggagcagggagcaaaggcaattgctaatcgggaccgcgttttctatacatacaaggagaagaatgagagggaagaatgatttgatgattgttttttttgggggattctggtgtcaccatatagctacaagaagatatatgcgtcatgttgtgatgtggaatgagctaagagcaaaaatgttgcctacgtggcatgccacattggcagtcaaacgcagtccaaggacgtttggaccgggtactacattaaaccaagttcacgggcctacacgtgcaagg

SEQ ID NO: 6739 - DNA, 666 bp, Oryza sativa
aaaatagaccattgcatactacaagaatagcatacacatgttgcaaacataaatgagacttcagatattgtttactagattttccatgcagctttgtttctttcctttctggtgaaaagattgcaaaatttgaagcggtgtatttggcatatacagactttgacatgtaggcagacagcaaaaaacattacatgccatagacaagaattcttataaacatgattagatgtaattacctctcaagagcttgatttttcctcagttgctttcgagagaagttcaaatgccatgcaagattccctggataccaaggcaagggcctgatagcatcttctccatactcatcactaacctttgcaagtaatttatttttataaaaaatacattagaatggcaggaactggtgtttaagtaaagtgtgtaaataaagagggtggcaacctcactctccaaatatctcttgaagtcattctctaactttgagcaaatatccttaaaaaactgggagctgaaaagattaaaagaatacaaactttcagctactccggaaaaagaccagaaggtgatcgagaataaatttagattctagactactattgtgccatactatcatatataagtaaaagcaaataactctttgtgaaaacagcacaacatttactaata

SEQ ID NO: 6740 - DNA, 721 bp, Oryza sativa
attatttactgcaagcttcggaaaatacattttatcaaagaactcttctattatttcgtagaccgtttgtttttagttatttgttaagcttatttatcaaagtatttaatttatctagataatctatagaaacaattcgctcaataatctgtttcaaaccgagattaaggtgaacttgcatttcttatttatatatgacagggtaaatcaagagggtgacttgtttagcagtacatgagtaacatgaaacgaaacttgacaacttgacataacagctagtacaagacaattggatagctcacagcttgcctatggtatttgatcttttcttatcactgtttctgtatatatatgactttcagagccccaaagatgggatgttgcccagatgactgttcttgttcaactgccatgaggcgatcctcctctttctgagccgctcggcgatgatgaacgccaactccagagactgcgatgcgttgagcctgggtcgcagtgtgtgtggtatcgtgagcccagatcgtcgaatgtcaccgtgcgtgacccgccgatgcattctgtcacattttgtccagtcatctccagatgcacccctcctgggtggctgccttcttgttcgtgcacatcaaagaatgcgcgcacctcagcctggtttcaagaaggcaacataagtcatcttagttgatttaagtcgccggtcatgttaatgtcggggtgcagg

SEQ ID NO: 6741 - DNA, 9403 bp, Oryza sativa
tgtgataaatgaagatattaaatctgtagttttgtgaaacaagttcttaaatatgtagctttgggatatattgtacaaagtacatataattttgtgataaacgaagactttgaatatgtagttttgtgaaacaagttcttaaatatgtagttttgtgatagattgtgctaagtatatgtagttttatgaaatttactcaaaatttaaccaaataaaacatgtgcacaatcaattagttgcctttgacccaaactagcacatttactatttaggttggcaaaaaaatgataaggcatatttagtatagtggtatcaatccaaaattaccctatatataaaaattttacttatataagtcacgggttaaattggccattaaaaaaccgccaagctgcatgaagaacagtaaccaaggaaacgttcactcattgcagaggtgttgccgctggcatagcaaagctctgttgcttctatttcctaataaggtaaaatggtttattggaagataaaaaatattttatagctgaaatttttatatacgtgttattagcaatttaaatatcaatgctaaaatatatgttgaaaatatcttaaaaccaaattcaaaattaagtttaaaaattcaaattttaagacacctttgaatcacatcaataaaaaatagaggaataggacaaacatagaattataatataaatataagtacaaaatagaggattgcaaaatagaggaaaaacacgagaatacgatgatagagatagacttaaaggaaaatttacaagagattaaaattattgctaaatttcctccaaaatctctacagtatggtttatttcatagaaatttcaaaggatactctaggatccaatcctttgttttaaatgtcttcacagaaaatttttcaatagaattaaaacccttcaaaaattttaacgttttctgtccaaatcaaagataggagtacacatgttagggcaaccaatagagctactcagtgggtgtttaggctgtgtatagttcagcgtaaagtttggattttgattaaaattagagataatgtgactgaaaaaattatgtgtatatgtcaggttaatgtaatgaaaaaatactgaagtttaaagtttggatccatacacagattgtgtatgatttagatcagtatcaccaggccctcataggctgtgacctcaaatttacgagctctgctccagcagccgcattcacatttcacactcacggcgccaccccgccattgtgcgtgcagcacgacatgctgtgctgctccactgctcacacctctgtcaacctgcatcccatcacattcaaatccccatcccttctcacgcaaggaaaacccccctacttcttcctcctctgaccagcatggccccaccccacacactctccacacccgggcccacccccacccgcttccccagaaatattgctacgcctcctcacgacacctcctcaaaagtcgcgcccccgctccggcccactggaccaagctcaccgcgctcggcccatggctggacccctccctcccggctatataaacctctccaccaccccgcccctaccaccacggtgtggcgaaggtgtcactgacagccatggcccacaagcgcggccgtcttgttggttgggtgcttctcctcctcctcgccgtggctatcgccggcgccgccgcggccacgccgaggcagctgttcctggtgacccaggcgccggtcacgctcacgaaccaccacggccagctgctcacggggaactactccgtcaacctgctctggtacggccgcttcaccccggcgcagcgcgccaccgtcgctgacttcttgctgtcgatgtcgtcgccgtcggcggcggcggaggctgcggcggtgtctggtggtccggcggcgccgtcggtcgcgtcgtggtgggccaccacggcgcggtaccacccgggcgccgcgcggctcacgctcggccgccaggtgctcgacgcgtcgctctccctcggccggcggctgtcggagacctccctcgccgcgctggccgcgcgcctctccccgcaccggggctccatcgccgtggtgataactgcccccgacgtcctcgtcgacggcttctgcctctcccactgcggcctccacgcgtcggccacctcggccgccgccgccgccgccaccgcctcgccagccgcgacgcgcgggcgcggcaggttcgcgtacgcgtgggtggggaacgcggcggaccagtgcccgggggagtgcgcgtggccgttccaccagccggcgtacggccctcaggcgccgccgctggtgtcgccgaacgccgacgtggggatggacggcatcatcatcaacctcgccacgctgctcgccggggcggtgacgaacccgtacggcggcgggtacttccagggccccaccgaggcgccgctggaggcggtgacggcctgcacggggatgttcggcgccggcgcctacccggggtaccccggccagctgccggtggacgccgccaccggcgccagctacaacgccgtcggggtcgccggccggcgggtcctcctgccggcgatgtgggaccccaagacctcgcagtgctctactctcgtgtagtagtactagtacaaaccctctgatgcgatcgatcgatggaccaaaatggcttgggctcggtgtacggacggctgggattagggagtggagtgacgtggtgtctcgtttcttttgttttgtggatatttcgtggtgaacaaaaaaaatggaaaaaaaaacagaatgaagtggggtaatgtaataaacctaggctttcgttgtcatgttctgtatatattggtaaggcattgttcatgggttcgttgatcgttgacatctcaagcaaaggccgtgtttggattttttttttatataacaatgttgcaccagaatatttggacacatgtatagagcattaaatatagatgaaaaaactaattacacagtttgcatgtaaattgtgagagacgaatcttttgagtctgatttgacaatgtgacttttgagtctaattacgtcataatttgataatgtgatgatataataaatatttgctaatgacagtaattatgacagtaattagatgtcttgtagacggaatctgtaagactatatttaatactttaaatgtgtgtttgtatattaatgacagtaattagatgtcttgtagacggaatctataagactacattacatttctatatactttaaaaaaatttgagcaatgaactaaacagagccgatgtttgcaatgttttcatgaaatcgaccaaatgcaagtacggggtagcaggagtatttgcaaaactcaagacgggcaagtggcaacaaggaaaaccattgtgcttgtgccatcatctaccaccaccttgttggccatcgtggaaagcatgcacacacaaggaagcaaaagcaaggggaggacggaggacggacgacgcgatgcatcatcactatgccccggtttgtccgggcgtggtatggagcacgggaaagagggtgaggacaggacgagaatccatccaggctgtgcaggggataagcttgggcgcacagtggccgcgtgccagccgtggcaggggagagggagagaaggtttgcccgagataaaaaggcttggatggtacggaaggcgtcccgtcgctgcacggagttggggcccgtcagacgtgaccgctctgacctctgagctctgagcgttgttcctcatctccattggcgtaatgacgtggagtaagtacccaaccaaggctgggtttagttaacatcaaaattaaaaattttgttgaaattagaacgatgtaatagaaaagtgagaagtttatgtgtgtaaaatttttttatgcgatgaaaaagttaaaagtttgaagaattattttggaactaaacacggcccaaatgaagttcaggcagagccatagaggtacgtcccataatactccctccgtccctagatataagggatttgggtcataaaaatattcagatatgttgtactaggatatgtcacatcacatccaacaaaaataccttatatttagagacgaagggactataaaggattttggatggatgtaacacatcctccgtccatattcattgtactagaatatgtcatatcaatctaaaatcccttagagtaacgataatgtatatggcaaaagtagtccatagagatgtgacccacatatataaactttaactattgcaaccttcacaatgtatatgtatagcaaatagtattagtaggagagaagagatagtgataaataatatattttactctttatgggtagcccatatgcttatgggtaatttttgttatttctttcttatggactagttccacaatgttagtggctgaatcaaatattatattactggtggaccacttttggagtacattgtgacagagggagtagctagtagtagtattgctactgtatatatgttacggaatttagatcaggtgctgttttatactagctcctttccaaaatatagctatatttagctcagtactttatcaaaaataaaatgccaacctaaaaatgtctatattttaggatgaatgaagtattactactactctctgcaaaaaaaacagatatagttaaattcttagtattacaatatgtcacatcttatgtgaaatttggttttagaggatggataaagtatgtgtaaccgtgatttaatgactattctcttcatcaccgaaataaaccaacttagattgaatgggatataatctgtccaaatttattgtactaggttaagttatggtccgtcctaacttatattatagtgtgcagtgctcatttcgtttcaaaataatttaacctaggatagttgtgatctaacctagtacttactttatcgatccaaaaatatagcaacctagaatgggataagacccatctcatcctaggactatctctgtttggattcatggttattttttaaccctccctcaaatagcctcaaatagcccaaaagtccaaacaggtgagttattttagggctatttgaaaataacccaccaaaaaaactacccccccctcaaagggtgctaattggagctatttcaggtggggcccactaaaaaatgtcttttctctcattctctgtccatgggaaagtgtattaaaggccaaatagctctcaaaataacccttgaatccaaacaacttagggctattttattagagagctatttccttgtgctaaaaatagctctcaaaataactcttggctagttctccaaacagggctatgaatctggatatatatgaggcatttcaaattcattatactaggttatatgacgtcatatcctaatttaatttattttaagatgaagcgagtactccctccgtcccataaaaaacttaatctagggtttgaatctggacatagtgtatgctaagatttaaatctaggattagattttttatggaacggagggagtatgtcacaagtcgtaagattatactggttttaccggtgatttaaatttcaagccccgctggcaagcaactatctcgtccaaactttcggactttctcttttctttttttttttttgcattgcggttgaaattattaaatttttaaatagttttgtgcaaaagaaactgaaactcgtgaaattttagtggcactgaaatcactagaatttcagtctagtgaatgcaaaccttgggaatgtagcaacaagtttctcatcttttttactactagtagtagcacaagtactagtcattcgagcgaaaaaaatagctgtgggtaacataaatgtaacgaacattgtagtcctctagagcttgtttgtcacaactttaacttcaactctaagttaaggttcaaccaaacagtttcagctctatctaaactaggagagaggtggaactagatttaggctgtttcacagcttcactccagatccaacttttagagttaaatttagtagttaaagttctatcaaatatgaccctagtcttctacttagtggaaccaaaaacgtctagaggttttccggttagctccacaagactagcctggattcaaagccccacctcttttatttatttgatatttgattttccctaatattcatctttttttctacttagtggaacgaaagtacggctgtgaatagtcacactcgagcgaattcctagcatgcggattagctgggaccggtattggaaggacatattcgtaaaaatcatacttaaattgtttataaattaatgaaaacatattagagataaatataaacactacgataaaatcgcaagttcacactcaactttatttagtcataaaaaaagatgaattttgggtgaatggtaacacgacaatatttatgtaaaatctattatttttgcttctctcaagtgaagttgagtttaaacttaagattcggcgagaatgtacgtatctacacccgtctctaataactttttcgtgactaaaaaaaactttcgggttgattttcacgagctttcaactcgttgttacacgatatttacccggtatcggagctgagacctgcatggcttcttctccgccagattctctgaaacgacacgaaacattgctggacctaaggatggtggtacgtacgaccagtactcccagtctcccaccgtggtacgtacccccacgcacgcgggtcctactaccctcccactagggtgcgtgcgtgcgcgcgccgagccgcgcgcaacagcgagcgagcattccaacccccgtcgtcacgcggcgcccccaccaacagacgcgccgtgcacacaccggggcggggagcgcatctgcgcatgtgaaccgcgtgtagtaggagtgtaggagcagtgcgtgcgtgcgtacgtacggctcgtcgcgcgatgccgccgcagtgtcacgcgcgcgcagacgagagcgattagcggccgagagcaccgcggagagggaggagaggagagcagtgcgcggcaggggccgacgccgaaccgagccgagccagctgtatcccaccattgcctacctcccccgctgcggcgctgccccctctactggcacacctgcaatagggatactgctatagtgctatgccctctcgagaaaccgagaggccgagtgccacctttttcctggcatcgcctgaaccacagggcgagtcctcgacttgcctctgcaacagcttctctatcttatttagccacttaaactaaaaactcactccaacagaggctgtgtttagatttaaagtttggatccaaacttcagtccttttttatcacacatcatcttcaattttaatcaaaatgtaaactttgcgctgaactaaacacaacaagactctctattaattctctctaaaataaaaatgaacccacgtgtcagcctctccccccaccttcttccttctctttccttcttttcccctttccttccttccttcctgtcgaccacactgatgccgatggcggccgacgcatggcgcgcagtggggcggcgacgcggggaggcgggaggcggcactcaccgaggtgctctccctctccccgccgaccactccccacagccgagcaccgtcgagctcccctcgggctgccggatctagaggccgccgccggctttgcggcgacgaggcgacggagctcagagcgggatggcgacggcggcggcggagctcggggcgggatggcggcggctcgccacgacgacctcgatgacgacgacgacatcagctcgcgacgccgacctcaacgatgccacagttttctcgtcgattccctcgtgtcgtcagtgggtgagcgagcggatctgacggaggcggaggtagcggtggaaatcggcggcgggaagaagccgagtgacgacggtgacggcggcggcagcacctgagcggcgacggcgacgacgacggtgtgccctcgcgcatttgaggcagcggtgagtgcatggcacgagaggccctgttcggcggcagtcgacaatggtggatccgtgcatgcgtgaggtggccccgacggtgaacgacgatggtggcctcatcctcttcgacggtcgtgcgccgcgccccatcccccctccctcgatgccgcatccctccctccgtcgtctctgcgccctctctccctcaccgtcaccatgtcccctccgccgccccattgcatgccttcctccaccgttggtgccaccattggccaccttgcgccgctcgccggccatctcgaccttcaccatgctgcacggatcgacctcagtaggagctggccattggcgccatcggcaaaggcatgggagctagccgtcggctgagagaagagagaagcaaagaaagagataggtgggacccacggtggggcccatcgttcggcaactggaggaggccggccaaatttggccagttgagatgcttgtttggccagccatatgacttggcaatccaagtagctagactattggagggagtttttttttcctgtgttggctaaaatttaacttgaggagtcatttatcaatgctattggagatgctctaatatctccgatctccacaactaggtcccatttggttcaaagaaaagtcataggaattttttttgtagaatttcgttcctataattctttatttctatagaaccctctgaataaaaggaatggaccatatgaaattcatacgaaatgtctccttccatataagtttagaggaaatttaacatgagatataaccttatggaaagtttccgttgagttttttttatctcttcttagacaaataattgataatacatgcgatgcactaatgtagaattttcttctctacatcatcaatatttagttttatattagtaacaatccaagtatgtgtaatactacacctctatcctatcatataatttatattaccaaaacttgtctaccaaatatttggtaggctagaaaaacaaacagctccattcaacgcttcagtgcccataaattcagatcaggtgtagttatacttataactataagttaactactacatataattttgaccgtcagtttttattaatggtttagatttgatgctacattaacaatgtaaatactccatactacaatattctacggtgatacgaactgtgaagtgtgcgatatagaccgtccgattcgcatccaatggtgctcattgctactgtttaagtgcagctgatccgaatccaacgtccatatatatggtggttcttctaaaagcacaataggttggccttccttctccgtttcataacgtaagtcattctaacattttccacgttcatattgatattaacaaatctagatagatatatatgtctagattcattaacattaatataaatatggaaaatgatagaataac

SEQ ID NO: 6742 - DNA, 1559 bp, Oryza sativa
ccagtggtcgagttcgtctcgctgccggatgccacaccggatggcgatgatgatgacggcgcaccgcgtcgctaccgtacggtggccaacatcctcggcacaacggcgccggtcgagctcgactccgacgagctgtacctggtggccgctgaggagcccagcaacttctccgaagctgagcacgacgatctctggcgtcaagcgatgcttgaggagctcaactcgattgaggagaacaacacctggatgctcacggatctcccggtcagcaagcgccccatcgggttgaagtgggtcttcaagctgaaaaaggacgagacgggcgctgtcgttaaacacaaggcacggctcgtcgctaagggctatgtccagcgccaggggattgatttcgacgaagtctttgcccctgttgctcggatggaatcggtgagattgcttctcgctgtcgcggctcacttcgggtgggcggtgcatcatatggacgtcaaatcggcattcttgaacggtgaactggaggaggaggtgtatgtctcgcagccgccgggttttgtcgatgacacgcacccccgcaaggtcatgcgcctgaatcgggcgctctacggtcttcgtcaggctccgcgggcatggaacgcgaagctggatgccagccttcagcaactaggtttcaagcggagcaataccgagcatgctgtgtacacgcgtggcgaagatagctcgcgcctcatcgtcggcgtctacgtcgacgatctcgtcatcaccggcgcacgctctgaagaaattaataacttcaagggataaatgcactctctcttcagaatgagtgatctcggcttgctcagttattacctgggcatagaggtgcaccaaggcagagaaggcatcaccataactcagtcagcatatgccgggaagctgctgaggatcgccggactgggggagtgcaaccccacttgcattcccatggagcctaggctgaagctgccgaagaacagtgacaggctggttgttgcttccaccctatacaggagcctggtgggaagcttgaggtacttagtgcatacccggccggacattgctttcgccgtcggctatgtgagccgattcatggagacgccacatgacaatcatctgatggcggtgaagcacatcctgcagtatgtagcaggtactctgaattttggatgctgctttgcaaactcaggggaaacgggaatacatttgctgggtttttcagacagtgacttggggggagacgttgatgatcggaagagcacctcaggggctttattctttctcggctccagtccaattgcatggcaatctcagaaacaaaaggtggtagccctttcctcttgtgaagcagaatacattgccgccacaggagcggcttgcctcggcatttggctggcacgcctgctagccgaagtgttgggcactgaaccggagatggctatcctcaaggtcgacaacaagtcggcgatctctctgtgcaagaatcctgtgttccatgatagaagcaaacatatcgacactcggtattactttatcaggcagtgcat

SEQ ID NO: 6743 - DNA, 881 bp, Oryza sativa
agatagcttatcaagatctatatactatgtaagcctgtacaaccaacattttggtgctcaacataacactagtcactcaaacaacaaccttctctatctaagggccgggaagaaagtcacagctgcctatttacatggtgtcctttattcattattgcagtgaaaaaccgcacatgataaaaccctaggtttggttattcactgaagccaacacggggtactatagaaccctcagtttggtaaggaaggctgcacagaagtccaggaaaaggagctgaggccccgtaactctctgcatatccagcagatacttctcgtctctgctcttgtaaagctgaagaaaagaaacggaatcagtaattcgacagccagatatacaaaaaatatataatacataccaaatacaacagctacaccattcgaatgatactatactaggctaaaagtataatatatggctaactggtactttttagtatttaaagttaaaaattgctggttcaaaatggcatgagcagacaacacatattggcaacaatgcatcaactcatgattgaacctaaaaggtgaggcattcttttgtcattccaatgggatctttaatccaaggatttaactatgacaacaatatttagttgaatatctagaaaaaaaaaaatattgctgtaacaaactttttaatcagcagtgctagaatttgaaattgcacacctggatttcaaacttgatcacagcaggtaacctcccgtttacatcgccattatccattataattgagtcatcaacaaagctgtggttgacatctaacatatcagtggcctgaggatacccaacgctccatctgcacttcatgttgtactgtccattcttcttccagcaga

SEQ ID NO: 6744 - DNA, 1175 bp, Oryza sativa
ccccataaatttatctcacctttatctttttgaataggttggggatattctcgtcatcaaatggaagagtaccacaaaggagagcataaaggatcactccacagctccatacatcaacctcgggtccagcatataatttaccagagatcacctgcaaagggaccataatactataataagaaaaaatattgcatgtaaaggagcaagaagatatagtctcacagtgatacaaaaaaaatacctctggagcagcataattcggactcccgcagcttgtctttaaaaaatggccatcatgcatgacattactcaaaccaaagtcagcaagctttacgttatactttgaatccagtagcaagttttctggcttcagatcacgatgaaccaccatgtttctgtggcagtattcaaccccagatataatctgttccataaaattttaccttctaaatattaagagaaataatgtatatgtattcaacaaaatcagagcaatgaaaaactctaagttcccataaaataatgtatgtccctctctccatttcaggttaaaatcacatgccaatgattacaccaacacagtgaagacttaggaattaatcaaaagtttgatttagtacatcactccatcccacaaatttaaaattcaatgataaggttagaagctaaaagcaagccgattacatgtgaacctgagtcaattaattatgaacaccacacacaaaacctccacacgacgaatatgaatggcatgcttatgctccataggttttgaatgatgaaaataagcaagcattgaagttggaaataaatgctaaaagagcacatttaacaagtgaaagaaatgagtaaggtcaagtacctgctggaagattcggcgagcctcatcttcctgcaacctgcctttctcaacaatgtaatcaaacagttctccaaacttgcagtactccatcacaacatatatatccgtaggagtgtatatgacctcataaaggcgaatgatatggggatgaatgaacaacctcaatatcttgatttctctctttgctgtaaacaagaaacaataagaaaaaatgaagtcaggccttagcatttggcaagcatgaaattccagattgtagaatttccagctcaaaagcattcgaagaaggtaaaaccataaaatttcttcttta

SEQ ID NO: 6745 - DNA, 1464 bp, Oryza sativa
tttgtttcaagtgttgatagttattcatatatgaatggcaagtggcaaactctagccactagtgtcctaccacattatgcataaacgagaaccatcattttgacaaagctatgttgtttcagatatattataatgtttagttccatcatgaaacaccctataaacagcttctcactgcatagcagcatagtgcatatgcaattaggctgtccagcaaatataagactattgctcagttacagaccactgagaagtaataggaacaagcaaatactgaaaagtaggctgtaggccatgcaaggaattaccaagattctatcaaaggagcgagtcttgaggccacaaggagccttcattgtgttaccatgcatcggatcagtaacccatgttactatctggccagcaccacggacagcacgtattaggtgagggagtttcactctcatgttttcaggtcccattcttgtaatgatagtaattctccctggtttgttctggggattcaagatatcaatcaacttcacaagttcttttgggtccatcttgtcactgacctgcatttagtttgatgagtttagggtgaattcctttaggacaaagtgtgaattacctgcactttcaaatgaagtttgaacttggtatacattatctatttatctgtcttgacaagtgtaggaatattcctatttaccttgatacccagagggttcgcaattcctcggagaaactccacatgggcacaatcaagctgacgtgtacgctctccaacccaaaggaagtgagcagaacagtcgtaatagacgccagatgtggaatcctcgcgagtaagtgcttgctcatagggaagaagagggcactcatgtgatgtccagaattctgttgttgtcataataggatggtccatatgagaccagcagctgccatgaaccccaaagcctcatcaactcggtgagccagctccatgtacctgttcaacattgtacaagaattgcagtggtgagcatatggctgtggcttaaatgaattacatgaatcaattcatctgagaagcaatcaatgaagaattgggacagtttaagataaaggtaaccacctgtcaccctgttcactatgctctgtgaagtcaaggttccattgtgttaccctctgcatggcagcataacctccagtagcaaaagcccgcagcaaattcagtgttgctgcagactgtgagtatgccctgatcatgcggtgtggatctggcaatcttgatttctcatcgaatgaatccccattaatgttatcccctctgtagcttggcaacttcactccatccctctcctcaaagccatctgaccttggctttgcaaactgacctgccattcttcctacctacatattccatgtgagacagtaagtgatacaattctgtgcgatgtccactagaaatgcattaaaggaacgcaaaaacaacatggtaacagg

SEQ ID NO: 6746 - DNA, 19944 bp, Oryza sativa
cgggactaaagattgatttttagtcccggttatttgaatcgggactaaagatagcgatctttagtcccggattcgtagtcccggttgaaaaaccgggactacagggtggttacgaaccgggactaaaaagcatttctccaccagtgagagaatcatgctgggactgcaactgttggagccggagaagagaatcatggtgggattgcagctagagaggagaataatggtggtattgcagttggcgaagataatccagaagaaactttggctagaatttctctaggcatgtttggagggcatattaatgcatctggcagtgcaggtggaaaatactctcctcctttggaagagcttggcccattttgattttagaatgtttggaagaattgcactgaagtgtgaaccttgatgcactcatgcaagtgttgaatgcagcttctttgttcttggatagttttgtttcatattagctagctgcaagccctctattttggaacctgatggaggctatgacttcttatgtattgaatttctatgaaactatgactctattttccatgaatttggttacgtggcatgtgacttatcaaagtaatggttattcatggaaaatttgtgtgagcttgggttgatttggtttctcagattagtgatctacattacccatttaattatttcaaatttgagtggattgcctatttaatttaatattcagatattgcatataaacgaatatccctattaaactattataacattttgaagggaaataattgtgatatggcacaaataagaaatttatattaaacaaatagatccctacagttttagaaacctaggggaagttactttacatactggatacaatgccatgtcagccaagttccctaccatttcaaatcctagggatcctttttgttccctgcgcttttacaattgaaatcgtagggcacatctagttcccggcgaataatttcccatggaagttttccctacgaaaaggcctagggaacttgtttccctactagtttcagctcattccctactagaaaaaacaataggggacatggtgagttctagtagtggtatctagaaccgttagaagaaattattttaaatgatctagagttatttctttttggtattttaaacttattagtgtgaaattcgttaatgacaatgagtttttaaatattatcttgtatttttatggtgaatgggggccttcattttttgttccacactggaccaccaaaaagtcagggccggccctttatgctacgaattttgcccatcagatttatttgatagtttatagggaaaagtattttgaacattcacactttgaaaaaggataaatgtctacattaactttttttcatccactatcttttacaattaattaagtattacctcaacaccatcaactttcctattcgctttactattcgtcttttctaaaaatacttgtgcgagtaggtaaatatgtaaggcaagtttaaggtactattttacttttcttaaataagtaattgaataaatattgttgattaaagttttaggaaaaatcaatattgtcctacatttaaagttggagactgctatatctttaggcttgcagtacgtgctccattaatattgcaataataggagttgaaaaatcacatcctttgcttctagagccaaaatatcacagttcctaaacacattgaggtagtcccctgtcgtataatcgaaaaggggaaaacccctaaattcaacccaatgtcgaggttaattacgaagggcagtatttgaaagtgtatggtttactagaaaaaaaaatgcccgtgcgttgcgacgggtgaaggttattttaattttattgttgttatatgatctagttaatgtgggagttcacttggacatatatatatattttagaaaatcatgagctgcaattagaagtccgatcatattaagttagcatgcgagttttttaaagagaattcttatacgactcttattatattttcaaaagcgaacgaacttaaaaccgactcaaatacagatatgtatttccgaaagcgatcaaacttaaaaaccgactaatacacggatgacttaccaaagtactggtaaaaacatcttcaatttttataatagtagagattagacatcatcctcttttaaaatagtttcattgttattttttagacttttgaaagttaaagacataaaaagaatttcttttcaaggaaaagaatttgatatccacatgcaaactacctgtggcttacccacgttgtgtttcttggggtcttatgacccaaaaagattattcaatcctagttaaattataccgtattatctagatgatttgtatatattaaaccctcggtaatttttttccaggttaattgccgccatatacagcacatccttagaattatcaatggggctactacataatataaaaatatggtgatgagattaatcacaacaaattaatactccatatatatatattattctacgctagaagtatcaaattttcatgcttgcacgtgacagaggaaagaacattcgggtagcttgtgcgtgtggttcgatcaatgctggagagcgacacatacatcggcacgtacactgctaatctggccgttttgtctacttgctggatgaattaattggagtaatattttttttcaccaaaaaattaagaaggggataattctgtactccctccgtaacataaccatgagtttccgtgtcaaactttaatcgttcatcgtgtcaaactttaatcgttcatcttatttgattttaaaaaactagaaagaataagtcacgcataaagtactatttatgttttataatctaataacaataaaaatactaattataaaaaaatttaaataaaacgaacgatcaaagttgaacatagaaacttacggttgcacttattctggggcggagtagtacttaattgctcttcttccggtaactgtggcagcagacatgagagattgagacattgactgatgatggaggtgtgcttgcatgtggggtgcacgcgtcaccggtgacgtacggctgcttgggtgagaaattaatcgcttggtccacaccatatgaggtgaaaaaaacaagggttagatatggttttttaagattgagcaaccactcccttttccccataaaatccaatctaatattagatatgatacatcctagtacaacgaatctggacgtgtctatgtctagattcactgtactaaaatgtgttgttatatccggttctagattcggtttttatgagacgaagtaagtactatttacggtgatggtgatctaggatgtagccatgtatgcatgtatggtttatattttggaacaattgttcacaaccatgggttaatttttgacatttaattatgtagcaagtttgtaacatctagtgatgcaaatcatagtatctgagatataatttttactctttttaaaaaattaaaaacttacgtgtatcagtacattagaaaatagaaatctcataatcaactattggaaattaaagagttgataatattgttagttttagattttttttttgttttgatctcttagtgaaaaagattgcacgtaaatattttccttgaaacaacttagtggtatatatactggcccttatattcataaacaacctccattatttacaatcatgctttgccaacgaatggaattaggatccagagtaatgttgataatttgcctgaattgcaagtttcagattgtgctacagctacatataccgacctagatacatgcatgtcaggcacatacgtacaaccacggacttacaatacctctcacctattcatttcctgtcctcttcaccaagttggttagtcaggaccacggcaaaagatctcatcggatatccatccacgcacatatcacctctcgcgaagtcgcagtaccgtatccagaaaattaacaaccatacacgaaaacctcccgaacacgcacacggcatacacaacatcaagcaccggccggtagtgagcgagccctgcgtacccgtgtgcgcgtagcgaaaatgccgctgccgcaggtggatggatggagagaattggaggagattgcaacgtgacaagagcaacgggacggtgtaccagctgcagctagctgcccgtatttaacgcgcaaaggcaggcaaaataggcaaaatggcaaaccgatcgctttggcggcgagtgagtggcagcaagccaggacagctagctagctaagcagagtggcaaatggacaccaaaaagaaggcaaaaagttagctagctccatcaagcctgctaagctccatcagcctcccgttttgttcggatctccggtatccctcaacccaggttttgcagtagctttcggatggatatatatatatatatgtacttggagagggtgaagatttcatgagtttgtttctcaaatttgtgtttttatagtataacattcttatatacatacccgtgtatcatggtaaactaaactagtattatacggtctagctatttgaacagctgtttggactcatccgtgtgcatggggtaagaagtggacgcactactcgttatacggtatgccgattatactagtcacaatcatgacgggattcgtctactctttagaatttttctaggtccattgttatcacatatatgccgacgacctattttactttggtcgtcttcaccactcatgtgtattatatttaatttagaactcatattttaaaatacatgacctatttaattttgttagaataaacctttgatcctaatattttatttatttgacaaaaaatataatcatataaaaatagtttcaaaattgaatataataatatcaattttatttaaaaaaatattattatatagtaattgttgataaatcatataacaaaataaaatatactttatattttaaaatgaagggagaatttactccacatttagatcgactagtggttattgtggcatataacatgtcgacaaatatttatttagagtatcctagctaattcatttagcatataacttttatagtgttgtgttggaacctaccagaatgtccatgaatgaaactaaaataactgggaaggtgatcgagcgattggtttggccgaacgtttcccacgatcacaagatcgataaagtttgttcattttttttcaagctttataggtggtgacggcagtgtgcactttagtttttctcccccgttgtttggttaattttgtgtggttcaacgtgccatatacgtgtttcttcacaacttgtcacgtactatgatgataaatatgtgtttttttaattaacttttattaatttccgtgcatgtggatatatgtggataaggaggaagccacaaaggcatagatgatcgagcatatctgatggaggcgatgcttccttttttttctattttttctgcttgagtgcttttttttttgtactgtaaaaagagtagtgcataatttaaagcagagccccaaaagttaggtacatcaacctttcacaaaatccatgataaaaccgtgaaatttacagccgtcatcatcatgaacgtcttgtcctacagggattccttttgtgtgaagatggttatacttctctgttccaaaataaataaattgaggtgggacatatcgtggaaggttacgccctatgcaattaatctagattggtttatttttggacggaaggagtatataaatgtttttcaaactttttgggtgcaaccttataataaggtcttttaatatatttttagattgtgcttatttcctacgatgatatttattggtagtacgatatatgtagtactacttagtaatattatatcaccagtaaacgtatcctaatcatttatgtattttactgacagtaaaaacaactaaactcccttaaatgtacaatatttgagttgatagtataaagagctaccactcattggatgaggaaaaaaaaaggtcaatagtaccatttctactacctaaagagaccaccataaaagtatactattttcttttttctattttatattataagtcatttgattttttttcttagtcaaatttttaaaattttatcaggtttaattaaaaaaataatttttagatttaatgaaactaatatgatatttttagatattgctagatttttctataaacttaaacaaacttaactaacttttaactttttaaaaaataaaacgacttcttagatatgaaacgtaggaagtggtacctaaaacgttcgtgatcaaaccttataggacgacagcgacggcgaggctaccctccctccccccccccccaccccacacacacacacatattacttacattgtggcgtgttacttatttcccatgtgataaataaaaccgatgaagcagcagagtgcacgatatgatatggcagagcactagccagttcacatccctcctccactcggtggtggcgccgcccctcgccgctgccatggtactgtacgagtgggagccacgcgggccggccgcggtcgcaatcaccgggccgaccaccgatgacgacgacgatcgatcggaaggaagctaccacgacgcatcatcaaccgtgctgcggatgcaacgcgcggcggcggcggcggcgcaaaaaaccttggccggctgccgaaccaaccgggaagctagcgggacaaatttatcgagcctaattaatccatgattagcctatgtaatgttacagtaaacattctcttattatggattaattaggcttaaaaattttgtctcgtaaattagctttcatttgtatattaattagttttgtaagtagtatatatttaatactctaaattagtgtctaaataaatacagagactaaagttaaatccctgataagatatatatatatactagtactattaatctagataaaatgtacgtatattaaaatttatagtactataatgtgtcatttcaatattatgttggagattgcaagtattggtttttttcaggtatattggccctgtttggatccaagggatattttttagccctccctcgaattgctcaaatagccaaaaaagatctaaaagggtgagctatttgagggctatttggaaataacccacccaagaggtgctaatcggggctatttcaggtggggccactgaaaaagtatcttttctccctatctctccatgggaaggtacattaaacaccaaataactcttaaaataacccttggatccaaacaacttaggactattttattagagtactatgctcttgtgctaaaaaatagctctcaaaataactatggacaagttctccaaacaggggcattgtctaggtcggataacttttaactaatttggacgagctaccatgaaaaacaaaaccaatgcgtagctttcaattccattaatactaataaagtgaaacgttatctcatttctatccatgtctataacatgtaccaccataatactgtacaatactaattttttctttgaaaaatggactggctcactcgtttgccattgtagccttgtgctcgatggttacggagacaacataagaccatgttcgatgtccctatatatggtcatatgttctgataaggatatattgacacaatatacttttttaaaaaatattgacataatatgcacatatagagtgataaggatatatttagcttcagagaaatccatatcaagtactccattcgtttcacaatgtaagtcattctaacatttatcacgttcatattgatactaatgaatctagacatataaatctacatggattcattagcatcaatatgaatgtgggaaatgttagaatgacttatatggtaaaacggaggaagtacaaaactaatagaatcagagtaatgagtggtagaataaaagatgacaaagatgtggaaaaagaaatgcacatatcttttgatgtaatggtaataaagtgaatatgtatatgtcgtaccatgttgttttcgtcaacaatgcaagctcaagcactgcaaattaaatatcatactccataataaacaattaatcacatacatcagcagtaaacttccagcattgaagcaacatattataaaaacagtttacccactcgatttttccaacctctttgggtacattcttttctcccccttgttgacaaagtctctaaccctcatctagtaaacctgaaattgacagacattaatttctactatcaaataaatacgcactcaagctccagctctcctgaagctgccatccaatcaaacaattttaactctatataaaatgagagtgaaactaggtgaaacgctatcacaaaataaactaaaaagatagagctagatttagactgctcacctacttcataactctactctaaaactcaacttatcaagttaaatttagaaactggacctccatcaatcaccattagcgcactcccattaattaatacgaaaagccacgtgtcaccatcaccaaaaatttaaggccgttttggattgaagccaaaacgcgccctaccaaaattttggtaacttcaaatagtaaacatgctagtttcgattgaagccaaacaatcagtagtgtctatacttaatttatttggtcacattctagaaacttcttcactttactactcaactttggctttatattggtatcaaaccaaacatgggctagcctactttaccctaccaaaaaatattgctagtgccaaaatttacctacattctgatactaccaatgaattggtataggctcttacacccaccacccgttaaccactaccctacccgacacgccgccggtgcaatacccccacgtcagcgcacgtcccggccccacctgtcagccaccatcggagcatgggccccaccacccccaccaccccgggtaaggttgccagcccggacagcgggatagctacgtgtagtgtaccgcgtgacgtatcacactcgcagtatatatttttgctacgtgtacccgagaagggcgggagggtgggggccccactgacaggtgggccccgcaacggcgaccttggtcgttactactacaaagaagtcgtttccctctccttttctctctctctctcatcatcatcgtcttcttcgttgtgggcgtagccaatttcgttcgccattttctccttccattttctcggcgaggaggagggggaagagctaggatgccggcgtggtggaagagggggaaggggaagaaggggaaagggggatcggcggcggcgggggaggaggaggaggggaggaggaaggcggggagcttcgacgaggcgctcctagccgggaagcagagtcgggaggagaaggaggtggtggtggtcgggcacccgctgccgcggccggcgtcgctgccggcgccgtcggcggcgtcctcgtccgcggccgggtccgcctcggcgtccagcgccggcagctcctcgctcggctcgtcggcggcgtccgacgagccgccggatctcgggacttacaggtgaggaggaggaggagtggtttggtttggtttggtccggtggtttgcaattcgttcgtatttggtaggtgggtgggtgggtggttggctggttaattagttcatcgaggcgctaaatcaaatcaagttgttgttcttctcctttttctctttaaattttattgctgaattcggcgtgaagttttcgtttctggttgctagtaataattttgcgcgcttgcttcggttcatctgccgaattgtttcggtgggtttggtgggaaattgagttcgtggacttcatgaatctcatctgtttggaggaggggatcaagatttgatttgcgaggttctttgcttcatacttttttttggtgttctactttttgggtggaattggagctgtacctcttgatgcttatctggtttgttttttttccttttcatccaggtatgcttgctagtggcgttggctctttcgtcccctggaaagtagcaccacttgtgctctaattaacccaattaattatttgtttttgggcaaaaattatttcgattcgagatggattctactgccccgttgactaattgtcttcgtcaggatcttctgctaattgtttgattttgtaatatcagttgatcttccttgatccgtctcttcgctgtatcatttgggaatttttccgggcttgctttctttggttcacttttgattttagaagatatgatttttttaataaaaaaaccatttccgtttagtgacagatagtttatgtgatcagctctttaaattagtggtttttttggtgtgtgctggctatttgtcaaagattatgtgggtttttgggggcaattcgaattgtatgttttgattgaaataatcaaagaacatttttgggtccccagtccctgtatataggagtcgatgattgcttaagaataattggtgacttgctacgaatgtgggatagtacgaagtacattatttctaacccaattattgtttcgagatatggtagctttaggatggtgaattttgctgctgtcaagtgattgctccattcataacttttcatttgaactgaagcttgttcatgtctgattcaatagggtgccagatgcaagctatgtgcttccaggcagaacgctggctattgattctcggagacaaaatcttgcggttgaagaaggacgctttttcgcaaacaaccagggtttggagcatcccaggttgtctgaaacttcagtttctccaaggaaagaatcttaccttcacaatttggatctttcaaacgatcgaactgcgtattgccatggtcggaaatcaacggagattgtgttcagtacaagagtgccaatctctccccctggctcaaaaggccaaattccctgtccgacctcccctgtgcaatcaagagcattcgggcaatgcccaggatcccccactgctcggcaggatgattcacgaagctcaagctcacctcaccctcttcctcgtcctccgggctccccatgctcatcatcacgtgtcgtcagttcacagtggaagaagggcaagttgttaggcagtggtacatttgggcaagtataccaaggatttaacaggtacttgcttttgaaagcatttactgtattttcatccttacggagatgaatatttcttttctacaatgcatactgaatcgctattcaaaaatgtatttaatgcagtgaaggtggccaaatgtgtgcaattaaagaggtcaaggttatttctgatgattctaactcgaaagagtgtctcaggcagctacatcaggtaatattcatcttgtcaacaaatagcatctgtcagcagatatttaaactttacatctttcgtactaatactacttcctatgggcaggaaattgtgcttctgagtcagttgtcacatccaaatattgtgcagtactatggcagtgatctggtaaatatagaactcatgatgattttatgatcttgtcttgagcatgtagttgcatcataagttaaacgaagacatacaatcattcaatcattacgaactctgaaattaggtgatggcaacagttagattaattgttagtattattttccagtcataaaccactgttctgaatttgttaagagggaaacactgtggtatatattgtatgaaaatctgattttaatttgctattttatatatttttgcctgagtatgcttcattattcaatacagtctagtgagacgctttcagtctatctcgagtatgtttctgggggctctatccataagttgcttcaagagtatggtgcatttggggaggcagtccttcggaattacacagcacaaattctttctggccttgcatatttgcatgggcggaatacagtgcataggtatgatacttgatataatggtattttgtttttgtggaaccacatgttgctcttagttctaatctatgaaacatcacttttctcacagggatatcaaaggggccaacatacttgtagatcctaatggtgacatcaaacttgctgattttgggatggccaagcatgtaagtacaacatagtgttaattatctgataattcaaggattttaatggatctattattttcctatatgatattgttttgttgactagttattgtatttatacagatatcagcgcacacatctatcaagtccttcaaaggaagcccttactggatggcgcctgaggtaatgcaacagaagttgaaaaaacttctgtactctgccattttaagttggttgcttatcattttctgttgttttctcatagaattttaattttcctcaggttattatgaataccaatggctacagtctttcggtcgatatttggagccttggctgcaccattattgagatggcaaccgcaagacctccttggattcagtatgaaggggtaagcaagtgttatgaatttttcatggtatagtgcccaacttccattggaaccatgctaagctttttgtaactgattcacaggtggctgcaatatttaaaattggcaacagcaaagacatacccgatattccagatcatctttcttttgaggcaaagaactttttgaaactttgcttgcagcgtgaccctgcagcccgccctactgctgctcagctaatggagcatccttttgtcaaggacctagttgcaaacagaagcttcaggtctggcatgacaagggacacgtttccaacttcctttgatggaaaaggcgccatggtactactacacacaatctatgtgctaatcaaacagtgtccatttgtaattcattttcatttgtgaaatctatttgtgatttacaccttagttagttgcaagatatgaacaaatatgaaggaaaagaaataagaacagaaattaactgtcgtatctgtatcttcaagttagaattttgtgtcttaccattaatgtttatatcgtttcaggtacagacaagcaacagaagcttatctcctctacgagatccagacctgacgatgagaaacttacaagtaccaacatctgccattccttcgatttcaactcgcaggatctctgccatgtatgttgtccttttttttttctttcaaaaccagcataaattacatctcttgcattgtctaacagagcgtatttggtgcagcaacccatccaatgtgcgtatgaacatgtccctgcccgtgtcaccttgctctagcccattacggcagtaccggcagtcgaatcggagttgcatgccgtcgcctcctcatccagcctattcagctggagcagctaactacagccctatcaacaatgcactctacccaaaaagaccaagcaaccatgttccagatccatggctcgaaatctctcaactgaaagcaccaccatttgattctccaagaagattgtagaaaacccaaacacactttgtatacaggaatgaaagatgttccataagttagaagaccaaagggggttcctttttttctgtttcaccctttctgtatgtatctttttcccctcaggatgcagttgcatcgccattgtacaaatgcacaaaatgagttcagtgaaaagaagtagcattccagatttcacctgttcttgttgtgtcttttcccatatgatcaattttggtcccgatatgaattcccactgtccagatgcatctttgatatgatgtattttggtctgaattaccactttggctggatacatctttgctgtagaggctggattgaattctatcataaaaaatcgaattcccatccatcttcagaacttgatgatttttcaaagattttgtctccaatatgatcaattttggtctgaattcccactttggctggctggatacatatttgctgtagaggctggattgaattctattatagaaaaaagaattctcactaatattcagaagttatatatgattttacaaagatgtttgcaaaactgaaaattcatggaagctgtatctgatgaacatggaacacatcccctctgtaagtcacttccttctcttcaacacccaaaccccagatatgcccttgcagcttcagtaaaccctttgcatcatctccatggcctttcttggccatggcaccgcccttgccattgccattggcatgatcgccattgtcagcatgagccgcctcccagacgaaccggaacacgccgatggcgcggctcagctgcttgacggcgttcctgatcgccggttcatcgccgtcgatcaggaacttggcggcgtggacggtgaccctcttcccccccttgccagagaggcgcttgccggcgtgcacctcgacgtcccggacattgccgtagaggtagaagaggagcaaggtgtagaggcatttggacgaatggcctaggctcttggagagcttcttctgcaccaggcagtcttgccggcgagcctccttgaaggcgatgtccctctcgacgaagacgttgcgtatctggtagagcccctccttcatcgcggcgaccttgtcggcgtggccggcgagccgcgcgtcggcgtccaggctcttggctaggtcggtgaacatgtcgagcacctcttgccatgtcttcgccggcggcggcggcggcgaatttgcaggtttgttgaaaggggtcgggcgcatccaggatggggacgacgaggtcgcctcgtcggcggtgtcggagaggaagtggacgcaggcggcggcgatctggtcggccatctgggtcgccggggatgggtggcccagcgcggccatgtcggcgcgcaggtcgcggagcacctcctccagcgcgccgcgccagatgtggtgctgcgtcagctgcgggcagatggcgaggcgcacgctcttcctcagctgcgccgacacgcctagcacgtcgcacacccgcgtcagcgagctcagcgacgtcgccttcaggggcggcgcgcgctgccccgcggcgaggtaccgcgccgccagcgcgtcgaactccgccacccggtcggcgacgcgccgcgcgtccgccacgacggaccccgtctccgcgtgccgcggacccccgccgtccccgcgctccacgccccgcagcgacccggcgagccggagcagcctggcgtacgcggcgcggtaccagcgccgcgacgggggcgtggcgtgctcctcctcctcgtcttcggtcggcccgggcacgaagtggatcccgcgtcggccgcccgcgagcacgcggaacgccgcatcggcgccgcgcagcgcgtgcttcaccctgccgcggcattccatcgaacacgttgtgcgcagccgcagagccctagacggcgcacgcagccgccttttctcccacaccgcgtgcgagctctccgctcagatggagaggtatgtgtcaaattttccttgaagggtttgatatattgtagtatttacaaataggtccctggtttggtagtgtcttaataaagttttaaacaaatcctaggacttatctgcataaaatcgtgccttctttctcgccgtttcatgctccatatctcgatttgttttcgcatggaaaggaatttagggacgcctatgtatgcttttgaccctaatcctgatgcgaggctttatatttctgggcagtttaatttgggatttggctgtatgattgagctggagatgtgattatggtgcggattaggtcaaaaaagttaccaatttgactgtttttcttgtgtttatgtgatcaaggatggccgaattgcacagtggaaatgcagaaccttatgatattatcttatctatttgttgagttggttttgaccagtgcagattctattgtgtggtcaccagaaattctatggagatcttcttttttttattgtagttgcaaatttgcaatgatgcttggattgattttgtgcgatctcatcaaacaaagcttagtagatttgattgataccttcaatctattggatgcagtactgttaattatgatggtatgcccgatcctcatttgctgttactttattgtgatttgtgacaaatgatcaatattcaccatggttgtttaatactttaattttcttgtacactttgtcagctgatggtgctggaacctggatagagccaaactactgaatcagtaaagcataaaccaaatattcaataacaatgcaaggtatatgctggttggcgcctcttaaatttgttgtgattttgtaatgatataaccattttatttgcgcatcatacattaattatcgaaataccgtgacactgagaaatagctgacaggattggaggcttggattcatttttccaaggtatttataatttctgcgcttcactgtttaaaaaaatgttctgcaaattatgaatgctgcttattcatgaagatggtactgagcttcctgaattttgtgcaagcatatgaaagcaccagtctagtactaatcagacattgctccattgtttgacacagcaagctggacaaaggacaaatgggaaatgaaacaaatatcaaaccttataactttatttcaactaggctctgatctataaccctactctgctagtctcatcaaccaaaagtcttcgtggatggaaaatccttccccaatcaaattcgctaaatgtattcttgtttttggaacaggcattggacctatgtacagagctatgtctcttagcatgtcatccactttgtacagccctgggatgtgggatggttgtatgaatgccttcctcaccaaatcatcaaagtaatcagtcgcaacattctctatgctatttttcatacaattttcactgacgacgacacagttgttcatccaatagcttatcaattcctcccttgtgaaggtccagcgagggtatgtacccaacaccccaaagcagcgttgcaggtgtttgggaagaagcttacaacccagaataaatggagtaacaaacctggaactggatgcgacgaactgctgacagcgattcagaacaatgtaccagtacttctcattgaggttttctcgaagcagtccactcacaacttttgcagctaaagggctgcacaccctcaatgtcacagcgatcttctttccaataacaagtaatttctggtattcttcagggtgtgcaccacccagggcattttccatgaacatgcagccgagatcttccattgccaggaaccctacaggtaagttttcatgcttattgatcttagttgccagatgttggtacatagtggtaatgatggccttgcttcctgctctacttttcatgaacagtgtatcgagtatgtcattcattcccctggggtagctagaagcaccatcaagaacaagtagaaatctctccattcttagcctttctgatcacacttgaaagattaatggttacgttagaactcaaaccaagcttcttgcacaatgactttaccaaggccatggctggactagtatattctctgcaattcacccatataatcattgagaaatggctcctcaccttgcgatcgtcgcatacgagccgcgcaatcgtggttttacctactcctttgacaccccaaatgggaagcacacaaccatctggagaggatgatccattcttgtctatgtgaagcaagaattcgatggcctgtttcctctcatcgactctgccaactaccctgtcatggatcgaaacaaagatgataaccggtcgatgatgtaacactgcttggtcattctgcaagctgagaagctgagtgaacttggggatcccagaagctactgcttctagcttcttgacagtggcagaaactttcatggtggattccttggatggaatcagctgcgatgctgcgatcttgatgcgtttgaaggagttactagaatcgatgatggagctcaccttgctggacatatctctccagttgcgcagtgtctgatcgcctcgacatgcggcgtcctcaagctcgcgtagccagcgtagtagccatgaattggtgatggcacaccccttggctgcctccagagcggtgtgaatttcgacgagaagctgccgcagacgatgagtctcctccttgacatgcttctgctcctgtgattctgaataaaagatactatttgttggatagtctctactatgaccactgaacataatacctctagtagatccaccatgtttgttccttgcaattatagaggaaactacacaaaaaaaatgagtttagtacatagccaaagtctgctagatgctgataactacaaagtgatggaagggatgagccccaatctttgatattagggaagcaaggaaatattgaataccaacagtataatagaaagggagatgtttcagttagtccaagaatgcttcatttttttcttttcttagcgaagatccctaaccgatttcgtgtattgatgacaagctgtctacttcagtatctcctctttaattaccaggaagtttccttggtgcctcttttgtcttgaggtctgaaaaacaaagacacaaattatttactattgccactgtctcgcctaattatcattgaccggttccacttcattcagaacatggccgaattgtttacacgatagatattcaattattcaggtccattctgtcattttctagtttgactccattgctagtgtgagcaaccgtcaaactatgaccattttattgttatatatattgcctcatggcctctctgtaaactgttcttcttcatgcaggttctgagaaatgcttgactatgaagatgggaatgtgctcattgactatttacattggtgtctgactcactatttgatctatcaatcatttcattaatatgtttgtgcgtttagagacattagttaagttgatgaatttagaatgaactgtttaactagtatgttaattgaaacattattaggataatccaagtgagtaaagagttactgctgtggcttgtgaaccgggtacatttttcatgacgtatttactgcgtccataacaagcattctaaatgcctaagggtctaaactatcagttggtaagtcctgaatccaagtgaactgcttagcaggatgcctgggacctactatgcaatagctttccttggctgttcacaagttaggcaattgacctgacagtttataccctgagcttgtttgaacctgtgtttgagtggaagtctccgactgtttatgctgaagcctcccatcgtttgctgttgtcaaattttgaatttaaaagttaattttggagttgattttggggtttttttcatcgtagtttcttactttcttttcctgaattagcttttaaatcactaagaacatatatataaaagttttatctaggaattattttttggttgctgataagttgttctacagattaacataacagaatgacagatctgtccgtccatgtttcaataatttaatgaaacctatccaggaatatatggagcatgtctctttctaaatgatttgttgtgtaccacaaattttagcgatgatgaattccacagtgggacattttcagcatgaaaaatccaatactcttagtggagggaaaaatgactttacggaacatttgactcaagtgtctgtcttccaagtaatacagcaattgcagactataactgtgagtgaacaccatctaatagtctaaaacggttaactagattcagctgagcagaacaaataaataaggattcctaactagtgggatctacacgcttttagcaatatttgtttggcaaaattatcatattcagattgcagaacaaccagccaatcaaacattctaatggatttttccttactaacatattgcctgagaattataacggaattttaattaaagaaaattatcattaacatgttattaccatctattaattggtgtatatatatttgttactcacatgtggacttttttagcttcacactggtttttgttttccataaaatatagagagttggtgaaatagctgatatgtgagccct

SEQ ID NO: 6747 - DNA, 719 bp, Oryza sativa
ttcctgcagccctgctgcctgtgatgatccggggatttgtcaatcaggacgtgtgggaagcattagctgagctaagccatttttatagggtactttgtgctaaagaggtcgatccaactcaaatgcttcagatggaaaaaaaatatcccaattctaatatgcaaactcgagaaattattcccaccaggcttctttaattatatggagcatctaatcatacatctgccataccaatcaagagtaggaggtcctgtaaagtatcgttggatgtatataattgagaggtaactaaaattccacatgttgtcaatttaaagtcatattttatcttaggtgacaaactaacatgtcatgttatgtagatttattaaaaaactgaagcaaaaggttcgcaacaaggctcgtgttgaagggtcaatagtggaggcttatcttgtagaggagatctcgcacttcacatcactgttcttacctgatctcattgctagctcacgcaatcgtccacatcggtatgctcaagttggccctgctagtgaaagcaaccttagcctgttccaagttcaagggtggaagaccggtagaggaatttctcgaactttaacttttgaagaacaaaagaaagcaatgatatacatatacacaaacatgagtgaaatggatggatttgttgagtaagtattctaaatttgtaaataagatattaattctgctataaaatg

SEQ ID NO: 6748 - DNA, 503 bp, Oryza sativa
tactacctttcagatagcgcattactcgctcaagcgcacgcagtgatcatctctcggattagaggtaaaccggctcaacttgctcacagcaaaggagatatcaggcctagctgcactagccaggtacatcagcgagccaatgatttgggagtattccagttaattcctagcaattctattgttcttgcgaagcaacaagctagaatcataaagttttagagaaggcttactatcaatgtagccaaagcgattcaagatcttctccacataatgggactgcaagagtgtaatcacattctcacctctaattagcttaatgtttaagataacatcagctactcccaaatcctcatatcaaaattttgagacaagaataatttaacctcgtttatcacctcaaggttgggcccaaatatcagtatgtcatcaacatacaaacacagaataactccctcacccccaccatggcgatagtacacacatttatctgcctcattgactgc

SEQ ID NO: 6749 - DNA, 9430 bp, Oryza sativa
tgtgtaatccgagtctccaagatacctaccactaaaacactatcttctgtagcaacagcattttaatgtaattattccgctgttccaaattcaccatgatacagtcacatccccaatgtaataattggatcgtgtttaattagatgtgttccatcagatgtaccagatgagcaaatcatgcatactatattcttgtacttcaaaaagatctcagaaatggattaaggtccccttttatggaaactcttaagtatacataaattatccatctcccctatcatagtaaaagaacacacggtgctagaacagtaagaataaccatacacccatagatccagaatgctttacgcttatagtttttctgtacacacatcccaacatcatctaaacatccacatcgtaggcctgagatgagcctggatgtgaataaatggtcagtgttcccctggaagcttaacctttttggaggatagtcagtgagctaaactaaaccaaaaacactgggtagcaaaccttcaaaaaatcagtggttatacccaccactttgtttcgtgcaactccttcgcatactacagtggcattgaaagaagcatgtttttaaaaacatctcattctgtagcctcaactatatattttaataaatatttcacccatatgggtcaacgtacatgtcaaacatgcagaatatgtaacacaaaatatgttgattctacatattacgctgtagtctttggataatgctgcttatactgtgacaataacttgccttctaactagaccactgtaggtgctcctcaatagttgtaactttcttatcaggcataatttgcctgagatccaattagaaaagaaacaaatgagatttccacggaacatttcaaacaagtaaaataccatctactacatgaataaacgatgtatgcatgtagccatgaaggaccttctatccagtttattgcttgatttctaaaaagtttcaagtcattcaagatgttgaggcaaatgtgcttgtagcatggtggtaaatgccttccagtgagaatctaccaaccagggttcaaatcctggtctcgcacaaaaaaggtgacttgtgcatgtaattcagtaattcaatagtgtactacaagcaggactgcctacaccacagagtacagtacataactaccatgacatgttgaactcaaccagtggaccagaataccacgtatttaaggctcatgccattcgcacagcactgtgtcttctggcactttgggggcacttggacactaggcaggtgcctagtcagcatctaacagtagttatattcagtgaaatccatcatataccaactaaagccagtaaaaagaacaatgaaaaaggaaaaaatggcccactaaacctatcctagagaccaggtctctgtttagactttagacccatcctcaaagcactaacatacactaaaattaactacttgtacatggcgattatgccacctgtcatgttgaggatagtctaaacacagacttagtctcagagaactatttttgcacctactcagtgcagcctaatactagtagtaacgacttgacaaccatgccttaagcacaatatcaccccacctcaaaagaggtaataaataattctaaccggggtgcaatcctaacaccagttgtaatgctgtagagaccaatctgcaagtggacctgctaatgagttgaagccactccactgccgccaagccgaccctaaggatgatcaaccaatccaacccaatccatcactatgtggcctacatcctgctgatatggtatggttgtcaaaggccatatgctaaccaaatcaaccacaacagccataggatctaaatggttaggccatgaatagtatttaactatttttacagcttggctggttggccctaaactcgaaggatgacacagtggctacgtcccattttgcaaggcagttcatgctagtattgagttaaaaaagtatttacatgagtagacacgctagcttctttgctaataagatagatttcagaagaacacaaaaatatgcatgtaggaacaaggtggataaagcattaatgattttgcaacacactgaagatggaaagtattgtgtgcatcagagacagtctccttacgagttgcaattattctgcatgtcttgagttgacaaatttgtcgaattttgaacagcactctggtatttttgcacaactgcgcccagttgactaacctgcatagaacaccgagggttccaaaatatattaaaccctttcccgttttgcccaaaattcagaatatcaaaatgagacatctgacttgaataaaaatatgcatacagtgaaagggctaaatacctgtgggattattgatctacgtggaataagctcctcgtgacgccttgcacaaaactcccaagaagcgatcttcaataaaaggaaacatgctttagtcaaaaaggcgccatttatcataccagcaactttaaaggaccaccagtgacaaaaaaaaatcaaaaaaaatataataccttgagatcaggattaaaaactatccttagatgtccttcgcgtaccacacgcaactgctcaaagacactttcctggattgctttggtatagtccaaaacaatctgaccagaggcattctgcgattcacgtggcatgtcgacatatagtaattcttccaatgtaccactggcatatttaatttggcataatcgtggtaacacctcaacggtggtctctgttaaggtagtcacgtaagtggatgtaaaaagcagattaacagagaaacatgtgcaaattaaaatgatgcttaccaaagcctcgcccaggcttccgattgcatatctcacaatgccatacatcctacaagggcaaatatagaaatctttaacgaataatttgaaaggaaattaaaaatatgaggcgctacttcacatctgccaattaaaataatagaccagaagcattaatgaaatatatgaaaaacagaatggatattccagatttaaaaaatgacaagtcagcaacggctcatgaaacctgagggaaaactccagtagtttgacgaccacttccatagagagatacacaccacctttttttagcatttggagaaaaatactcattgacaaagtttctccagtactcgatattgttatcctgcatcaaaaggaacaagtagagacacaaaactgtaagcccatggccttcactatacactaaattaattgtttggaaaaagccgaaaacttacctgtggcctgttttgttgatgatacatgtaatgagtcaatctctttgcacaggttcctggctcataaggagccgattttcctggagttctcatgtttagactctgttggcgaagtagctgctgctgttgctgctgctgctgttgttgctgttgtaattggtttctctgcaaaggcagattctttagaatctgttgttgttgctgctgttgttgctgcatttgcaatatccgttgctgttgcaaaaggttcagttgagctgccgcagcagcttgaggattctgctttgtcagctgcagcaaatgttgctgctgctgttgctgttgcaggaatgctgatgggtctgaactctgctgctccatcttcaccgcactcaaactcctcaaagcttgcaactgcggcggctcaattttaacattgctagcattgcgcatcatctgggctgtgctattctggtcaggctgccccatctgcggttccaatttgaccccacctgtgctgccaccattctccaacttcactgtagcctgcggctgctgtggcggttgcggtggcaactgttgttggttgtaagacattggcagttgctgctgatgctgatgctggtgctgcaagtcctgcatagcatccaggtgttgttgttgctgctgatgttgcggtggtggatgcagattatctgaacccagctgattgcccaaactaacttgcgacgatgaagggaacgagagagaatcagaacctcccgcgccaaccaaatcgccagcaccatcaagccctcctctctgctgctggagggtattcattggaagcccaccaccacctggcatcgaccccggaccgagcatatgtcccccattcccaaacggccggttgagcagggaggaaacattggagccacctcccagcaggccattagcaccaaactgcgtgcgcggcgacacgagggacgagaagggcgactgcgaaggaagcatgcctccgccactgcccatcccctgctggccgccgctgagcaggctggagctcgtcctgagcaacgaggccgcgccaaccggctgcccaggacccatcgggttcggcggccccgacggcaccatccttgccggcaatgacaaagtgctccaaacctcccccgcacaaaccgctgcaagatcacgcgcgccttcactcagctcgccatccttccaccgtaagatccaccggaattgagcaagaacaagcggtcatccccctgaaaacaaaccacagattgcaacctcagaacacaaccacgggatctacaccaccattaccagaacaaatctactgtgtcaaactccatcgcccaaaaagccaaccgaaaaccagcaccagcgagcaccaaacccaacctccccctcccgcaacaacaacaccgagcgcaacaaaaccaccaccgaatccaccccgaaaacgaagaaacacgcgcagaaaccatcagcggaattaagcaacgccgagctccccgaacaccccccagatcgcatccctcgcctcccaaccccgcaaacccgcgcaaaatttagcaccagaagcagcagcagcagcagcaacagcaacagcagcaagccaccccacctcacctcacacctcaccaccaccaccaccaacaacaacaacacaagcacaccgccacaaactccacgcactcacctccccgccacgaatccggcgatccggagctcgtccacccgccaaatcgccgctgccgccgcccaccaccggcaccgccacttcggctagggtttagccccgccgccgccgccaactccgccgccgccgccgtgggccaaatttacacaataaaataaaataaaataaaacctcgcgagtttattactcctctcgctttttttcttctctctctctctctctctcgccttcgcgatgggatttggttttctcctctgcggagaggaagagaggaggaggaggaggagagagaaagaagaaaaagaaaacaaaaacaaaaacggaggagagagagagagagagagggaggagaaaatggcgagacgcggacgtcaaaaatatccgctggatttgattaggggaaaggcacggccacgcgggtggcgtacgctgccgctcgctgacgggtggggccaggggttggtggggcccacgtgggtgtgaggggggcgggttggggtttgggtggaggttggggtagggaacggggttgattagagagggggtggtgttggtgttttttttttttttcgttttcgtttgggtgtttttaggtttaatttttttgggggttcttttgggttaatgttttttttgtgtaggggtgaggttttatgtaattaattgattaatttaatttaaatagaagtcaaaagggagtgttgtgctccatgccttgggggtggccaatggtgtggcatcagttgcttgtgtatcctcactcctcctatcagcttcggctcatccacggtgacgatgataatgacgacgacgatgatgatagagttttgcaaggaactggttttgtggttttatagttatattatttgcgtcgtgtgaaatgttggtgtttgtatttttataggatagttgagtgtttttttttaacgatcgacgtgttgtgtaatacgaattaagttttggcgggtattttgaaatgtcctttttggaagtatttatgtttaaagcggttcttaaatgctagtttagcaacaaggatcaatccaaatttggtgaaattgtatatatagataacttagtaatataacgtaggaataattcatccacgtaaacttcaagttgggttattaactgagaatcctattgcacctttcaattctttccctttttattctttttttctatgttgctttagctaacctcagacttttgacccaactagtacttagcttatgtttttcttttcaagcatagacaactgaaagacccaactagtatttatgtaacctcacattcgcttatgttctttttcttgtcaagcataggccgtgtttagttccctgtcaaaaagatttttaagtatacggacacacatttgaagtattaaacatagactaataacaaaacaaattacagattccgcctataaactgagagacgaatttattaagcctaattaatccatcattagcaaatatttactgtagcaccacattgtcaaaccatggcgtaattaggctcaaaagatttgtctcgcgatttacatacaaactgtgcaattgattttttttccgtctatatttaatgctcctatgcatatgtccaaacatttgatgtgacggaatttttggaagtttaaagggaactaaacaccatagacaattgaaagacacaagtagtacgatgtactctcacttttgcttgtgttttcctcatcaaacatgcatggttcgaattagaggggtttgatcgtttccgcaatgctcaacatatagaatattggtggccgattaaaaaaaaaaaccaaatttcagtaatttttactatattgtatcgtacatgcttttctctttgtcataccatgtttgtttccgtatagtcttccctgtttttagaaaacgagcaagtttcgcgatataaataattgaaaccctgtacatagggagtagctagagctagtgagaattggataaatccaaaaatataagagtagcaaggaaggaaattctaaaattcaaagaaggataaaggagcatgcatgccattgtacacaatagacccatgctacatgttagctagctaggattttgttgggtagacaaactgaagatgccagggggcttcaagattcgtgcaaagctcacttctgtgggccacatggttttcgttgtcccatgcgcatggacttctttgaacctgccaaaaatcaacttattgagttggatatatgtgctccaaaagacttgcaacagcatcagttgtttctatccacttgagtctaggcacatacatggacatgggtcttctccttttatgacactgtatgttgttttgatatacctggattggtctcaatttcaccgaatcagtatgtaggttgttttaaaaagtacatattgtgaaaatggttctaattcttgtttatctataagtgggctcatcaaattcatgaacacttctctgttaataagcttaggtgcatatgaatgtttttcataaagggcacgctaatatgcattaagtaatgctacctttggtgaggaatacttgtcgctttgacaataacttggtgttcaaaatacaactatgaccgtagatttttattgactacaaaaggtcaatggatttatattttgttgttattttgggggtgggggcgggatcaagtgtacacacatgcaaactttatatatccaatccatgtaaagcatatatatactcaaccattcaaaagcttaaaccaaagacatgtccaaagcaacgtgtgtatactcttgttaccaaagccactagttagtacttgtattctgccaccctataggtcgtttgccatcatttaaattgacatttcagtcattgatattctgccaccctgtagatatatatatttcagaagcagacaattggtactttctaggattagagaagtttgcatttggagggtcctacatataattttcaataaaatatgaactaaaatttttactacttgcatcaatcggtcaaatatctcatatttaactatctacttttgtcttattattagtcttcataattcataattagctgcatcatccttcctgactctgcatccactcatatacacctttcattaaaaagaacttctgaatctgaatctagagatgacctatatattcagatttaaacttagagatcgttttatggatggagaaagtatatgattaaaatgccaatctacaattttttttaaatgtactcctttctatcacttttatttgacgctgggagtattaaattgagtatcaatctacattcatttatatataataacattaacaatctaaatatagacaagccaagtgaattagttcattatttccgataattgccaagccaaagtatacaccagcacttgatcatctgatccacacaaaccggattggtctccttcgtgttgtcaaaggcgtgcagcacctgtttctccctggttcccatggcccacggcatagcctttaaacatggaccactgtctatctccagcaccaagaaggctagagagtaaatttcactttggatcatattttattactgattttttttactttggattaaccaatgtttttattttggactggatatttatacctttatggcactttaaaccaccggtcctcaactattttatctatatacattcaacttgtcatatgtcaaagaaatagtcttacatatagctgctagagttcattgacgagtaagaacacagaggtactcgagatcgtttatagtttgataagagagttgggtggtttaaagtaaagcaaaaataagtttatacgatccaaaatgaaaacaatgattaaaaggtgatccaaagttaaacatcattaataaaatgtgggctttggcaaaatttactcaaggcggaaaagcctcatgctcttgctcatgcattccattccattccagatttccaaattgacttagcattgaccctggctggacacagccaccacaaatttttcatgggttctagtgagtgcaagccaatcaaatagggatgagaacggtggcaaaatttcttgaccgagcatcatttatgtagaagtggtaatattttttattttagccaaagattaaaaaaaattaaaaaaaaagaatctatcactaccatattatagttgtcactaaataaatcattagttgacttggtaaatatgaaaaaaaatatatcacggaccaagaatcgttgatgtagaaatgatatcgttctcgagcaaatcatcacaaactcacggtgaaaaaaattatatcccaattatattcttttacatgaaagatgattgtttcctttgaatttcatatattttagacgcaccgatttgcaccacctctactagggagaagaagtagaaaggaaggaaggatttaatggacatggagcagttggccgcaggtcatatccaaatcatgccggggtgccaagcagattgggagacagccgatctgagttggagccatg

SEQ ID NO: 6750 - DNA, 3376 bp, Oryza sativa
gtgattgctacaacttggaatcactacaaagcagacaaggactcaaatgggagaagcaaagctgatgtggttgaagaaggtttttgggtattattatatttcttctctatttgttactcctactatcttctcattactgttttaaacatatgcagacaatttcgttttaaaataatatgtagacagcagacttgtcataaaaaaaatgtcctgcaggatagtatatcgtttatggctgtataggttcctctttcaaagtttctgcatttttgtatgcatgcaagatttagctaaaacatgttctaaggtttggtgcttctatatttgtcttgtttcagctaaggttcaaacatcaaccaagccaagatcaggcgcgtgctgcaaaagtgcatgttcgtaagtgttgcggtgtgttgttgggatggcttaagtattatgctcgaattcaagccataatggatcactgtcgtaaggttgaaggagtgcagatctgtgacaagagagcagggctaagatacctctccaaggaagaatacttggcacagcaacctgagtggtgtgatcaaatggcttgggatgcaatggctactgtttgggttgatcctgaatggatcgaaaaatctaaaacaaaccgagccaaccgcaagacccctaaatttaagcctcatagaggaggatccaactctattgctacagtacgacaaaaactggtaacttttaaacttttattcatgttatgatggtgggttttttatgcattaaacactgataccttgattatgaagtccaaaaaatttgggagagaagtatctgcaattgaggcatgggttcatacacacaggggatcaaatcctgaagatactaacacactgaacacagaagaagccactttatgcttggtaattttctgaaattttcaatagtttccacatttacagtctaatattttaaaaactgatggttacctggacaggagcgatataaaaccaaggcaacggagttgaatggtccaaactttgattggatgaactcccctgttgactcaagggccttatatgaatgttcttgcggtagaccacatggaaaatgggaaacatttaatgggatggttgatgatagcgaggctatggctaagatcaagagaagatctacatcttcaacagctaacaagcgtcgacgacaagaagaagatgaccatgaaagagcaaggctgatcaaggatgctcgtatagcaaaggaatatgcacaacgagtgctggagtggagtagtggccaagacagctacaacaacactataaaacttattcttgaggtgcaatctgtcatatacctattatttttattagcataattctaaagcattagtttttaattttgtgtgctaaatatttgaattgtagagtgttatccagcatactggaatgcctctacctgttgcaattccacatccaccgccgccgccgccaccacctacatacggagtttatcattctgcagatcaatctacggtgaatgtatgtggtcatgtttctattaatattgcagatgtgtcctagagatagattttttttaccttgcaatatccagcaatttcaatgtcattttagtggcgtttactatacatatgcaaccattcaagtgtagcagtgtcatatttatcaatctatctatctatctatctattatatactaaaagtccattaaacttcctataaacgctcccaagccgccatgtggcgctctaataaatacgagaaatccaaaaaattataagaaaaaaagcaaaacatccgacctttaatttttacttaagatggtggaccattattcttcaccattagatcttaccttaaaaaaaatatcctaaaacccaatccataatctcctcccacccctaacccaccacctctcaggtggctctcaagtacgtacgagacctcctctcccctgacgtacgtacgtacatacgtctcttcctctcctgtacttccttttgtcttgccattttccattcaatctaccaattttctacctagcaaaattcaatatgtaaataaaagtaaattctctaaatgattataatttttacattatattttatttatctacattggccatgtttggatatacaagaatatatcttttggaaaaaaatcctatcttttacatgaaaaataaaaagtaattaaatattaaattaataacatatatatgatcttcgctcctctctccttgctcactttctcctccctattttgtagctagcaactcattatataaataaaaagagtaaatttcataatactatatctatctatctatctatctatcatatactctttccgtcccagaatataggatgggtctcatcctatcttaggttgttacattctaggacagaggcagtactaaaagtctattaaactttctacaaatgctcctaagccacaacatggcgctctaataaattagaaaaatccaagaaattctgagagaaaagcaaaacatccgagatgaaccaccacacctaagacagctaaggtgatttaccaaggtcatcacgagtgtcgcagcaatactgatttgccaaggtgaagatgaatcaaatcatcagtgtataatgtttgttttgttaataacacttcaattttaatttgaatttaatttattaaacatgatttcttaacaaaataagtctactttgtttctcgataactggatggataattactcatagggatgaattaaatattttgttgtataaaactaacaaatagcttataaaaattatcaaagaatatcgttgaaaaacaatcgtagagaaatacttttttgaaatttgaagcgtagcatatactgtctggttaatattccaatcttataaatttcttgaacacagcttacgatacatgcccgcgtatacgcgcgggctacctttctagttgatactaatagtgtaatgtctcagtggtctttatgctcatcgtctagtttattctatacttgctactgcaaatcaatgttttgttcaataccatttgttacaattacatgaaaaccattaaattttatccattgtgctttcaaatttctgtgttggataggctcgtagcagtggctcagttgttggagctggagaagacactggtagagaaaccatctttggtcggtcgacccatatccacaatagtcccggttccattaaaaaccgggactaaaaatgatttttagtcccggttaataagaggaagatctttagtcccggttgttgttaccaaccgggactaaagatcttcctcttattaaccgggactaaaaatcatttttagtcccggtttttaatggaaccgggactattgtggatatgggtcgaccg

SEQ ID NO: 6751 - DNA, 1149 bp, Oryza sativa
ggtggagcatataagtcatactcataggtctttagtaagcttcctagaagattcacccaaaatctccatagactgcgaccaacagtcaagcctacaatggtgagttctttcaagaatgctctgcaggacagcatcttcgttaattaaagccaacagaactcattaaggcatagccaacctgccttgcagctcacgacagtacatgcatcttcacttagagagggtataaattggtactctcctctagtttactaatggtttgttcttcccagattctaattcacgggatctccgatcacatagattgggttaccaccatagtaaaactcacatgggtctcaaacccatctccttcgatgcattgtctatcacatttcgtgatagtcccttcgtgaagggatccgccaggtttctagctgtttggatgtaatccaacgttataactccggagtttctcaatttcctgacagacttcaatcgtcttttcacatgtctagacgatttcatattatccttagaactattcactttgacaattaccgtttgattgtcacagttcataaggatagccggcaccggtttttcaacaataggcagatccattaatagatcacgcagccattctgcctcaacagtagcagtatccagtgctgtcaactctgcttccatggttgacctcgtcaaaatggtctgtttgcaagacctccacgaaacagcaccaccacccagtgtgaagacatatccactagtggctttgatctcatccacatcagagatccagttagaatcactatatccctcgagtaccacaggatacccagaatagtgaagccacaattccatactacctttcagatagcgcattactcgctcaagcgcacgctagtgatcatctctcggattagaggtaaaccggctcaacttgctcacagcaaaggagatatcaggcctagctgcactagccaggtacatcagcgagccaatgatttgggagtattccagttaattcctagcaattctattgttcttgcgaagcaacaagctagaatcataaagttttagagaaggcttactatcaatgtagccaaagcgattcaagatcttctccacataatgggactgcaagagtgtaatcacattcaaacatgg

SEQ ID NO: 6752 - DNA, 1007 bp, Oryza sativa
tgttgtgatgtctccttatcatccatcacaaattttccaagccttccttccaataattcaatcttggcctcacgaacggcgggagatccctcatgagccaattgcaaattatcccacatctccttggccttctcaagtccatcaaccttgttgaactcatccgaactcaaggcggagagaattgcattggaagcttgggcattgcggtggatgagtcgctcttgctccgaagtgagctccatgtcatcatggggtatatcaatacctgtacaaacaactttccaaatacttggatgcaaagagattaaatgcaacttcatcttgtgcttccaagcggcatagtatgtcccatcaaattgaggagcacgcccggaaggcacggagacaaagttgtgagagggaatggtaagtttgctgtaatcaaaaggtatagtagctcccttgtgtggtggagttcccttgctgcttgcttcatcttcatttctattttccccgttctttccccctaagtcttcatcttcaaagcggtgaagcttgaatcaagagcactaggctctgataccaattgaacgtgcagagatgtagcctagaggggggggtgaataggctttcctgaaattttctcaacaatcgcagcggttaaattgacagggcccggaacctcctggtgatgaacaccggaacttccgggcaggatgagtagcctagaacttccggagttcttgagccagtaacttccggacagcagggataaattgaaatctgagaagaaaaacgggtcctaggtagaaagatcaggcgcacagatgcacaagatgaagatcacagaatatcagcagattcaaacaaagaacatgcacaagagagacaaagaagattttttcccgaagttcggatcacacagatcctactctccgttgaggtgctccaaagagccgggtctcgattaaccccttgccttacttatgcaaagatctcagaagaggtccacagccttcaactcaaca

SEQ ID NO: 6753 - DNA, 644 bp, Oryza sativa
actcctaagtgaatttagaagcatatgcatctcctaatgcagattactggaaggtggctgtccgtagtgaaatggattcgattatcgctaacgggacttgggaggtgacagagcgaccctatgggtgtaaatctgtggggtgcaagtgggtgttcaagaagaagtttaggcctgacggtactattgaaaagtacaaggcttggcttgttactatgggctatactcagaaagaaggcgaagatttctttgaaacttactcacctattgttagattgaccacaattcgtgtgctactttccctagcagcctcacatggtcttctcgttcatcagatggacgttaagataacttttcttaatggagagctggacgaggagatctatatggatcaacctgatgggtttgtagttgaaggtcaagaaggcaaagtgtgcaaattgttgaagtctttgtatggtctgaaacaagctcctaagcaatggcatgagaaatttgacaaaacattgacatctgcaggctttgcagtcaatgaggcagataaatgtgtgtactatcgccatggtgggggtgagggagttattctgtgtttgtatgttgatgacatactgatatttgggacaaaccttgaggtgataaacgaggtt

SEQ ID NO: 6754 - DNA, 552 bp, Oryza sativa
gcatatgcttctgaaattgacttatgagtgtcatccacaaggtacacagtgaaatcatcaccaaaggacttagccgtcctttgtctcttactccttcgaggagcttcactgacatcctcctcagtgacatgttcatgtgtatgtttagtttgttctggtggtgtgattgaactgggaattacttcagagggttggctcgaactactatgtgtatccttcattgggaaaaagctctcaaagaaggtagcatcacgagactccataattgtaccaacatgcatgtcaagcacctcagatttaactattaaaaatctataggcaatgctgtgatgagcatatcctagaaagacacagtccacagtcttaggtcccagtttgcgcttcttccttattggtacattgactttcgccaagcacccccatgtgcgcaaataagaaagtgatggttttctcccaatccatatctcatatggtgttttgtccttatttctgttaggaactctgtttaacacatgattcgaggtcaacaatgcctccccccaccatgcctta

SEQ ID NO: 6755 - DNA, 725 bp, Oryza sativa
ggctcgggttttctggtggaagtcctgtgtctaagcgcgtgatggtaaatgggaaagaatgcttgatgtttgtgagagaaggtaaagcaccacaagaaagtgaggtgactagtcttgtgaactgccagggacccggaacatccggacagaccgggagaaacctccgggtgggaatctctgtctctcaaaaattcccactaggaagttccggccgttttgccaggaagttccgggccaatggccatgcacaagacatgaccggaagttccgggcacaaagccaggaggttccggccagagggtctttactatgattcatatgtaatttccaaaaattcagagggcaaagtggttgcctattttaatggaaattacaatgatgagtaccgcacttgtgtgtgggtgccaaaggctttggtaactaacatcaagggacccaaacttagacaagtttgggttcctaaatcccaagcttgattttcttgtgtaggcatactcctccggtggttcaagttgggttgtggacagtggttgcactaatcatatgactggagagagaagtatgtttacaagtcttgatgaggagagcggaactcgtgagaatattgtgtttggagatgatggtaaaggaaaggtaattggtctaggtaaaattgccatctccaatgatcaatctctctctaatgtttttcttgtcaattcattaagctacaatttattacctgt

SEQ ID NO: 6756 - DNA, 4126 bp, Oryza sativa
ctgcacccccggtcgaatggcgaacagcggccgccgctcgccgcgccctccgtcttgacgacgcggagccggtggtagcagtaccagaggccttggtggcggaggaccgcccaccagcatctaggcgctgccgcgccgtcatgaccaaaatggccacgtcgtccagccaacgttgggctggagactccgggtcagggacgacgggcgggtgacgcaggagcgcgcccgcagcttggagcgcgccctggggcgtgctgccgtcgccgtagacgaggaggcgacgctccccatctcggcgcccttctccatcacccgtggatgtcgaagtcgcggatccttcgaccctctcgagcgcctcctcccgcctaggactttggcgtggagggggcggtggagtacgagctcgacggcgtgggttcggctccccgtcgtcaccgctcacactcggagagaggttgtgcgcctttgcttgttcggccattgggctgaacaggaaaagcttggcgcacacgaaagaatgcgagagcttagaaaaacacacgcagagccccctacctggcgcgccagatgacggagcgtggggctcctcaccgggagaccgcacaggcccccctttgccggttcgaccggggaccctgggtgagattctaagctcctagtctgtggaaggttcgcgagaatggaagaagcacaagacacgggcgatgtatacaggttcgggccgctgagaagcgtaataccctactcctgtgttctggtggatctgtgtatgaagaagctacaaagagctggagagtcagagagcttttactctagaaaccctctcctctggttctcaatccagcctccatcgttctggatcccttctctaagtgggcaaggtcctccttttatacctcaaggggataccacatgcaccatctctctcttttgtgtggggacttatcctatcttccccccaacttgacttgccttctcttcataaatggacggagatttgtatggttgccgtccgaatgaccttctgatgggacggcccatacctacctccacttccgccggaagcaggcgcgacgtgggaacatggctgtctgctgacgacatgaccagtgtcagaccggtcacaaatcggtcattcttgtccaccacgtgtcagtttagcaatctgcacgttcgcccttcttcatgcgatatcttgcttgtaatggttaggatgaagcctggcatatatctgaccgggaccaacgtgccatctccaggaggtaacacgccggctccggctagggacgagtgcttagagactctcatcctgacgggatggggcgaggcgtgtgtcagaccgcctgtcgccacctaacccacgatctgatcggtctgtgactggtcacagaccggataaacgagcgcgctgcactgcgttacatgcggcgtgacgcgctcgtccaaaccgcaataaatgcggttaggtgagccctgctgcgctcacctaacccatacacgcggcgcaaaatctacaaggggtcggggcgcctcagccctcggggccgaaacgggagcggtccgacccctcgggaagacaaagaggggggcggccacatcaccctcgggcccgacccccccgagggggtcaggcctcgtgggtgattgctcctgcccaagcctctagtcatgatactcccagtcccatgtcaccgacagatagatagcccaatatgcaattcactctttaaattgtaaaacttaattttaagattatactaaaatttatgtagcttttttttaatattggcttttaagttgctaataacacatatataaaagttttacaaataaattattttctgatcactaataggatacttatggcttataataagcttttgagcaaccgatgaaactcacctttttctttttaatggtgcagccattgcacacatttcatataaagaactctcatttttagagaaaaaaaatgggactaaaacttacaatgcgtaattaattagagaaaactagacgaaaatcatatctaccacagaggcacagacacatcattaagtagtcatcaactaacttaaagttatgttttatagtttggaaaacatacacgtggaaaccgagaaatatgaatcgggaaaatatggtaaagaacacagccttagtcacagtttcgggctgtgcagacagaaaaagggacgcaacgcagtgatgctgctgtaatcttttgttttccttttgttttgaactaggaaagctaggcttcccccatttcttttattaaaaaaaaattaagtaattattaattcttttccttcatttgattcattgtgaaatatacttatatgtatacatatagttttacatatttcacaaaagtttttaaataaaacgaacggtcaaatatatgctaaaaagtaaacgatgtcaaatatttagaaacggatgaagtatcagatatgacaatgtgtgcttacagaaatgtcccccatttccaatacgaaacgaaaccttgtgcggcgccgcgctccgatccgtgcggccattgaaggcgagcgaagcaagcagccaaaacccacgccggggacctcgcccctcaactgactaccatggtgtcccgacctccagctaagccccagcaccagaatgcgatgcgaattagagcaaggtcaatagtatagccaactaccggctacaaaaatatctatagccaatctaatagtccatttatacaatagttaactgtaaaaatatactacactattaatatccggtcacatctcttatacacacataacatattggagtccgtgttgcagccggctacaaatctgtagcgtgctttcttctctctcttctcttttcttctcgatgtatggttatagccggcttatagcctgctattgtacctgcccttacacaaaatccaatcctatcctgcatgctctgctgcttgctacggcgtcgccgtcgcgggctctgctccaacaaccaatcgctagctgcatccgcatccgcatcggcatccacatagcatatgcataatgcatttgcaattttgcatgcgatgacctgtaactccagatgcgatgaacagatcagggccttggtccctgcactgcacctctgcttcgcgtattgatttcagatatatgtagatggacagtcagagaaccaacacatgtgcgcttctttggccgcatgccgaccgctaaccccaccgcaatccaatggaatagtctccatggatgcatgcattgttttcgagtatgtttaattattatatcgtcggtcattccgcgttgattcgatcagtctttgacagtctaacgaatgtcagactgatctgcaaacaaaggacaaatttttagggtaaattaatttactcactgaattcagggacatggagaaagagacaacagctaatccagtataagaaagatggggcacagatcacgcacactacagttcacacggttattattctgatcggcccaaccgatccatgattgtcatggagacatggacccggcagtgtacagacgagcagttctcataattccattccttctccggatcgatattaataagaagaaaaaaaaagattctgacagccaaaagggcgatgctgttcaggatctatgccatgttcttagcagtttgtccaaaagcttcacgtggctctcttcttaattcttattcagctcgccacactgttgactgaaaaattggagcaggcactgcagggtggttgtctgaatttgatctttgtatctgtttaggtagtagccatggatgacaaattgttcgttgtgatatggtttgagattttgtgaaatttttggtgaattttcagtgatcggttaggagggaggaggaatggggaaggcggggagatggctgaggagcttcttggccggcggcaagaagggtggcaagaagggcgaggcaatggcggcggctttgcccggagaggcggcgaaggagaagcggtggagcttcaggcgaccggtgcacggcgagaaggcggcggcggaggcggcggcggcggcggacggcgtggtggtgggcgaggccgaggcggggtttgatctgtccgcgtcggagtcggagttcgaccagaagagac

SEQ ID NO: 6757 - DNA, 6924 bp, Oryza sativa
ggcgcggcgcggcggcgagtacggccaccacgggcggtggtcgccggcgccgtcggcgatgacggaggtgatgagcccgagggcgtacagcggccacttcgaggacatggcgttcgccgcgacggcgcacagcagcccgcatcacgcgtcggcgtcgtcggagctgctgtgctgcccgagctacatggccaacacggagtcgtcccgcgccaaggcgcggtcccagagcgcgccgaggcagcgcaccgacgcgctggagcggcagccgagccgccggaagagcggcggcggcggcggcggcgccaagatgcagcggtcgtcgtcgtcgcacgccgcggcggcccagcgcggcgcgcagttcccatggccggtgatcaagctggacacgtcgagcgcgtcgctcaaggacagcgagtgcgggtcgacgagctccgttctcaccgccgccaccgtctacagccggacgcggtcgctagtcggattcgaggtgagttacgacttccgagacatcgtccatgtttttttctaacgaagatgaaaataaagttaatgtatgtaaaataaaaagttattaggatatgatttattgagctttaactattacaaacttaaaaaatagatttatttaatatatttaagcaacttatatatataatttttttaaaaaaaacgtagagtatgaaaatagaggtaaattctactactctgtctaaaaaaataaactctagctatgaatatagacatgtatgtgtttagattcgtagctaggattgattttttttttctttggaccgagggggtatatcttagtgtgaaaaacataaggaaaaaattattcactcgcacttgttctttgcatgatccaggtgcgcaggggtttgtactgagctacaagaataaaaaatgccattgccggacgaaccgggagcttcgccaatcgccatggattgaatgttcgtcagtttgctcgacgtgtgatggattcaggatcatgaactgtacattctgtgtaggttattctgtgttgtggtgactgtaacataccaggaatacatactgctaagtgaaagcgaaatgtaataagcaatccactgcaatttcttccaaattccagtgtttgttccaatttcttccaagttttttgtgggcctactcgaggttactgggctgtacttgcacacatcccacgagaaaataggccgaaaagaaagcccatatacctgttcatgggctaactgggccggcagctcatctaccaatcagaagaagggccatcgttcttaacttctcgtagagcacaccacacgctttttcgccgaataagcgaaacgacatatttgcaaaggaatagtaatttgtgaataaaatttttatatatgtgttcttagtgatctaaaagtaaatgctgaaaaataaactttcataaaaatatctcaaaatgagctttaaattgaagattaaaaatttaaattttggctaataaatataagtataaacgaaaagatgagacctcatctcactctcatcagccatcatacaggtttcatggcctggttgcttcctacagatggcgaaacaaccgaagccgttgtgttgctttcgatggcggaatcatggctcagagacgcgcttagcatggccaaatttgacatcaactgatgaggaattgaggataagcgtcgtgaatggctgaaatcgacaggtattcgggttgtttcttcagcatcacaacatgtcaggcagggacacgacgcacttgtccagaaattttttattttcttcctgggtcggcgaagaagatcgaccaaatttcgttaagattaggcttgtacagacatcttattgctcgtgatctggtttgctgacgaagcaaaaggaataagcccttttttgatggacacgagggtaagagaagaaaatggtcggtttgtgagatcgaactgtcaaagaagtcacattcaggttgaaggataactgatcaattttttgaaagaacatacatcatcctcgatcctaaaatatatgactttgttgtcttttcgcataatatttaattattcatcttattaaaaaatatataatttaattttattaaaaaaatatcatttattttgttgtgtttttatcatcaaataaattataatcttaatttatatttttatatatttatactattttttaaaaaaaatataaatagtcaaacattatacgaagagtgtacgacatctgaagtatataaaaagtttgaaaaaaagagatggcgtgttctaccagtttgatgagtccatacatctgtgagagatgcaatgaatgaaagacgagggtaataatttctggtcacaatcgtctcatctccccaactaatcaagtaaccattcgctttaaaagctagtagtagagcatccacacttgtacaaattctcaggtagaaacatgaagagaaaaatttggaggggtaaaacaaaaggtgacaaagtttgattaatgaaaaacctgaaagctaatctgcaaagttggcaaccgatgccattttcttctacgaacttaaaatccaaagattcttccgcttcccaaacattgccagattgcctaaggccgagtttagttccaaactttttctttaattttttaactttttcatcacatcaacactttcctacacacgtaaacttccaacttttccatcacatcgtttcaatttcaactaaacttctaattttagcgtgaacaaaacccaccataaccgtacaaattatcaggtactgtgtctcctgccagaagaaaattggactggtaaaacaaagagtgacaaagtttgattaatgtaaaacctgaaagtctgcaaagttaaaagatgatgtcatttcgttactactccctttgtcctaggacaatgtaattgaacatgaggcttgtccagatacattcttctaggatggatatttgctatattccgagacgaaggtaatacctctattttattttaagtgcagttgtggtttccatatccaacgtttgattgtccgtttcatcatctaataacaataaaaatgctaaccataaaaatttttaaataaaatagacgatctaatgttggatataaagaatacaaaactattatctttctatgatctttctgagacggaggtagtagaattaaaaaaaaaaatcatccctttccaaacattgccagactgcctaactgtacagtcacggcgccatctcggacggatcacgcatttgactttgccttttttttcgacttcttgctgccgagtcaattccgggaaggcctccataaaaactccatctcgatcgtctcatctcatcgtctaccaacaactaaccgccatctctctcctcgcttttaaactcccgcgaaacaaccgctcgctcacacacacacacccagagaagcgagacaatctgctgctgctagtggcggacagagtccaagaaggaatccaagaatcgagagaaatcgagatgctcgcggcgaggacacgattcgccggcggcggcggcgcggcggtcgtgctgctgctaatcgtcgcgtcgacggtggccaccagggcggccgtcgccgacgatttcttctcccctctcagcccgctcctcgcccctgtaatcggtaaaggcaccttctcaaaggggatgatttctttttcttcttcttgttacaaatttgatggtttcttgatgatttggttggatggatggatgggacgggagcagggtcgatgtgcaagacggtggcgtgcgggaaggggaactgcacggcggcgtcggggttcccggggtacaggtgcgagtgcgagcctgggtggaagcagatgcacgtcggcgaccaggccagcttcctgccctgcgtcatccccaactgtaaggcttccgcagctcgcctctgccctttgctgctctcacaatctcacatgctctggctttctgcggttcttgttgtgtcatcaatgtccagctgaaatacggctgttcctgtgtccgtgcataactgcataccaacctaacttttgatcacaacgaattgatgtaggatgttggcatgtttgtatctgcaatttgggtacggttgttaggcatgatcattagttttctaatgataaattatagtgcgtgaaagggtatgtagcctagtggttgcagtgacctgagtagcaccctaagatcctgagttcaaatctccatataagcgaatttcagcctgttcaataggctaagttcctactttaaagatattgcatatatctagttggatgtagaggccggctaaaaattacccttctaaaaaaaataaaaattacccttctctaaaaaaataaaaaaaattgatagtgcgtttatggccaatttgcactgggagtgtgcgcgtgcactgtagttagtgggttgaagcaatctgcagaacagtaaaattcttaccaatagttggattcagaatgaaatgaacatccgaatgttttttttttcaagtcgtttcagcttgtaagttgtactgacatgccaatttctgaacataaaacaagtggcatctgcggtatgctgcttttgatgcttcaagcaactaaagcagattggcagcaatacggttgtttgtagtcgtgtcctgaatgtgcttttccaagcaaataatgtatttgaagtctagatgcacaaaaactttaatggaccaatcagatgcagatggaatgaattccaatttcttaagtctgtttgccgtcccggcatggcgaaaaaagtctgtttgctgtctcttttactaagacaaccagttaccataatttcaacatgcgtctccatcagacaggaaaaggctagattacttaaaaatgctcacgcctttgtgtcatcttcagagactattttttgaaccagcagcgtcatcttaagagttcctatttgttcctacattagaagacattcaagcgattattaaacatcatgtttactaatgttatgtggcccatatcagcttacatactcaaatgttatttttccttgcaggttccattgaccgtgcatgttctaacactatagcaccagcacctgcgcctttaccatcacccaaaaatttctccctcccaacagaccgtaactactgcaactggctgttatttagattttccttttaaaaagacttcctcagaactttttgataaaaataccatttccatttcatctgtgatctgatcatcaattcaccattgactgtataattgtgtatgcatagcctgtcaattagcttactgcggttcgggaggcacatgcaagaatgggacaggcctcagctaccactgcgagtgcagtgagggtttcagtaaccttctgaacatcaccacaatgccatgttttcagaattgtaagatcaaaggactcaagccacttgtccatgattgtgcaccgtattccctagctaactagtgtcaaaaatgtcattgtttaaggttcaatcggtgcggattgcgcaagcatagggctctctccatcctcaaactcttccagttctcctgcaccaccgggatctgctggcatatctaacaatggtaatgcacctgcatatggtataacttttttttttccagatgtgttctataggacatgttctctatttgcttcatgggattatttagaaaaagtataccatttctattaactttgttcgaactttgcaggggcgatttcacataaaattctacttcccttgctgattttgggctcactgatggtctgtcaggctatatagatagagaatggagcatacgtagtacatttgagctagattgtttctgccacggacaggatagagcagttagcctgttagagatgtacaccttttgggatgtttgaagtgttgtccagtgtccacgttatggttcttttattctgtgtgagatttgatcacattcatgtgaattaaaatggaataaactgtctctgtgaataactgaataaagggatgtttatatgggcattactttgcttgaaatgatctaggactacaaaagcaatatgatatgtttttatggtgcttatacattacaaaaggagaatattttctccagtagaaatttgtaataaaatcgttgcaagcctagctgattctttcttgcttggattccgcaatttaaaatgaaatctgtaaggagtactacaattcaggcaagttcttgtatcaattcggccagggaataagttcactttaactccctgaactaatgaccgaatctaattcatatccttgaaccgtaataccggatatatcgacccccaaactattaaaaccggtgtaatttgactctctttacggttttggagggtggttttattgacgtggcagtgttgacccggtctattttttgacgtggtgcttaggtggtattagaattaaaaaatatatataggtccattcgtcattagaaaaattagggacccacctacatgtgggtcatcccctccctatccttctcctccctctctctcccgtttgtcttcctctcactttgctcgtcttcagggggcaggatctggagcgacggcggcggtgagggtcggagcggcagcggcgatggcggcacggcgtcgaactcctcctgtacggcagcatcctcatcggccggtgctgctactcatccggggttcatgtatggccgcatccccatcgccctcgctcgccagatcagggagcggtacacccggcctggcgccattgccgagcaggccggtcatcggtgcgcacgaatgcacgatgtactcgtttgtggcagagcggatcaccatggctcagttcttggcggagccgtgtcttgatgaccggagacaagccggcaagcacatggacgctcgtcgtcacgggtcgccacagcgagagatcccccatgtacacgctgtatgtatatatacaaggacatc

SEQ ID NO: 6758 - DNA, 16424 bp, Oryza sativa
  unsure (1)..(16424): unsure at all n locations
tatacaaggacatcgacacgtatatcttagtagtatcaacgcagatcaatcgatcacaagaataagctagctaccggtggtgctgctcgtggtggtggtggtggtggtatctttgtcggcgccaccaccggcggccgtgtccagtgcgccgctcatggtgtgggtgtggacacggaccggatggtggcgtattgcgggtcgtactgcatgcagggccaggagctgggagcgcgcaccgcggcaggtgtcagtggagcccgacgatctggaggagttcgacgccgtgcagccgcagccgctccggccctcgcccctccgccgccgctccgaccctcaccgccaacgccgctccagatcctgtcccttagagctgagacggcgaagtttctcggaaggaagagaaacagagagaaggatagggaaggaggagctgtgggtcccacatatcggtgggcctcacaaatatgtttttgtgtgaacgactaatagggcccacatatatgtttttaattctaatgccacctaagcgccacgtcaacaccatagactaggggcctatttggtacagcttcaactcctaaatataactccaggagttgagtctggagtggagttgtggagctgtctaaacccagcttcacaactctattacattttgtgatagagttccactcaactccactcccagttttgatgaagctgaaactgtttagctggagctagagctgtgccaaacaggccctaggtcaacaaaaccaccctccaaaaccatcaagggagtcaaattacaccggttttaatagtttgggggtcgatatatccggtattgcggttcaaggatacgaatcagattcactcactagttgagggagtcaaagtgaacttattccattcagccagtattgatactgggccaatatgtacaatgggccggtaacctactcaccgtcagcctatatagcttcttgctcgttggcccattggtctagctatattgcatcagtacattgttcaatttttttttcattttttttcatttttgttactggtcagcagaaggttcctagtagtagtggaatggagtagtaatatgagttgtgaactccaagtccaagatagttctacagagcatgaaaacattgaatgactgactgaaacttcacttgggagacgatgaatttcgtgcactagcgtgacaagtttgatgaggaactcggagaaaacaacaagcatggaaaagttgcagattctgaagatgatgcggtggcaagtagaataataaaattatgtgtatagagaatcataaaatggaccggacatcagagtccataacaaccgccgctgcaggcaatattcagctccgggagcaccaaattatgggggctctcagagacatgtttcgttgtctcccctgctctgattttttttgttcgcaattatggggtcacgtggcaagcttccatcttttcagaaaatggaatagtagttaaaacaggagtaaacaaaacatatatagaatcaagaatttagaaatagtagttaacacagtagtaaacaaagtatatgttgtcatatgttggaaccgaaatagtcatagttagagatgatttacaatagtttctaccagtagtagaacccataaatctatgattaaggccacatctaatgataataatattagtcataaaatacttacggcagagaccatcgtagagttactcaacagtttaacataggagtaaacgtggtactagtaattaacaataacagcatgctgtcaatgtttatcaccagtatctccaatggttgcttgcatcgatcctctagggaaggttaaaatcggattgggatcacatgcagtcatagtagagactgcaagtttagcagttggaatcatttttcatcatcggatcatggcaatcaacggctgaaacaaatgctacaggtgtattaaacagtatttgctacagtacatgctacaggaacgcactttgtatggtcctttgtgaacagtatttcggaaagatctggggcgttaatttataatccaatggtgtcggtaggactgcttaagttgcagtggctcccaatccgttaaaatcaagcagggaaattgaggtagtgtttcataccgacgaagataataaagattaagttggtgcaagtaaaacaagcaagccattagttttacggagtacaactggcaactgaaacaaaagagttgttgagtcgttcagcgaatcgctcgtccttgtctcatagccacagaaattctattgtatccacacaagtgctatttactccattttctagtgtctccgtttttttctcttcctgatagtctgatacagtagatgatatacctgttcatcacttgtttctgcagagaggcgagtaaaaagggctccttgctgtaacaacaagcaacctcactcccaagaatactgttaaaaaacaaacagatgtgaatctttcacagggaagcaggtgaacggtgcaaagacatgcgtgcccttttcgttttgagaaaaaatagggagagaaagaaaccttcttccaacatttttcgctgttcatctgaaaacacatcttttggctattcaagcaaagccaaaaataaaaaagaagaagaagaaaagaaagaaatgcggaggggccttgaataataattgcaccctgataaattggagcatcgccacattactccatagccttttggtgtcgtgagctcaatccttttttagggttcttgtacctcctctggccaccgtcatagtaggctttaaaaaatgttcagggacagggctcgttgtcaatcactgacaagagctagtattcccaggaaataatcacacaacagctgtaaccagaaaattactggaacaaaaaataaacaagaccgcgtaggtgtagtatcgagaaaaaggataatatgccatttcattcattcggtgagtttcgacgaaataccacccaatacgatgcaaagaataaaatgccactccatagattatctttaggatattttgtcactttaagaggtttcaagaccaaaataccctggagagagaggaagagaagagaaggggagggggggcgaacgttgaaggtggcggcatccgtgctcatcgcctatgagcggtaagcgagcgcgggcagcgccggaggcagcgagcggtgcgcacacatgggcagcgcatgaggcggagagcgcacgcgggcggcgtcggaggcgagcgcatgcacgttggggagccctccacgtcgtcgtcgtcgcctcctccctcctatcagtgctgccctcttccctcatcgccgccgccgtcctccctgatcagcaccgtcgtcttcctgcccatcgcagtcgtcgtcttcctccctcgttgtctccaccgtctcccccccccaccatcaccacggtccgcccgtcgcaggctgcccccatgcactcgccgcccatcgccgccgagcatgagccccatccggctcaacctccccctctctttcctcttcctctctatccacagccataggtattttggtcttaaaatcccccaaagtggcaaagtatcctaaaagtaacctattaagtggcattttatcctttacaatacatgtattgggtggcatttcgtcgaaaccccccaatggagtggcatatcgtcctttttctcgtgtagtatgccctatctgctgagaaaataatggattatctgtttttttatactagctatgtgaggatataaacaaataaattaactactataaaattttaaaaaaagtttttggcaaaaatcttatatagataaaaacttccgtacgttaaacttataatttgatagcttgggaactgtgcaaacagtaatctactcgctccgttctaaaataaatttattttccatatatctcacacataataatcagaaccaaaaactaaaatatcattgctttattaaattccaatgtaattactgcctatcttatctactcccagtacatttatccattatactcataaactccgaagcaatgagtatttgaaatgaacttattttaagataaaaacttattttaagataaactaataaaagctaaaaataagcttattctaagatagagtgcgtaaaaataaacctatttccaaccccgaagattcagttcaaatttgaagtgtcctaaatccccagcgtaatgttcagagagaggaaagaatccatttcttgcaattaaaaggtggctcctctcctcatcttgcgtgcctgaatgacacgaaatgctgccttcttctgcgaaagattataatgaaacgatgattgaactactctaccaatacataggcctgcagataaagcccagctaaatgcaaaagaaaatgagcattctgaacataaaaggacacgaaatggggaatgccgaaatattcaggcttccctctctagggaacttatgatgatttgacgtgagtaaagcagcagcagtaacataaattagtgccaccagcagaggcagcagtgccaggagtgctcctatatcagtaggtcgctgttcattgacatttgtatacaaatcgcagagatatgcttgtttttatctttcttgtttcttgttcctgaaagaaagctgagctgcaatcctgttgctctacaaccccctcctctcttatccaagctactgtttgttttctgatcttttggggttaggtctagctcctttctgtggatttctgcgctctcatatactcctacagttcatctctgctgcccaacacatgctctatgctgtgtcttgtagttgaagttcgtgtgtgatcaaaaagtttaagttagtgcttttttttgaaactttattttaagtcagtactaatgtgacaatgaaattgttactaatgtgacaatgaaattgttgtgtgaaatactgtagtactgaaatgtgcatgcacgggtgcactagcctcaagaacactaacacgcatcagagctgaagatagaagtaggagaggtttttcattgttcatctacctaaagatgtttgaatagcaagaattgaacagagcaagacgatgatgtgcagctacgagcaattacaaagttcatggcaaagatggaacaaattagtagggaaaccactccccaaaaaaacgcaagggaagaacaaacaacagagaaaaaaaaaacaaatgaaaggagaggaggaggagaaacaaaatggcagcattaacatctctcgccctcgtccgctccctctttttgtacacaacaaacaagcatctacttacagcagcattacactcgatgttcaatctccaagaactcaacaatgtcgttacacacaccaacccatcgaagcctgcgtgattgatcgatcttcgcagcaatgtccttcttggctgcagtattgtctcttgctccgtgcagcaatggcgacgcagccgggaagagcaagcttgggcagcttagcagcaatggtcatcaatggcggagtggtgaacgagaacgacgcttatgtgcattgcgttggtcgtcccaaattaccgtcagggcatgaagagcttgtcgccgcacttgcagcgccacgcctccgggtagtactcgagcgggaagctccggcctggctggatggccacgtgcaccggccggcatgggtggcagccgccgcaccggctccggcacgtcggcggcgacgaccccggccccaccagcctccgccgccccgccaccgccaccgccgatccccagctggagtagtacacctcctccgccaccgcaccgccgccgtcgccgctcctctttctcgccgaactgcacgcccctgcaaacacgacggccggcacgcgatcgagcgcgtcagaacaagcatggaatgcgaagaaaccaacaccgagttctcgacccataccgagggaagctgcgaggaggaagacgaggaggatgaggagcggcgaggcggcgaccgggactctccgtcggcggccgcggcgcgccgaggccatggccggtacgtagctcgcgagatctcgagacgagcagcttacagctagcgcggcctactgtcccggcagtagtgaggtggtagctagagggagaagagaagtggagaagcaacaagcagcagcagcacgcgtgcgtgcgcggatcagctcagcttcagcttcgcacgagtcatgggtgcctgcggggtgaaagaaagaggagacgacgcagtgagagagcgtgtgtgtcgccaccgtgtcgcagagggtggcgtgcggttggcgaggcggtggatggctggcttttctcgttctcgtcgtcgtggctattctacttggggcgtttctaccatagggctactggcagtctgcgcggtggtggcgggggccgtcgcccgtcggtctcggcctcgcgattcgtgcgggaccggggcctggcactgcgcgcggtggccgtgcgcgcacgcacgcaccgtctgatcgtcgtcgatcgcgtacggccgccgtccgtccgatgctcccctgctgcatgcaagcaccgagagatcggtcaatcgttgtgcagtgcaatgccattgccagctagtacccctccagtagtaaaaaaaaatcatggtgttctgctcgatcgtagtactcctccgtagcaatggagcagacacactattggcggcctggaatcccggatggcatgaagccgcttcgtgttgtgttgggccacgacggcgagctcgtgcgtatcgatagtagtagactcggggacagttcaaaaagtttctaactgctgcagtttcttcaaaaattaaaaactctcttaaatagtctagttttattttaaattctgagacgttgtaattgtagaatttagaaactaaattaaaaaatagattctagaaaacctagttttttcatattttcagaagctagataatcagctctttcttgggattttaagttcccagacaggttagtagtacatcgtagggtgattctccaccgaatactcgtcgttgcaggtttggaacccgtaacgtgacaggccgcgacgatcgatcgattgagcacgcagtttgtgcggtgctctacactacagaagctcgtcgcgtccccagctgctcgaacagtttttgtttgcttggatctgtcaccgagaggcgccatttgatatagggtggctagattcctcctactagctgcaattctgcaaaggccgtcacatcggagacgtcaatccttcatgacctgctcctagtatagctttctctcctcgataatttcatcggttagagagggccaagtacacacttggtaccacatggctctgacaatattgctcttaagcaccgaccgatctgctacagtacttgcttttttgtaaaagatgaaaaagcagaattgaactcactcatggccaccgctagagtagcacgcctccaaaatactcgaccaggctaccatgtcatgcaacatgcatgcattcggcctccgaactttgctttgtgtttagatccaaagtttagatctaaacttcaatcctttcatcacatcaacctgtcatataaacacaacttttcagtcacatcattttcaattttaaccaaaatccaaactttgcgctgaactaaacacagcctttgtattctcctgtaaaaattttcttacggctgctagcatgagggcttgtttagttcacgctaaaattaaaaatttggttgaaattagaacgatgtgacggaaaagttaaaagtttatgtatgtaaaaaagttttgatgtgatggaaaagttaaaagtttgaagaaaaattttgcaactaaacacggccgaaatccgaattcagatttggccgaaatccgaattcagatttcctgacgtggacgtgacagccggatctatcccggaatccaagcagaaattactaacgaaacattaacccgagacgcatgtactactatgatcaaattaagggcacgtttcacagttgaaactgtagaaatgttgcatggatatcgataggagaggaacagaccatcacgtacggcatcaccccgacagaggatcacacgagccccccccaattttnccccaaaaaaaatccaaacggccttgaaacgccttaacaactcgcagtaccatgcactagctattactccatccatatctaaatatttgacgctgttaattttttttaaaacatatttgaccgttcgttttattaaaaaaaataaataattattaattattttcctatcatttgatttattgttaaatatacttatatgtatacatatagttttatatatttcactaaagtttttaataagataaacgatcaaacatgtacttaaaaagttaacggtgtcaaatatttaaaaacggagagaatactactaagggctaaaggaacgatttgtcataagaaaaaaaaattaagtgtgtactaaagccgatgtatgcgggagacttaaaaaggccaggccagataaggtagtctatgtgcacgatagtgcaggaaaggcgaaagctatcaacaaacgagatcatcgatcacatgtcgtacgtgtactcgtgtcgattaattgttccgttgctggtcaaaacgggtctggatcctcctagctagctgatgagaggttgaaggctcagtcatccgatgcgatttgctcccggttttgaacaaaagaagggtcagaccaatgtgacataccaagatcgctgtcccccagtactcccaatcatgttgctagttagcagagaaaacaagcgattaacgtgcattgtgatgttgagagcttaactggtgggaaaattagtacctatcaagctgcgtgtacaacgtaaaagtttatatcaattttgtttcaaactaaaggttttgtttgggatcagcttatcaattagtatgtccagtcgtaaatacttcatttgatatttagggtaatatttagtcaaaattttaaccaccaataacatctgaagtgtttgtttttttaataaaaaaagtacgagtagctaggtatattttcaagaatattattactccctctgtttacaaactaagcacttttgaaatagtgctcagtcatacctttttttaactttgattatcaatagtaaaaagaattaataaagattgaagatttaagaatgatattactagatatattgttaaaacgactatcataatacgtagcaactctttttattttaaatattttccttacttgtatatatgttattagtcgaagtagtgtattggagggaagccaaaagtgcttacgtttgtcgatgaagagagaaccgtagtaacataaacatataaacttattacttctatattttctaaaattattatagtataaattaatggctaaaaaacataaattttactcagtaatatttttctttgcatcaaaattttacaactggatgaaatggcatgaagtatgcctgagtgtggaaaaaaacataagacctattcgatttacatgatttctaaatcacaggaatataaaaaacatagaaatattgtagaaatgcacatgcaaaataaatgattggaacatatgattttttttctacactgagctaaacaaaagatgatagagtggatgtgttttcattcctatggaattagtatattttggaggattggcacagtgttcctacagaaaatttttctttgaatcctacgaaacgaatgcatgaatagtactatttctaaggaactgagatttcctacgaaacaatgcatgaatagtacttatttctaaggaactgagatttcctctaggaatctttcaaaatgaataagggctaagcaaggtgaaacgatcgatagagtagcaccaaacggtatccgtatactgtgcacacaagtggatgccggcaattggatcccatcgggccaagcgatcacatcgaaatgaccaaaagcgaccgagcagctgtggcccgtgcccgtgtcgtgtttggggcgcgcttcctactagtgaaggctcgtctcgtccattattcaagcgagaccacgctagaagtacgcgctacgcagtcacgcacgcatgtgccacgcagaccaaacttggttttcgattacttcctacttcctttgttctattttaagggccgacatgatttttcgtatctgaatttaaattttttaaaaaaatttaaaaatataagtcacgagtaaagtattattcatgttttatcatttcataaaaacaaaaatactaattataaaaaaattgaaataaaacgaacgattaagttggacacgaaaacttatgattatacttaaaatttaaaatgagacggagccacggagggagtatcttcgattttacccatgtcgcctggcgacggccttttgaccgtttgcaatatatcatcaaaactcaattttcttttgatatacagtagtaacgtgtaatccttttggcgttccggggggaaaaagaaaaaggcaccgcgtcgcacgtacgtactcctctcgtctcgtccgtccggtgcacgggggctatgcgtggaatgagcctatctgcctccccgcgcagcatgggatgggagctctagtactaggctcgattggtggaacagtgcccctacgagtcgtaggctacgacccccgatttgactgctccctggggcccccgcgtcccgcgcgcgaggatgcatgcatgcaatcactggtgaacttgcgtgcaaccccaccatgctgcacactcactgtgctgcgagctgccttacttctacttctaccgtgcagtaattaatcgtcacaatctgaatcacaaatgtggattgtggaatcacaaatttgtgcgtttctttggcgatgtaaacgccgtgtttacttccaaaataattcttcaaacttcctaacttttcgatcacatcaaaactttcctacacataaacttttaacttttccgttacatcgttctaatttcaatcaaacatttaactttggggtgaactaaaccagccaaagtaaaagtatttgtcaaggtgtcactcatgtcatgctcttttgggtttttgcataggggcatatgcatctccaacgcctgcaaactctctagcgtacaatccaacacgcagtgatagaccctggctcaggagtagtggcgtagcgtagcgagcggcagtgcagtagtagtacgggaaaggcgcaatggggtatccggttgagggggaaaagggctgtgtgaccgtgtgggtgggggagcaggagagggtgggttggctacacactcccgtgaaaagggaggacggccacacgtgcaaacccacacgggagctctgtctctcgcagccttgacagtactgctccttggaccattccatacattggcagtgtttagttgttttagcgattttttttttacatatacgaagacacatttaaagtattaaacgtagactaataacaaaataaattacatattccgactgtaaactgcgagacgaatctattaaacctaatttatccatcattagcaaatgtttattgtagcaccacattgtcaaatcatggcgtaattaggctcaaaagattcgtctcgcaatttacatgcaaactgtgcaattagttttttttttccacatttaatgctctataaatatgtctaaacatttgatgcgacggaaaagttaaaagtttaaaggtaactaaacacaaccattgttttctaccccatcgccaactactcctattggttgattactgtcgcttgtagtaccatgattgtattcacaccgtagtgtagttgtacacttgtactcctacgtagtactggcgcagtagtacctgtctggctgtctcgagcgttcactgtattgtactccatctattttataacgtaagattttttagcattatccatattcatatatataaaaagttttatattattaaacagagaaaatacttagcatagtattgtattattgtattagcaggggattgataattgattccagtgttcacactggtggagaaaccatctttggtcagtcgaccaaaatccacaatagttccggttccactaaaaacagggactaaaaatcatctttagtcccggttggtggctacagtgggtatatttgatcttaccaaccgggactaaagatcatttttagtcccggttcatatgttgttaggggctgtcaggccctcccgtaatctttagtcccggttggtaacaccaatcgagactaaacatcttaactttagtcccaaccgggactaaagttatgatttttagtcccagttgttaaacaaccggtaaaacaaagcctctatccacgtgcgcatgaaagtctcctattaattccatccttatctcatcctctcccatccagtcatcctctccatcttatctccttctctcctcctttcctcccatccttctcttccttcttctctcaccccatctcctcctcccctcattgttctgaagatattgtagatctgaacaagtgtaaataatatggatgttttgttgtttgattttattcattctatctatgatttaggctttgtcgttgattttattcattcgatccacgagcgaaagctaaagaacaataaaaaaggaaaaatgccaaccggatgaaaggaaaaggaaaaaaacaaaactttttagtcccggttggtaacaacaaccgggaccatattttttagtcctggttggtaactccaaccgggaccatattctttagtcctggttggtaactccaaccgggactaaaaatcgatctttagtcccggttatttaaaccgggactacaaagggttaccaaccggactacaaagcttttctccaccggtatcagtacaaatatgattaatcggcgtgctgggtttcaaactcctgattgatccaacccattgccgcttttgttcacgctaaccccatgctctgcaaagttagaaacggaccagctttacgagttctctcatgagggttctccccatcacggaaacggccatgtgagacaagcatggaagaaactgagtgccaaccatccactgcatgctcgcgttgcagcgcatcaacccatcgcccagctcgtaaaggggaacgaagctcgcatgagcaggagctaagcagcggccaccggcgatgtatagaccggtcaaacgtttcccctcttctcgagtggcccccaccggtcggtcggagagcaaagtgacacgtggcgacacacaattgggccaacggcgtcgtgaacctctcgctgaccggcttcgtggctggccgtattgaccgggccgagcgtgcggtcgcggatgggggcccaaccggccccgcgtggtggggccggggggagggaatcgtatccccgacacgtgggcccgtcatgtggtcgtttccgtcacctcggcatggggtgcacgagggggtgcacgcctgctgctgctgctccgtccaatggatgatgaatgaatggccgcgtaaattcaccgtcccttttctcccagtccccacacgctgacacgcgcacgtacgcgcggtgacagacatgtggtccctgcgtgtcagagtcctgaccctcactcacgtactgtacttgccagatcgtgtactacgggctacgtattgccagatcgtgtcagagtagcattttgcaccgctacagctctatctctcctcggtggagcttcagatccaccaaaaatagaagcggtgctgggtggagctctatcataaaataaactagagatgtgaaactaggtgtttagggagctacataaccactccagacccaactcttaaggctaaatttaggagttgaaactttaacaaatagactcctaactccgtattcgctccgctcttaaaaaaatcaacctacaaaagaatgtgacctctcgatagcacatattgatttttttttttgatggtggaagtacggagtacataactccatactcctagctgctacttgtacttgtatttccttttttttttctcttcgaaatggtgcgatcgatctagctagtttttgagtagaagcatttgtatatggtgcgagatgacaaggtaataagtagtaggagtacgtatgttcctcggtcgtggctgatcgagcacgaacctccgcagtagctagctagctggatctacgcacaaaagaaatactaccagtatatagtactccatccgtttcgaaatgtttgacacagttgattttttagcacatgtttgatcattcgtcttattcaaaaacttttatgaaatatgtaaaattatatgcctacataaaaatatatttaacaatgaatcaaatggtataaaaagaattaataattacttaaattttttgaataagacgaacggtcaaacctgtgctaaaaagttaacggcgttaaacatttcgaaatggagggaatagtaaaaaacaagccggtgatacgtcgtacttccactactatacatgagtcgcgattgaacatactcctatgcatggctggatctgtcacaacgtatactacatgtcctcggtcggatgcatcaactcacgcacagtacccgcaaagggacaagacgcggtacaaccgtacaaccaggcaaaccccagctagcctttgccgttgttgtttaagcagaaacgcagcagcatcgatatgatcggactacacctactccgatcggttggtacgttgacacgttattatgttcttgcggatatatcatggacttgatggcgagtagggatcacagtcgcacggtgagacaacctgcttacacggttattataaaattaaaagtgtgacgatcgatcagctagctacatctaaaatgagatgggatatgtataataaatttagacaaaagtctaatttaacgtgtttagatttattgtattttattctattttaaattaagtatttttagtacgaagaaagtagtggtaataactgataagtgtacgaggattgagctgacaagacggtttacttcgccgtccggatcaagctggcatgtacagtgtgtatgcgtactggatcgattggctagcaagcgcaagctggagtagaatgcactagttgaacattccaatcgagatgcattgcatgcatcacacgcacaattaaacgcacgcattgtacgtagacttacatttacacacggcactccatcgatctctccatctgcaaaacactgttcgaatgttgggctggcatcagctagcttgcccatctagcagtacgcacgtgtacgttcttgttgcagtaattgaagatatccactacacatatatgcagacatgcagtgtagttaaagtactcttccatctctgaaatataaacgctttcataattattcattggaattaaggagatgagagaagtaaaatttaaatgtgaatggttagattgagattatgaagttgatcaaaccaattttaaacttaaaaggttgtttaagagggaggaaacagtagattaagatataaagatgcatgtgtgtccacagcactaattcctctggtcgatctgccaccactgtgtgtgcttgcatgcatggctgctgttttgccatagccacacttgtacacgagtgaccaatcaatgcatgcacgtctacttctacctgctcgatcgattgattgccatctgcaaccaccgtacaccggccggtgaccggccggccggcgtctcctgccctctgctcctttcttcttcttcctcatcctcttctctgcaagtttaatttggttcaggaccacatcctgtgatggaggagtaatagcttgtccgtgtggtactactccctccgtcaacccctggatttttgtgtccaactttaactgtccgtcttatatgaattttttttataatttgtattttcattgttgttagatgataaaacatgattaatattttatgcgtgacttgtctttttaattttttttcatatttttttcaaataagacgaacggtcaaacgttgggcatggaaatcagggtttgtcttttttgagatggagggagtacgtgaggactggtccagtgaccaatagtccaatacatagctctcgatttgtatggctggctggcattaacattcgccagtaatggcttgctgtcgaagagttcgatctgttgatcgatacgacatcggtcaagacaggactgtatgaacaagcgacagtaatggtttgcaccttgggaaccaatcaatgtgtgtgctcgcagttgcaggcacggttcctgcagggcttattgcctttgacctggacgacatcatggtatgtataggactcgatcaggacacttgaaggttaaattcacttgtaaagaacggctacacaatgatatatgcggattcacttacggaagtgctaacgggcgatcgatcgcccagcgacaagggtagcgatccatcccccttccccctccctccctccacctgctttccttttttggcaccgcattgggctgcag

SEQ ID NO: 6759 - DNA, 6777 bp, Oryza sativa
ggagggagcgatcaccccccattaggagtacccattcacttatgcaagatggataatttggtcgttttctgtagtttccgcgaaggccttccatataaagtcaggcccggcaaagcctttgaaggcctgcattacttatgtaacacaatgtggactctgtttgtttgtctagtactgggcctcaattagctcttttggtgaattctctcgtcgttcttttctggacctaatcctcgttgagattctctgaatatgacatgttactagctccttccacacaaattaattccctgtgcatcacgttgttagtaggggctggtttggtgagaattttcagaatatgccatcgaatacgcaccgtttttaggatagcccactcaatttgtactactctcaaaacatgccatttggacgcgaattttcttcagtccgtgacactccatcacctgaagccgcgcggcgtcagttcctcttctctagcgacgtttacaagcgcgcatctgggcaccgccagcgagctcttgttcccctaccggcgaggtcctcctcccccacaccggcgaggtcctcctctcccataccggtgagcttcttcacgcacgacggcgacctcctcctcccccatgcccgcgagctctagatcggggagcggcgcgtggagacctcggcggccagatccccacggctacaagccgccgcccctcgtcatcctattgccgccgcgcccgagcggccgtcaacggtggggctcgatggcaatggctggtggggcgaacgaatggtgaacggaattgctgcgccgacacgaagtgacggtggaaggacgggagtgtcacggacggtagaaaatttgcgtccaaatggcatgttctgaaagtagtacgaatcgagtagcctatcttgaaaacggtgcatattcagtggcatattctggaaattctcctggtttggtttgaggcctaaaataggcttaccaatatttggcaatttcaatagtgtttaggatatatttggtttaaagccaaattttggcatgcctaagaaaatagaccatttcaatagtgaacttaggctattttggcttcaattcaaatacaactttacattaccaaaattagccatgccaaaacttactaaaatttggcattgacaaaatttggtaaggcctgtttaggccataaaccaaaccaaccctagatcatctctgttggttttgtctctggcagtgaatggatagctcaagtgctgagaggtgtgaaaatggatcgaagaagagttccctttgtatgactgaaaaccgtttgagttcagagaaactattttaaagtcttgagcgaacatcttttctttatttgcattgtcattcaaatgattaaaaaaatacttcataaacgttcaataaagtagattaatactccctccgtattttaatatatgacgccgttgattttttaaccaacgtttgaccactcgtcttatttaaaatttttatgcaaatataaaaatacttatgtcatgcttaaagaacattttgatgataaatcaagtcacaataaaataaattataattacataaattttttgaatgagacgaaaggtcaaacgtttgttaaaaggcaacggcgtcatatattaaaatacggagggagtatgtgataaatctgtctccagggagttggatgactgatgagatcgcacttactgttctctctccttctctctaggttggcttgaattcaagatctgtactattaattctcaaattacgcatggttctttgattgttattctttagatcattccagaatcgtgcctgatcaacaacgaagaaattccgattcacagataactgaatcgatgcatggcaggcagagctctcatctaggatcgcaaccaattgtagcgatcctgatagggatgtgtttcaacggatacaagataaatgtacggactttccgtaaaaacttacagccacttattccatacgatctgagccgcgtattctcgatccgatggtctgcgttgtcccgaaagaagattgcgatccacttggggtgccctttaacggagtacacgtaaatagtaaggtcttttcgttaaaaattaattcaccgcatgatctgaaccgcgaattgccgatctgacggttctcgttggtaccatgggatcactttgaacgactcactaaatagaagggccttttatgaaaaaacgcacgctctgccgccgccgtcatctccgacgctcctccgtggcggccggcggccggcggccaccggcgctgctcgtcgctgccccttcccatggccacgcgaggagagcaccaagctaactatgggtggtcgccgcggcagcatccttttctaatgaaagcgacctcgcccgctctggcgcggcagcgtggagcggcggttgctcgcggcgtgtttgacgaaatgccgcgccgggacgacgacgccatggccggggcatccacctctgggaccgcgcgacgcgacgagtcttctcgcgtctgcagcggaaactccgtggtctccgcatgattcgtgtcttcgtgagtcgtgacacgggaggggaggcggcatggacttcttcaggccggcgccagcgcacatgtaagaaccgaacgattcgctcatcgcttttgtcatcatctaaccaacgatcgatgaaaagcaatgtttatcctgatggcgctgaaacggacaatgttgccatcagatcatgcttgatttctttttaatttttatttatcgacagcgtgattcatgcagcgtgtgcgaagtacaccagatctcagcaaacttttgtcaaactcaaacacgacgccttgttccaggggtgtcaatataaatagcaaaaaattgggggaccgtaccagcaaaaatctcagattgcgttgagctgaagctgttcgtgtgactcttctacaccttccaggctatccggaatcgggagggtttcccaataggaaagcaactcaggactcaggagcggcgtctgagaggtttcagagatggagaaccagttccaggtgagatctctgtaccctaatccttttctcctgctcttgtttgtgtcctgaccgacctgggatgccgaggacatgttgcgccaagaaaagcttcctttctttcccgggcatgtttcgtctaggttttcttgatcttgtttagggttcgtgttgaataggcggaagttgtacatgcgaaattggaggcggtattatgggattgcgaatctcctccggaaaattgatttagctgctttggatgattggctttgggggtgaaactgtgcttgtaaaatctcagatcagattaggcggtcaattattcgatttgctggtgggtttggtactcgagagcaccccaaagttgggagctttggtatatgtagcatggaacttgctatccagtcctcaacatggtgttctagtcctgtttgagaataatctaaaggttggagttaaacagtacgggatatctgatattttaaatggtacaacatagagtttagaggtccttatttattgaagaaatgtttccactatcaccatcatgtctagatcacccccacttcaataccgttgctctgttgatactagaactctagaagtattgaggccccttaaaggcttcaagcttgctgtcacttggttgacctgatgcagtcttattatataactaattacttcatttataatggtttttccattttttttgcatccacttgctttggagcatttgttgggaggttcttttcctaaggatatctgtgtcctgtcaaccagtcctggagcattactagaattgcatggatttcatcacttctgtttgtttttgcattccttagtcttatgaatgagatgacctgatacaacgtaaattatgttagatgtttaaactagacctcagatagtgggttatacctgtttctacttgttctgaagtatgttgtccattgctaatttaggatggcaaggaggaggtcatcgaagcttggtacatggatgacagtgaagaggaccagaggcttcctcatcatcgtgagcccaaagaattcattcctcttagcaaactttcaggtttgtgcatctattgctcaaacaatatgtttagcttttgtaactaactcttagtagaactagtgccaaattgccaaaaaacttgccagatgttaatgtggtgcacaattgatacaccagagttaggaatattaagctggcgcctgaatgctgatgactgggagaatgatgagaacctcaagaaaatccgtgaggccaggggatactcttacatggtttgcatttcagaacttgttgtgagtttccattttttttgttcgcaaggttaatatgcttttccttgtgcaggatatttgtgatgtgtgtccagaaaagctgccaaactatgaggctaagctgaaaaatttctttgaagaacacttgcatactgatgaagagatacgctattgtcttgagggaagtggtatgcatctttattatactagttgagcacttgataactagtaataacttgcttccagcaataatcatggtggcatgttttgtggttgtcacatacttctttttctcatgctcctctaggatacttcgatgtcagggaccaaaatgatcagtggatccgtgtagcagtgaagaaagggggcatgattgttttgcctgcgggaatgtatcaccgcttcacattggacagtgacaactacatcaaggtatcttttgctttgttcctttgttcccacaaatagttatgttataagcatcaaactgactttgacgtgaacttatgcgttttaagtatattggtgaacagcggtcaccatttttctgtcatttacttaagtaatctgttcatttcctaaacctatgttccatttctatgctcttatcaaataaggaacatcagtccaatatggttttttccttactatgcttctgcaggcaatgcggctctttgtgggagagcctgtctggacgccgtacaaccgtccccatgaccatctgccagctaggtatctgttctttctgttccttgttttcctctttatctctggcttatttttccggttattgttgactcagtggaggttttgcataatttcagaaaggagtatgtcgaaaaaattatcaacaggggtggaactcaagctgtcgaagctcgttaaaggcatatcaagatgtgcttcctagttcggtgttctgttacactctacagatactgaataaactgtgctatcagctgttgcaatgggctcctaccgacatcttacatcatttggcagtattttgcacaaacccgcttaaaatctccctgaaaatacgcacgtcaccatgtcagagtgtttatatacaataatgacacttcagtccacagtcagcaagggactaatgacaatcattgtacttgtggtgtgtgtgatgaaaccacaatgatcaaaccgagtgtctgaatctctgaattgttttttttagcacaatgattgtgtaccaaaccctctgttgctgtgtgcggtggctggctcacctgatggcctttgtgctactcctgtcgtcttcaaagtatctgacggtgctgaccaaaatctttgaaatgatagtgctaatgctgttgattaccgaaaagttggggcacattgatggcagataacctagtactgtgggtttctatggaccagagaactgcaaggaagattgtattgtatgctagtgagattgaacacgttcatgtgtacttttggttgccacttgcccagttgcgagtccggccaacggtggaacaactattttcaggtcagagcagaacgcgctccgatggatcatcaattcatcattccactttttttttgtgaggcagcaaattttgcttgtgtgtgtagtgcgaaagcctcacactagtatatcaaccaatgagtagcaaatgaaaatatcttggacagctagttttcgattggttgcagaatttggggtttcaacaacttgtttctattctttattttggtttaatactccctcattccctaaatgtttgacaccgttgacttttttaaatatgtttgaccgttcgttttattcaaaaacttttgtgatatgtgtaaaactatatgtatacataaaaatatatttaacaataaatcaaatgatagaaaaagaattaacaattacttaaattttttgagtaagacgaacggtcaaacatttttaaaaaagtcaacggcgttgggatggaggtagtaccatataactattgggtaagacctgttatagtttcggaaaaccattacactcaatttaaattcaaactttttatatcgtgtctggtagaatcatttttttttcaccaatgtttgaattcaaatattcctgtttgatttgaatgtttacccaataaactccggtaaagaacaaaaacagcacgtgagtcccacgtgagattgaaaaggaattcagataagctaagaaaaaacccagagagaaaaaaagaacaaacctttttttttctcctgacccctgcaatgaatatcatctagccggacgagatcgtgtgtgccaatcaccgagcgcggcaaacaaattctgtgacccacacgcaaaagcgtcgtcgaggccggatgagattcggatcagaaaaaagaaaaagaaaaaaaaagaaaaaaaaatggcacgagccgtcgatgtcagctatcgattccggcatcccacttgcggccgtgccggcgaacctcagccacactcccaggcttcgccttccggaagct

SEQ ID NO: 6760 - DNA, 3259 bp, Oryza sativa
ctaacaaagtagacgggccgctgcacctttcggtggggccgatcctcttcgctaggggccgcatccttggggcgctcttcgtccaagcggccacgtggggcgcactcgtcttctgtgccgatgacctcggggtcggaggacgacaggggcggccttcccacagtggcctcggggccgtcctgggggtcgggggctcttggcgtcgtcggacaagcgggcagagggccagctccggtcgtcgggggccttgggccaccgttcggctcgggggcctctcctccctgctctctcccgggtcgagtcggcacagggttagcctcggggtcagagggcgataggtgcggccttcccgcagtggcctccgggccatcctgggggtcgggggcacctggcaccgtctgacaagcgggcagagggccagctccggtcgtcgggggccttgggccaccgttcggctcgggggcctctcctccctgctctctcccgggccaagccagcacagggtggggatgcgcggaatgaggattgtcctcatcgcgctccacaaccaacgctgcactaactacttgcggggtcgccgctaagtagagtagcaagggctcatctggctccggggcgaccagaaccgggggagagctgagatacgccttcaactgagtgagggcacgttcagcttcctccgtccaagtaaacggcccggagcgtttgaggagcttaaataggggtagcgccttctctcccagcctcgatatgaaccgacttagggcggccatgcaaccggtgacgcattgcacatccctaagtttgctggggggggcgcatccgctctatagctcgtatcttctcggggttggcctcgatgcctcgggcagagaccaagaacccgagaagcttgcccgcaggtacaccgaacacgcacttatcggggttcagctttatgcgggcggagcggagactttcaaaagtttccgctagatccgagagtaaggtctcttggttgcgcgtcttcacaaccaagtcatcgacataagcctcaacattacgtcctatttggctacccaaagaaattcgagtagtacgttgaaaagtaggacctgcattctttaacccgaagggcattgtcgtataacaataggttcctatgggggtaatgaatgcagttttttcctcatcctccctagccatgcgaatctgatggtaaccagagtatgcatctagaaaacacaaaaggtcgcaccccgcggtggagtcgacaatctgatctatgcgaggcagggggtaagggtccttaggacatgccttgttaaggtcggtgtagtcgatgcacatccgaagcttgccgttcgccttaggaacgaccaccgggttcgccagccactccggatggatgacctcgaggatgaatccggcctccagaagtcgcgccacctcctcgcggatgaaggcttgacgttccggggcctgccgccgcactttctgccggaccggccttgcgcccggccgcacggcgagacggtgctcaatcacctccctggggaccccgggcatatccgccggtctccatgcgaagacgtcagcgtttgcccgcaggaaggagacgagcgcgtcttcctatttgccgttcagaagaccaccgatccgtatggtcttggacgggcctcgcccagggcaacctccttgaccgggacctcgtcgcatgtgatcatccgctgcctcggggcggcggggacggaggtgccaagcctctcgtcgccaccctcgggcttggacgcggcggcgaggtggtccgcgcgctgctccatacaagcaagcgcgactttgaggtcgccatggacagagatggggccaccggggcccggcatcttcatctggaggtaggcgtaatggaccgccgccatgaacttcaccaacgcgggcctccctaggaccgcgttgtagggcagacttaggtccgccacatcgaagtttacccgctccgtgcggaagttggcggatccaccgaaggtgaccggtaggtcgatatgacctaacggccatgtgtgccccggcgtcacaccaataatcagctgggacggccggagcaccatccccggggccttgatggcgtcaaaggctgcaggggaaaggatgtcgagggccgctcccccatcaatgaggacacgccccagcttcacgttgcaaacagtgggggaaaccaccattgcgatctgtcctccccgggcaacgcacggtgggtggtcggtctggtcgaaggtgagggcaacctccgaccaccgcgcccggcgcgtcgcctcatgagtaggggccgcggccagaagctctcgcttcatggccttgaggctccggcgagaaacgtgagcacacgctcccccatcgacagtggcaatggtgaccccaggctcttggaaacctaggtcatcatcgccgtcatcgatgtcctcggcaggggccttttgcttggcctcacttcgccgattgccggaaggaaccgccggggacttgcccactcggcgctcctgcctcctctcctcctcccacttcctcgtccgctcagccaaacttttgactgcgcggcagtccgcgaggtcgtgaagggaggtgttgtggacggtgcaccacttgccggttgggcgctccctgctgggagcgccggcctccttctttttgtcgctcacaggcctcccctttcgggtggcccgcgaagcgccctcgacggcgaggacatgaccctcgtcgtcggaatgggctgacctcttcttcctcctcctgtcacgccgccctgtctgagcagcggatccgggggcggccgaagctgccacaccggaaccggaggggttccaggtccatgcctcctccttacgagccactcggtccgcgagctgaaaaagctccgcggtagtctggggctctttggaggcgatcttttcgagcatgcggttgtgccgcacaccccccctgaacgcgtagatcaccgcgtgtgcagggatgcatggtatggtgttgcggacttgacagaaccgctgaatgtatgagcgaagtgactcatcatcccttcgctgtactgcgtgcaagtccgcttcctcacctgggcgcggatatgtgccttgaaagttcatggtgaactgttggcacaaatcctcccaagagtggacggacgcgggtggcaagttcattagccaaccccgcgcctgtcccttcagggccatgggaaagaaattcgccataaccctgtcgtcacccccggcggcctcgatcccgg

SEQ ID NO: 6761 - DNA, 8253 bp, Oryza sativa
cgtctcgcgatttcccttctaactgtgcaattagttttttgtttttatctatatttaatactccatacatgtgtccaaacatttgatgttatgtttttggaaaaaaaaattgtgaactaaacaggccccaaatcagaggtgccatgctgagaatcacaggagctgttcctgtcagaaattctgctgcacactttgtcaccataaacagaaagttaggcagggtaattaattaataattactgcttagtgcaaggctaataatacagccgatctgctggctataaggttctttatagtcttctctcagcctacccatataatagttagctcttcacaattaatacatggcccacttgtctctctcacagagtttcttggttcttgtgtccaagccggctgttagtttacaacccgcttctcctctctctcctctcttctttcctccaactcagcatttagccggcttatagcctactttttgctcttaggtagaaactggtcagaattcccaatccagatatgtttctgctgctcagtatgttaaattcagagaaatggttacagtgactggagacacctgaatcatgaggtacagtaccagtaaacaattgtgctgaccgaaggttctgaatgatggcaaaaggtaatgtaagaattaaactaaccaaaaggtagtactattttctttggatgtagtatcaaggcagatcaagaggttctttacagaaaactttattatcagaaattcagaacctaatagcatggtgcctacacaagaactgacatcattgacctggtcactcacacaaggcctaatcacacattcaactgcatctgtggagttggttcccttgccaaccttagctactttcagataaaaattctaccttccaacatactaactttaggtttattactgataaatactactacaataagttcccaagaagaaggttcctgaactgctcatgttagtggccggttcccttcatttcaagctatagtgccttttctaatcaaatcaagagaggcttccagaatcaagatcagggatgctaataaaatcagtttgacaggacatggataattactcagtgtttgcacacaaaagcaggtgtgccagaagcaacagggcactcactagcttttgaccctgttgggggagttcaagttttgagaagtagtgggcgagaaactagttgatgagaatatagaaaagttggattttatagcttcttgtttgtagtttattttctaaatttcacaactacaatatataaaaagttgggttttgcagcttcttgtttctagtttattttttataaatttcataattacaaatttttagaataatttatgttagaatctggatcgtgtagaggagctgaagattttagaagaagttgtatctattaaaagctccttaggaccttttgtagggtggttgggagtagaacgcaactgcaaacggccacacaccaacatctccatggatggtcccatggatcaactcacgaatccaaactcatctttgcttgcagaaagaagttactggtccaagccactgatgtcttggcttatttggaatgcagaaagtgttgcagtttcagaagaaaaactgaacaatttgagccccataaaactcttgaaaatcttgtcgttgataaggattagagtacaaccactgatctcaatgatcagacaagtgtccactctgacaagacgtcaagagaagcagctcttgtaatttcgatattaacttctggtttctggaaatgaaattcagagttgtccatcgcccaagaaagtattgacaatttccaacctatctttatatcttcgtatccagattaaatctgaaagaaatacggttttgccggtcattttggtatccaatttacaaggcccacaaaatattcccctccatggaactcaggacaataagttagtagcattctcagaaaaccaattgatctcgtctcttggatgatgaacagaaatgcatggcacaaagcatctcggcattattcaagcatatctgaatcatcatcgcggcgagtcctaaagaagtgcaggttcacatctccacgaggatatgctattgctgctgctttgctttgctgcttgacgttatttttgtcagtgggagcatgtgtggcaatgcaagaacgaactgagtcatcggagacagcgatatgagcagtagcacattgcaggattcttgctcgctttagcttgcctttttcttctttttttttggatcggcgacgagtgctcggctgccatttcatctcctccacttctcgctggattttgctgtgttcttcgtgtttagattctcgcccgccgtctgctttagctagacacgggtgcctgctgctagattgttttggagcagaagcaggtgtcaccttgcgaagaagaatcgtcagaaatgtgtgtggggtgactgaatcgatatgcagaggggcatttggttgttgagacgaaaagatggaatactgtcgtactttcagtttcagtgaatttaccttttcttttttgtacgttgaattattctctgtcgacgtgttacgtgctgatttcatcacgattatcatatatatgtttggtgcaactgaacaaccctctcctgaccgatggtagagaatttgtttgaactcctaatcacccaccaggttcaatgcatattgcacaggatctggcttacgtccaatttgatggtgttacaacgatatatcagttcttttggacagaggaagtacacctccctatttgaatacatgatgatattgttaattgttcagtcaaacttttaaaactgtaaccaccaatatctctcaaaatatttagtttaaaaacataaattcctataggtagatctttctttataggttgtttaaggtggtgtttgaatctcctgaagatgaagataaagattaagtatttcacacaaaacgaggtgataataacgtttgattaattgagttttaattattacaaacttgaaaaatggattaatatgatattttagagtaactttcatatagaaagttttcgcacgaaacgcaccgtttagtagtttgaaaagcatgccatgtgtatccaaaatttcatcccctctttttagtagaaacgaatgggacctaacaatgttataattttattagatattatcattaaattctaatagaaaaataatggtcaaagttaaaaaaaataaagtcaacagtgtcactgtgataatattacttatagactatgcagcaactaaagatgcatatggttttatttgtggacactggcatttgaatttttgataggtaaaatcatgcacacacgactccaccactatgccaacaggtgattggagtgcttcttccaattaatatatcgtcactctgtacaatctatttgcaacgtgaagtacatactaatataatttttgaactcaagtgtagccacgaccactctagatttttgcacgatattttactaagaatcatcaaaattacatacatctagagcattttgaaatatatttgcaaaaaaggtctagaatgcaaatgtgtgcaataatatttctgtatctaaatacagtaatatacatctgtaccataaaagcaattgtaatcaaaaaaaattatgcgtttactttcacataaaaatttaggtaaacatattttaacatgctctatatgtatgtatttttcagtacttctatctataaatgaagaaaagaacctggagtgggtgagtgtcgcagtagaaccttccaagttacaaccttcctcagaaaaactctcatgcaggctgaattcgtttatcatgtggataggtcacccagaaagatccatgtcaattacaaaagttgaatggtggcaatggtgcatgtcctgaaggtgtatgcaccttttgtttagatgaggagatgcatcagcaaatggagcagttcctccaccactttcatcctcagtttctacattggtcggcatgactttttagaaaacggttctacttctacatagtttggcattacttttcagttaatggaagaaactcccggtctccacagtacacaaaaatacttttgattcagtttttaaaagagcaatgctacaaccatattaaattgttctataaagctattactagaaactatggtatcaactgtgtttgatttaactagatgaaatcataggaaatctagatgtattcacaatatgacacataagtgttagtaagagttcatcaacctttgatttaactagataaaatcagtttattacgaaatttttagtacttatctagtacgctttttagcactgcaacctctattttttatatgtatgatgcactcgtctttttttcctcaatctttaatcaacaatatttatttaattacctaattaaaaaaatagtgcaaccagatttaccatcaaaaatactttaaccatgtctagtacatttttctatttgcaccaataattaaagaaaaaaaatcatcaaacaattttaaaaagtcaactacgtcatattataaaatgcagaggtagtagtacataagctggcatgattaaccagtgagcaatttggactaatgactcctgaaatgaaacatcaacattggatgaatgttccattagatggaaaagtgagaagttagacaaggcagagtattgccttccccggttgcacttgaatcataaagggctttggcctcataaggtcaaaagtcagaaaagaaaaaaaaaagagtgagacctggacaagcagagctcacaccctcttcatctacgaaaaggagagagagtagagtggttgttcaagagcttttgttctagttctaccactttttttcttttttaaaaaataatttaaaccaatccagcctctacatctcaacgtatcctatcttattttatcttttgttttcattttttctctttttttcccttttggaggaatcatttgcctgccgaagtatgtcaactatgcattcttctgttgacctttaatttacaccatcatgttaatagtaagttgtaaagaagtcacttttggataactgaaaggaagcaacagagctttgctatctcttattttattttattttttaaaaatagaagtatgtaactacttggtgatatttttctgaagattttctaaggaaacatgtttttgcaaagcaccagagaatcttttgcataggtccatgcagaactgttggaagtgctaagttcagatatgctgaacagcatatatatcataatatcaacactgaaactgtattatacctaccatcacacagaattgtggttcctggtgaatcaaaactccttttcggctcgtattattgtactgcctgggtttcaggccattgaaactgtttctactgcacacgacattctccaccgaatgtctcatccagaaaaagaaaagaaaaacattctccactgaagcctaaatatataggttcttcagtttattaggaggtcagctctatagcccatcatatatatcatgcagttgtggaacaagatccggacacaaattatttgttggctgcataattgagcaagaaaagggtgagattttcaatggcgactcctgtagattgcgtcgacaaacagcaacaactccctgttcatcagaagtatacccacactctcatagtctcatgcagagatttggcttctttcttttctccaccaactgaatcagatcacgacggccatcatatccttccctccacgtctctacgccgaaaacgattgcgtgcaatgcaaacccgtttatacaaaacaaacaacagttcactggtcatttcaagaaccaagctagctagctagtaatgtgagatgcagagaatgagtgagagagagagagagcaacatctgtttgagcaaaagttatctgaactgacacacagtgacattacattgcaattgttgctgcaccccaacgacatcgatcctcttcctggattctgaaaccgatggctctttatctcatctcagaaactgttggtagagatgcaggtaaaaaagatggccatttcaagcccggaatctgctccatttctgtcagaaagaagcagtagcagataaacagcaaccgtttcttcgcatttggtttttgaaccggttgctgtcagaaagggcccggttgctcccccctcctcctcaagctccggacgccggtaggaccagacggctgccaccgacgtccactcgaccattcgctcgcgccacgcagccatggccacgcaccgtcgctgcattctcggccacagccaaaaaaggcgcgaaagaacactctccagctagcccaagccacatagattggtgaagaagaggaggaagagggtgacacattcttggacagcaaaactccatggacaccggaaaccacagacaaattccagctaagccaccaagatgactagatggccagatgggcatagtacgttctcactgtctgtactctggtagacaggaatgtatggtaaaatagtagcctcacatttgttactagactactagctaatgtgtgcatggtgacaaacaagcaggaatgtttctgaactctcaagcattccatcagaaacctgacaagctatctgaaaatcacctgatcgatcgatcgatcagtatgtcagtaagatcgagaactgcacccaaatgtggtctgggaatctctccatatatatggcgggccagtccatggtggatcattgaagccactagttaattattggcagaaaggtgagatggcaagtgaccaaaaaggagagcttctttttctctgaaactgaagcatcgatgaacgcgcggcgttttcagcgcactgtggtccgtggtgggggaggaggaagaagaagaagaaggagaagaaagctaattaatggggagataatggcggttgacttgcgcagcagcatttgatttgctaattgcaagcgtcaactgcatcaccaccgatgctccactagctgtgatgatttcatgttttttcaactgtatatctgatgatgatgatgatgatgatgattgatgaatatctggtcgatgatgatcagtcggaataaagcgaaagccggcgagctttccccctgtgttgcgccgctatgggccgaaaatatctcgaaaaatataggaataagttcatttgaggtcccttaacttgtcaacgaatccaattttcatccttcaaccgaaaaaccagatataacagatgagtaaattccctgtgtacccctgaaaactcactcaatccctttcatacccctaaaatttacccgatcccttctgtacccctgaaatttcaatttgatcccttccatgcccctaccgttacattttccatcattttactgttacgtttggttgcaaatgtcttttttgcccttgatgctttaggtttaaatataagcttcaaaaataattgaaaattttgtttgagtgcacatcgtgtgcattttataaaactaatgagactaaataattagtgcagaaaattttgacataaattttgaaaataaaataaatgtaaaaaattaaaaattttatttgaaattttaataggacaatggatttttttatcaggagcattcataaaaaaaatgttgtgaacattggtatacctatctttatatgaatgctcctcatttttatgaccttttttttaaaaaataaatacgtattttttttatttcattatctaaaaatatttttttgggataaataatgcatcgcacaacaaactcataactataatagtctcatgcgagaagcttttatatttttaataatgtaattcatgaatttctttgttcatccaagggtaaaatggtcatttttatagaaaatacacggtcaactaacggtcaactgacgggaggggtatgcaagggatcaaaatcaaattttgggggtatataaggaagtaagcaaaattcaggggtatagaagggattaggaaaaatttcaggggtatataagggattttctctataacagatcccccaactatcaaaaccggtgcagaaaaggtccctcgtctgtttagatggcggttttggttgacgtgacgcttatgtggctagtttgactcggtcttcatctgacgtgtcattgacgtggcgcttacgtggcaattcgatccggaaaaataataaaacctgtgggacccaaatgtcagttttacacacaaaataataaaaaatggtggggcccacccggggcccacatg

SEQ ID NO: 6762 - DNA, 3814 bp, Oryza sativa
aggtggccggaggaggaggtcaccagcgagcacgttcctgctcctgctccgactgctaccgcgctcccctctttagccctagctccaaaactttcacttcgctagaacacacaaccctttctctccctcgcaatgccacaaaatcagattagtcgaggccgagaagacgccacttgggcccggcgcaaggagtaggaggggggagtgtgtgcggcgccgctggtcgcagtcggcggcggcgatggagatcggcgcggcggcgcaggtagaggcaggagatcttcgatccgtcgagcgcaaggaccgattaagcttacgtgttttttagcctaacaccatataacgccggccggccgcactgccgaggccgcgacccgcgctctgccgcacggccacgctcgcgtcatgcagctcgtctccatctccaagaaccaccgcggcggcaacgacgtggacggcaagcacgatagcagcgacgtcgacgagggcgccaacgccgacggtgagcacatctcgccgcggggctcctactaggtggtccggatcaagaaggacaagatcctggcgccgcacgtgcacttctgcagcgtgtacagcaagggcttcaagcgcgacgacaacctgcggatgcacatgggcggccacggcaaggaggcatctgcaggagcttattgtgcgcggccacggcgatgagtacaagtcgggggcagcgctggccaagcccggcggcaagggcgtgtcgccatcgctgtcgccgtcgccagcggacgtgccgaggtggtgcttctactctggtcgccgaaccttgcgtgagagagaggggagatggggagagaggaggaaacccagggggaatgacatgtgggccccacgtgagccccactattttttattattttgtctaaaactgacatgtgggtcccacgggttttattatttttctggatcgaactgccacgtaagcgccacatccacgacacgtcagatgaagaccgagtcaaactagccacataagtgccacgtcagccaaaaccgccatctaaaccactgagggaccttttctgcactggttttaatagttgagagacctattgtatctggttttccgattgaaggatgaaaatcggattcgttgacaagttaagggacctcagatgaacttattccccaataacatgggcttctcttacggcccaatttaggtgcatcttcaagagcatatagcccagtctagcaaccatattaacggacatatgggccttttttctccacactacctatcaataaagcccataggaaagtctgatatcgaggtgcagcagacagttagccacagagcccccataggttgcggccaaaatttaaatgggagtgaattgcatattaggccacttatttgcaacttggactaggcctactatagtgttttcactttacaccaagtaagcttaccaagtgttgcactttggtccaccttatcccatctcctcttttaactccggcaccattatcccttcacctgcccccgaccagctcccttctgtgttgctaggactgcacgacgctgcctcctgttaaacatgtgatatgtatttgtgtgatgcacacggcatggttagatggatagatatgattagataaggctagattgagtttgttgtaacagaataggagcatatctatccatccacctgcgccgatctctgtaacccacagcggtggttattatcgctaatataagattaacaaaggtgcggcccgagagggttgaacgcttctgaacctctgatgtttgatatggtatcagagcctttccactaaacaaatcccgatccaatctatggccagctcgtcgtccaagatggcagccactaatcctttcggaggaaacacaatctcagagaaattagccaaaaacaactatgcgctatggaaagcgcaagtcctggcgtcggtgagaggagctcgtcttgaagggcatctcactggcaccacagcagcgccggccatcaccatctccgtgccaggcgagaaggaaggcgacaaggccaccagggtggctaatcccgcctacgatgaatgggtggctacggatcagcagatcctagggcttctactgagcaccctgtccagagatgttctggcgcaggtggccacctgcggcactgcagctaccgcctggagcatgctggagagatgtatacctccatgacaagggcacgcttcatcaacactcggatcgctctctccaacaccaaaaagggcgatctctccatcacagaatatgtcgccaagatgagagcacttggtgatgacatgacggcggctggcaaggtcgtcgacaacgaagatctcatctcctacatcattgccggcctcgacgacacgtatgaaccggtgatctcctcaatcgtcggcaaatctgagccgatgtccttcggggaggctttctctcaactgctcagctttgagcagtgcaacaatctccgtcacggcggtgagtcgtcagcaaacctggcgaatcgagggtgcggcaccaccggcggcaacggaggccaacgcggacgcggtgggaacaaccgtggacgcggcggcaatggaggcaacaacagcgcaaaccgcggcaagggtggtcgcgggaatggcggcttcaatggaggacgtcaaggaggtggcgtcgacactaggcccaagtgccagctatgttacaagcgaggacatacagtaatcaactgttggtatcgttatgatgaggattttgttccagatgagaagtatgcaggttctgcagccacctcctatggtatcgataccaactggtatgtggatactggggcaactgatcatgtgacaggagagttggagaagctcatcgttcgtgatcactacaaaggacatgatcaagtgcataccgctagcggtgcaggtatggaaattagccatattggtcactctattgttaaaacccccagtcgtgatattcatttacgcaatattttacatgttcctaaggctaacaaaaatttagtttctgctcaacgtcttgtttctgataattctgcctttatggaactatattctaaatatttcaatcttaaggatctggccacgaagaaacttctgcttagggggccctgccgtggttgtctctatgctcttccatctacaccgccacatgcacactcaaccaaagaagtttatggagtctccaagccatcttttgaaaggtggcacagtcgtctcagtcatccctcctctccaattgtagagaaggtcattagcaaaaataatctcccatgtttagttgagtctaataaatagtctgtgtgtgatgcttgtcaaaaggcaaagagtcatcaattgccttattctatatcatctagtatatctagtcatcctttggaacttatttattctgatgtttggggtcctgcccccacttctgttggaggcaaacagtattatgtgagttttattgatgatttcagcaagtttacttggatttatttaattaagtttaaatctgaagttatccaaaagttccatgagtttcaggctcttgttgaacgattgtttaacagaaaaatcctagcaatgcaatctgactggggaggagaatatgagaaacttaattccttctttaccaaaataggtattactcatcatgtgtcttgtcctcacacacaccagcaaaatggctcagctgaaagaaaacataggcatattgtagaaatgggtcttgctcttcttgcttactcatctatgccattaaagttttgggatgaggcttttacttctgctgtttatctcatta

SEQ ID NO: 6763 - DNA, 3260 bp, Oryza sativa
ttttattattgccatcccatcttgatattcctattattcctggggtgcaacaaatgagtaccactgtggctaatgttcctactaatcctgctaatcaaatttctggagatgaattatcgctacaggaaaattcggcagcaaataatgcagctccagatggtgcggacgcagccacagctgccacgaaagatccagcggctgactcccctcacacctctgacgcagcgtcttcgagcgtcctccagcgtcgtgtggaggccaccgcagagtcctcctgctctcctgatcggttgcatgtcgagctcacaccggcgcactcacccgtggccatgcaatctccagatgccacgtctcctactgcttcctctaactcacaggagccatccacgtctcttgatgcttctgttgcaggggaggtagatacacagcaacaacagcaccatgtaatatctagaccggctacgaggttgcaaagtggcattcgtaaggaaaaagtttatactgatggtacagttaaatataggactacttttctcactgttactggagagccagaaaatttagatgacgctttaaaagataataattggaaaaaagctatggatgcagagtttatggctttacaaaataataagacctggcatttagttccacctcagaaaggtagaaatgttatagactgtaagtgggtgtataaaattaaaaggaaacaagatgggagtctagacagatataaagctcgcttagttgcaaaagggtttaagcaaagatatggcatagattatgaagatacttttagtcctgttgttaaagctgctacaatcaggattattctttccattgctgtctctaaaggatggtgtatgagacagttagatgttcagaatgcttttcttcatggagttctcgaagaagaagtgtatatgaaacaaccaccaggttatgaggacagttctttgccagggtatgtgtgcaagcttgataaagctttatatggcttaaagcaggcacctagagcttggtactctaggcttagcaagaagttatatgatatgggattccaagggtccaaggctgatacttctttgttcttttataacaaaggagatttgattatatttgtactcatttatgttgatgatattattgtcaccagttctagacaggaagctgttccagccttgcttcgggatttacaaaaggagtttgctctgaaggatcttggagatcttcattactttcttggtattgaggtaactaaagtgtctggtggtatagttcttactcaagataaatatgtcaatgatttgttgagaagagtaaatatgtttgactgcaaaccggttagtacacccctgtctacaagtgagaaattgtctataaatgaaggagatcctttaggaccaaatgatgcaacacattatagaagtgtagttggtgctttacagtatctaacattgactaggcctgatattgcttttcctgtaaataaggtttgtcaatttttacatgctccaactacacaccattgggcagctgttaagagaattttaagatatttgaagcaatgtactagacttggacttaagttaagcaagtctagatctatgttagtaagtgcttattcagatgcagattgggctggttccctagatgacaggagatctacaggaggttttgcagtattcttaggagataatcttgtgtcatggagtgcacggaaacaagctactgtttctagatctagtacagagtcagaatataaagctttggctaatgctacagcagagattatgtgggtacagactttattggcagaattgcaagttgagagtccatctatggcaaagttgtggtgtgataatttaggagctaagtatctttctgctaatcctgtgtttcatgccagaactaaacacatagaggttgattatcattttgttcgagaaagagtttcaaggaaattgttagaaattgattttgtgcctacaggagatcaaattgcagatggttttacagagggcttgtcagttcgacagttggagaattttaagtacaatcttaacttaggaaagttatgattaagggaggggttaaacatgtgatatgtatttgtgtgatgcacacggcatggttagatggatagatatgattagataaggctagattgagtttgttgtaacagaataggagcatatctatccatccacctgcgccgatctctgtaacccacaacggtggttattatcgctaatataagattaacaaaggtgcggcccgagagggttgaacgcttctgaacctctgatgtttgatacctccacctatcttgcactgctaaatgctgatctcctacacttgcctctaactctgctcgaaccgcatcagcatgttaagagcaaccatcccccaagtttggtgtgccttgcacttgatctggagagagcaggagcatgatagcggtggtggctcattctggagcatgaacaagaaagtggtaggcttgtggaggagcaggtgcaaatagcaagggagcaagagggtaaagcagcagcatgctcgtggatgtgcaagagcaggttggtagcaagattatggaggtcttctccacggctcccccttgtggaacccgccttgagcttaagctctgtacagcccaaattgtgcctcccaccatcttcatcctccatctccacaatgggcagcggttcgacaagtcacactaggagatattcctggcggagcgccttgatggagctcaccagtttggagctgcaagatgcacccatccactcccattgattttgatgcaagaacgcatggtttgctgttggcccttccaggtaccacatgacctccttgtagagaggatggaaatggagtttatggcgagcggcaagcatccaatcaacggtgctggtcgatggtggtgatgactgacacacagcaaagctagtccaaagtgcaacagattgcaagtgtagctggtttaaactgagaccattgtaatagagctagtccaagctgtaaatgtggtaaagatagtgacggagcgtggggctcctcaccgggagaccgcgcaggcccccctttgccggttcggccggggaccctgggtgagattctaagcttctagtctgtggaaggttcgcgagaatggaagaagcacaagacacgggcgatgtatacaggttcgggccgctgagaagcgtaataccctactcctgtgttctggtggatctgtgtatgaagaagctaca

SEQ ID NO: 6764 - DNA, 6820 bp, Oryza sativa
agcgcgctgcactgcgttacatgcggcgtgacgcgctcgtccaaaccgcaataaatgtggttaggtgagccctgctgcgctcacctaacccatacacgcggcgcaaaatctacaaggggtcggggcgcctcagccctcggggccgaaacgggagcggtccgacccctcgggaagacaaagaggggggcggccacatcaccctcgggcccgacccccccgagggggtcaggcctcgtgggtgattgctcctgcccaagcctctagtcatgatactcccggtcccatgtcaccgacagtagcccccggcgttatgccagggcgatcgccctcctcgagggaagcggtcgggcgtgacgccacttcctaaggcctggtgacaggtgggaccggtctccacagttgggcagaaacccaacggtcgccaatcacgcacatcggcaatggtaactcgactgtcaataatgagcggcctcttcaaggttgccacattactcgagtagcacgcgaatcgggacgagccggttcgttttgcctggagatatggtgatggcgcttcggtcggcgagcgtaattaacgcgcgcacgatatgttccatctcgactgccacagccgcatatccacctcatgcgccgcaagcgggcgaatgggattagtggaagcgtgggcgcgagaaacgagagagcgagatagtgggcgcgagaagcgaggagccgggcacagcgttggcaagggtataaagacaccgaggaagagatttgcttccttcctctcgccattattccccttgtcttcgccgcttgcgccctaactccttgtttcctgtgccctaccttcgccacacgcgctcgctctcaaacatctcttcctccggcgtcatggcacggggctccgctttgctcgatggtagcgtgctgccgccttcccgcatcgtgagcgagaggcaggccgggctgccgcgccgcttcatgccggaatctgccaccggccgggagatagtcacgctgggcgagggacgcccggcgccacactacccggggcggtccgtcttcttcctcccttttgcaatggcagggctggttccgccattttcttctttcttcatggatgttcaggagttttacgatctccaggtggcgcacctcacccccaacgcagtaatgacattggccatcttcgcgcacctgtgcgagatgttcatcggggtgcgcccatcccttcggctgttccgatggttcttcaccgtacagtcggtgtcgccgccgtcggtggttggtggctgttacttccagccgcgggggccggtgctgaaccgctacattccctgcgtcctccgcaagaagtgggatgactggaagagcgactggttctacacccccctcgccgacgaagcgcgcctccgacttccgagccagcccccggcgcaggcctccagctggcgggcgccggtagatctgggagatggctatgacgccgtcctcgaccgcctggcgggcctgcgatcccaggggctcacaggggccatggtgtacggcgactaccttcgtcgccggattgcgccgctccagcggcgcgcccggggcgcctgggagtacaccgggtccgaagactatatgaggacccatcagggagtcagatgggactgggctcctgaggatttcaagatagtggtccaacgggtgctgaatctcagctccgtggaggcatccctcattccccaaggagtcctccccctctgcagcgatccagatcgcgcctccatcctgaccatcatgcaggcggtcggggcgtcggaggagcgggctcctcgaagccacgatggcgcgggcgggagccgcaggggggaacaatctaccccgggagggggtcgtgcttctgggccccgcgacgggggcccggggagcagccgccctgccgacgcccgggggaagaggaagcaggaaggaacccctcccccatctcctccccgagggggcggggcggcgcgtgccagcagcaggcgcccggagggggccacgccgacgtcgcagcccgagggggagcggaagaagaaacggctccgcaagatgggggggacagaaccatcccggggaaaccttatttcccctccaaggtggtcgtttaaccgaccccctcgcaggttcgtcccacgcccatcgtggctgtattcattctctcaacgcgagttttcactcacccatcttgtttgtcttctggtctttcttctgtttcagcgagatcccgtcgcgtccctcccgccattccaagtccggccagtctgaggccgaggatccggcggccgcagaggctcggaggcgggaatctgaccggcgagaagccgcggatcgcctacgggaagccgaggaggccgctcgggaggccgcccgggctcgccaggccgaggaagccgctcgggaggaggccggactccgccaggccgaggcgacgacatcctccgaggcgacccgtgaaactgaccggcaagaggccgcggatcgccttcgggaagccgaggaagctgcccaggtggccgtccgagctcgccaagctgaagaagccgctcgggaggaggccaaacttcgccaggctgaggcgacgacgacttccgaggcagctcgcgacgaggccgcgggcgcatcgcttgggcccactccctcgtgcgacgctcaggacaagccaggtccgggggacatccccgagtccggcacgtccatcggcgggccgagccgcgcggcatcctctccgaggcggctcttccccacgccttccgttgccccactgagcgcagagccccttctgcaggccttggccgtcgcgaacaccacggtgttggacgggttaagtgcccaggtggaggccctgcaagcagagcgggcggagctcgacgccgcatgggcgcgtgtcgaagaggggcgacgctcggtggaggccatggtggaggtgggccgcaaggcacaccgccggcacgtctcagagcttgaagcccgtcggaaggtgctgggggagatcgccaaggaggtggaggaggagcggggggctgccctcatcgccaccaccgtgatgaacgaggcgcaggacaccctctgccttcaatacggaagctgggaggcggagctagggaagaagctcgacgccgcccggggggtccttgacgctgccgctgcccgagaacggcgggcggcagagaccgaagtggcatcccggcggcgcgaagaagcccttgaggcccgtgccatggcgctggaagagcgtgcctgcgccgtggagagggacctggcggaccgcaaggccgccgttgccatccgggaggcaacgctggcggcgcacgaggccgcctgcgccgaagaggagtccgcgctccgcctccgcgaggacgcgctcaccgagcgggagcgagctctcggggaggccgaggccgcggcgcaacggctggcggacagcctgtccctccgcgaagcagcgcgggaggagcaggcgcgccgcaatctggaaggtgcccgcgccgagagggccgcactgaaccagcgggccgctgaactcgaggcgcagacaagggaactggacgcgagggcgcgcagtggcggggcggctgcgggcgaaagcgacttagccgcccgcctcgcagctgccgaacacaccatcgccgatctgcagggcgcgctagactcgtccgccggggaggtcgaggccctccgcttggcaggcgaggtagggcccggcatgcttcgggacgccgtctcccgtctagaccgcgccgggcggcaggcgggtctctggggcaagcggactgcgaagtacgccgctaaccaggggggcctcgcccagcgcctctcggagatggccgggactctccaacggctccccgaggagctcgagaggacgattaagtcatcctcgagggacctcgcccgaggagcggtggagctcgtactggcgagttaccaggccagggatcccgacttctccccatggacggcgctggacgagttccctcccgggaccgaggacggcgcgcgcgcgcaggtccgggacgccgccgaccacatcgtccacagcttcgagggttcggcccctcggctcgcgttcgccctcaactccgacgaggaggacgatgacagcggagtgggcggcagtggcgacgaggctggcgacccgggtgcattggattgagcccccaggcccccgccaatctttaaatagttttttctttcttcttccgaggccttcgggcccccttcttgtatagactaatttaatctgcaatcaaataaagaggaaatttttgtgtcaattctatttgttgtgtgtatgagacgaggatggtctgtgccgcagtccttttgtgtcttggcttgaacaaggactcgtgcccaggtcccagtcctcaaatggctcgggtcggggctagtgcctggggagatccacatgtcgagactggccaggccgggagcgtggtgaccgagggttatgggtgacccgattgtgggtttttgccgattccccccccggagttcaccacgccccggggcacggctcggttctgggccccttttggcgattttagccgacccgagcccccgagggcaggattgagcacgagtgacctatttcaagtcaagattcttcaaaaagaaataacagcacagacacagcctttaggaaattgaaaatgcttttattaaaatacagatataagagaaataagaatatgcatgtgtggtagcccccggccaaccctgcacgcccgaggggggtgcggggttggcccgagcccgaaacctgacacccgatcccccttaggggtagaagcgacgaaggtgttcgatgttccacgggttaggcagctctgtgccgtcgccggtggccagccgaacggagcccggccgggggacgccgatcactcgatacggaccctcccacattggtgagagcttgctcaatccagcacgcgtttggacgcggcgtaggacgaggtcgtcgacgcagagtgatcgggcccggacgtggcgctgatggtagcgccgcaggctctgctggtagcgcgcggctcggagggccgcgcgcctccttcgctcttccaagtagtcgaggtcatctctgcgaagctgatcttgatcagcctcgcagtacatggtggcccgaggggacctcagggtgagctcggatgggagaaccgcttccgcgccgtagacgaggaagaaaggcgtttccccggttgctcggcttggtgtggttcggtttgcccagagcaccgctggcaactcctcggtccacgaatcgccgtgcttcttgaggatgttgaaggtcttggttttaaggcctctgaggatttctgcattggcgcgctccacttggccattgcttctggggtgggcgggggaggcgaagcagagcttgatgcccatgtcttcgcagtagtcgccgaaaagctcactagtgaattgggtaccgttatccgtaataatacggttaggcactccaaaccgggctgtgatgtccttaatgaatttaagtgcggagtgcttatcgatcttgacgaccggataagcctcgggccacttagtgaacttgtcgatcgcgacatacagatactcaaacccgcccggggcccgcctaaacggtcccaggatatcgagcccccagacagcaaatggccatgaaagtggtatgatctgcagggcctgggccggctgatggatttgcttggcgtggaattgacacgctctgcaccgccggaccaggtcgaccgcatcattgagagctgtcggccaatagaaaccctgacgaaaggctttgccaaccaaggtgcgcgaggcggagtgggctccgcattcgccttcatggatatcggcaagaagctcgacgccttgttcccgaggaatgcacttcaggaggattccgttagccgcgcgccgatagagggtcccttctaccagcacgtagcatttggagatgcgctggacgcgttcactcccttcgcggtcctcgggtagagtcttatctgtgaggtatacttggatctcagcgatccaagcaatcaatctaagggagctgggagcgctcccctcgggtcccgaggcctggactccgacgggcctcgggggccggtcaggcgcgtccgtctcccctaaggggtcgggtcgcgccgacggctgggcaagcctttcttcaaaggcgcccggtggggtctgggctcgcgaggaagcgagccgtgagagttcgtcggcaatcgtgttatcccgtctgggcacgtgccgaagctctatcccgtcgaaatggcgctctatacgccgtacttggcgcacgtaagcgtccatctgcgggtcagagcaccggtactccttacagacctggttaacgaccagctgggagtcgcctaataccaggaggcggcggatccccagtccagctgccaccctgagtcccgcaaggagtccctcgtactctgccatattattggtcgcccgaaagtcaaggcgaaccaggtatctgagaacgtctccgctcggcgaggtcaacgtgacccccgcaccggcgccctgaagagacagggagccgtcaaactgcatcacccagtaggcggtgtgaggcagctgcgaggggcccgagttggcctcgggaatggagacgggctcgggagctggggtccactctgccacaaagtcggcgagggcctggctcttgatagcgtggcgtggttcaaagtgcaaatcgaactcagaaagttcgattgcccatttcaccacccgtccagtaccctctcgattatgcaagatttggccaagggggtaagacgtaaccaccgtgacccgatgcgcctgg

SEQ ID NO: 6765 - DNA, 15516 bp, Oryza sativa
  unsure (1)..(15516): unsure at all n locations
cagctcaacacctacgtgagtccccccaatttccattgccaccactagtgttgttccctgcttgtcttcagttgttgggaaattgtgtgttctgttttcttgttttggatgttgttgttcagttcttggtccggacgaattacctgaacaagcgatcacatttctacagtttgagatttcaggttggattgttagataattaaaatgggtgtgttctcacttttgtggttgccattatgttttgtgccacatcgtgtgtgttgagtattgataggaatcttgacactagaattaaatggatggagcattgtaaaattttcagtgcaaattgtaaacccggcggtattggttaaataaatcggttgtattgtgcatttttccactcagtgcaagaactttgtgcatgcacaaatgcacaattatgtagcaatggagctagaaactgggatttacttattggtgctgacctgttggttgtagaaaattacgatggctacaattgttcaacggactgttttgtggacttgacattatttgcccaaactcagctatgtccaatccttttcagacacatgcatataaaccctcaattcctgaaatgttctcaatgattcagaaagaggaaaaaaatctccatggacgaactactcagtttctgacatgctgttttcttcaatttgttactgtgtagctagatggatcaagacagcggatgaagctacaagaatctgcttgtttgttctagaagactcctttgatcaccatcaaaaaaaagaaaaagtgatgtagtatactgctacctgttctcttaataatgctatgataaattttgtcgcaaaactatgtgaaaccaaccgttttacatactttgtgtgacttgctatcctaattgagttttgtctgtggcttctgtacttgaactaactatacctgtaatattctttgtgtttgcaatttgcagggtttcagaaagattgatcctgacagatgggaattcgcgaatgatggtttcctgagaggccagaggcatcttctaaagatgattaagaggaggagaccattgtcttatctccctggatctcagcaggcacttggcacctgccttgaggttggtcagttcggattagatgaagagatcgacaggctaaagcgtgacaagaacatcttactcgcggaggttgtgaaactaaggcacaagcagcaaagcacgaaagccaatatgcgagccatggaagagaggctgcaacatgcggagcagaagcaggtccagatgatgggtttcttggcaagagcaatgcagaaccctgacttctttcaccagttgattcaccagcaggataaaatgaaggggctcgaggacacattctcgaagaagaggacgaggtcgatagacatagtgccatttctcaaccccggggaggtcagccagggcgatcaactcgagtcgacattgctgtttgatccaaggccatttgctgaactgaatgatgagcctgcaaagtctgaactggagaatttagcactgaacatccagggtcttgggaagggcaagcaggatgtcaacaggactcgaaatcagccacgaaatcaggctagcaacgaaaccgagttaaccgacgacttctgggaggagcttctgaatgaaggagcaagagatgatgctgggattccagggatggagcgaagaagacctagatatgtcgatgcattagcgcagaagctgggttatctaagcaatagtagccaaaagtagatcaagtggctccgatttgtccaaccatttttgtgatagctcttattgtatatcggtgtaattgtattatagtgatagttttatagcgataggtccaatttatattgcggatccggcgtgctgtgtagtatatgtctggtgatgtaaagttgagccatcattcttaatggtatatattgacaattttttgcattgttgtggccttctttttgtcatgcactcgtctatgctcaactgcttggtttatggtgatgcctgctgaaaaacctgaattttagctgatgccggctgtacgcggccgctgtgcagacatatctgggtgaagtctgaagaccatacatgtgaattttgtagtaggataaagtgagtgaaaattacgggtgaagtctgaagaccatacatgtgaattttgtagtaggataaaacgagtgaagtctgaagatcatacatgtggattttgcagtaggataaactgagtgaagtctgcagagcatacatgtggattttgtagttggataaagtgagttcagacttcaccccgatgagtttgcagtaggcaggatcaactgagcaagtcgctctggatagatttgttggagaagaattgccgcttgggatctggaacattagctagacgatggaagcagaagcgtgcagtacactactgtagagtgtacaggagggtgattcctggatgctagtacctgattgatgaaagttgtatacgatgattagcttcacaagaatgtggtgtgcacctggttgtgggccttgtggcgacttgactactactagtagtctagccgtctaggggtgtgtttagtttctgaaaaaagttggaagtttgggaaaagttgaaagtttagaaaaaaagttaaaagtttatgtgtgtaggaaagttttggatgtgatgtgatgtgatagaaagttgaaagtttagggtagtttggggtgaactaaactaagcctagtactccctccgtcctataaaaaacgaatctatgaccggatatgacatattatattactatgaatatattctaatatatgtatatccagattcatagtactaagatgtgttatatttggtatttatgggatggagggagaacttcagttgttgtgtacttttatggtcgatgatcatcggtggcgactggcaaccacggcatgaaccaggagaattttgcgcagatgcacgcggggaatagcaaaccgcgcacgcatgggccgtttagctgcccgcaccgcacacggctcggcgaggagcacgcgcggtgggccaagctctgggaatcccacgtcaacgcgtgtatgggccaacctcgatgagactagctgatggaatttggaattgggccgagttgctgggctcttcaccacaggatcgcactcgaacccacgcgacccccaggcccagcagatcgatcgctgcgcgtcggctctttgactccacttctgctgcttcctcctgaggctactaaattgtcacgaccttaatttctcatcaataaattaactaggatattacatttcacaactcggaacacaaagagtacaagcaaatagccgacttctcctcaataacttaaaaagtttttttttacatatgcaactcaatacatttaacggaccctacggcatatttgcaaacaaaaaaaaatttatgaataaaacttttatatacgtgttcttaacgatctaaaagcaaaggctgaaaaataaactttgatgaaaaaactctaaaatcaactcttaatttaaggtattcaaattttgaccgataaacataatcgtaaataaaaaatgaggcctttaacatctcctaaaatactgacttgtagttttgtctgctagagaataaaagatgaggtgaaaagactgatacccgtaattaggttccttgtggtggaacctatccaccctgtttcaaatcctaaatttgacataagtgttcgtatttacggctaattattcttttagtggtaggtgatgtacccgttgacaacgagacgtccgtggtgacttcgtcattttcaagatatgccgccccagtcttctataggtgctcatacgggtaggggtgtgcatgtgtgttcatagtgtagtaaaccagctcaactattagcggagcaccaaacctgctccatgtccatcccaaggcattgaagcatgagaagatgtagaacactgcacttttctctttgccctcaagaacattgcagaagtagacaatgaacagagatgtggggctttttctttattatagatatgatatggagtataaaccaacttgagatgtctcacctgctcttgtatatatgagtcttaagatgaaataaatcttatctctactccggtttagattgacccatgagaaacttatctcctacagatttatttcacaacacatagggttgagtacgcgtgcgttatgagcgcatgtgtttatattgtgtttcttaaataatattaaatggggttagaagggcccgagggggttacgattatttacaaattaaataaaggttagttggtgggggaaaatagtgctctagaaaatcttatattttacaagttttattaaatgttacaaatctttatatcttagaatgaaaagagtatcttatacttatcttacatcatttgcataggccagaagagcgacacgtaacacaaacgacacaaattaggcgtggagatgcatgaaaggaccattgggtgtgcagcttttagaaagccccaccataagctaatcacaaaaccttggcatgcatcacatagtgggcgagcatgccatatattctactttccttccattctccatatatggaccacctcccacactcctttgaattattcttgcgcatatatcgatcatctaccttttctactattacatccattttatattataagtcgtttaacctttttcatgataaatttgactaaaatttagaaaaaataatattagtactttcaacataaaacaagcatattatcaaatatattcaatattagattttataaaactactttggtattttagatgttgctaaatttttaaataaaaccactcataatataaaacggagggagtactatacacaaaaaaaaaaaaacattagcctctccaccaaaaaggtctctccataaaaagccctaatcaccttctcccactccaccaacgcacgccttattttgcccatccccctaatctctctctttgataaggtttcttctcccatatctctctagctagctactaggcatggcgattatggaggtagatgagatgggctgttaattcgctttgtttgtgcgccataagcaggtgaagctgccagcatgatctgaaagcatctcaaaccagcgatcagatcatccggcagcttcatcttctcatggcagcacaccagcttgattgattgatgatgaaaccctaggagcaggtagcttggcttctcgatcttagcctgatcttatacaaggacgatcgattaggccaaatcaggagttcaacagtccatgtaagttcagcttcagctttttttaatttgctccttgagatagcaaatcaagatctagggctttctggaggagatgaagtcgtgtacatgttcttagattgcgatcttggtagtttgtttttgtttctgcagatcgagtgcaaatatatgtcttttagatctgcatatattgatattggatttgtaactttgaatgtgcaatttgatctgtatatgcactggatatgacattattcatgcatcttacatgttttatatcacttattagtatgcagaaattgaagtctgaataattaagcagtaggatccatctgacgaatgaacatatatttatatataagctattatattatcaggtaacgcatcagactatcatctcatattgccccgtgtccctcttaaacacaactacacaacctaatgttttatatgtatatgcatgtgtgccatacacgcttgcgacatacatttagatgttctatgatatccattcactcatcggaatatatctgacatgcatggagtggtgaattgaagttcccccatgcatcctctttttcaaaaaaaaaaaaaatctatatcatatatatatcctctatcccttgtctttcctactttcccttacatcatacatgcatgaagatgtacatatatgaaaaaaaatgattaatactagtattttgcagttactatttgtccaatccaaattaatcttctgatgctattttcatatggcaaatcttatagtatctcttgtatattttttttctctttatcttaacgatgaagttgttaaagcttgattgcatacgttctaataattcgtgatcaggaagaagtattaagttacagttcaagatcagggaaaagcataatttcatctgagtcttgctctgatcccgttgaaaacgttttaaaatcttgcaatatgcatggaccactactatgaatcaacatatcgccatccttgatattcattaactgtggtggcttaattagttgcttcggcatatatactaatttgacagtacaacagttatttcagatgctgcgtgatctgaagaattttcgtccttagaggcatcttacgcgtgccatccatgcctgaaggatgatctcacatctgagcaaattaaatgcgatgaattagattcccatatttactcgacctcttattgctagggatatatataacctctctttggtgcgtactaatcgtctgattatctcctgtcactgttgcttactcaaagctaattatatgaggctcatttcctctcttttctactgtactcaccagatgcaacttttctgcactgcagatatatgtggacgctcattgtcatccaaaagcaagattagctcctctaattttgagcactgacgcatgccactgataaaccttttaaactatataaacaaactttcagttgcaagaaacgatacagtgcatgtaactatactataaccaggaaatgaaggggactgatgtctatagcatggcgccgacgaccactgaatagatgcatgcgcgcatcctctggcttgcaagaaattgcctgtcaattctggcaggcaacaagaggatgaaaagaatcacaacccctgaatggtcacaaatatttcacaatagaagttagtattttctccgtttcacgatataagactttctagcattacccacatttatataaatgttatgtgtctgggcattgatagaaagtcttacattcgtgaaaaagagggagtagcaacttaattttaggtccgtgcagtgttgatatccagattaacgaaatgtttttttttatccgtgatatgttcctctgtatatggtctgtgtaatacacatatactacttttaattattttggttttcttctcagatttcttcttgcgatttacttatgttaaagggtaattttatcattcttaatcaggtactgtcacaccccaatctgataccgccgtacaacggcacctgacaggagcgtgtcgtagggaaaatggcgcgaaccgcttcctacgaaaccgcgatctcggtaccagtcccaggacatagtgctggtacccacggtgacaaatatgaatcatagcaatccttaaaataaatagaggacttatttaccttaacttaggttgcagctcagacagcccgagaatacaaccgacgacgcggatgaggaaacaccaacagcagcagcagcagcagcggaaccaacggtctaacacccaacaccacaggcgacggctgggaaccaggacgaaaccctaatcttcacttcactttatcttctcttcagggcggaggaactatatatatatatttatatagagcaagggtgagtactttcgtactcagcaagtcacgggaatttaggtgtttaatgcaagcttggaagagaggcaaggttgttttgcaaatcttttgtttgaaatcattttgaaatcactaagtgatttatttctttttaagtttgggtcgaaaagagaaacttgcgtctcaaatcgacttaagagatgcttttcaacagctcaattggaaatgtaccgacatcccgggtcagatcattacttctcggctcctagagccattccacttgattaatcggctcccagagcctttttcattttctcggactcccagagtccagctgcccagcagcacaacaatccgcttccactcgggaagcctagtctatgatgcccacagacatcccgaatcacacagattcgtttctgaccactcaggtcatccatctgccacataggctgattctggttacgattcccataccacaacaacttttcacaaagcacaggcaaacaaatctacgcaacgggaaccacctcacatccgcccatgaccgtgggcacggctgttcgaacagttagttaacctctgcagaggggtacactttacccacaagacacgaacttactccagacactggccggtgtcagaggttcgcgacaaagcctttcccaagccgacccagggatacctcatgccacatagaaggatcaaatcctcacataaacataggccattttaggcgttcacaaatcaaactccaaccacctcgatcggtaattcagcaagcttctcattcttgcattaccaggaacccggtttggctccaaccgaccccgccccggcgttcccaactattggcatgcgaggtttccctgaaccgactagttacttagccagggtgtctcattccaccttgtggttgcattttgattatgttcgatgagttttccacaggaatcggtccttatatgcgaatacgggacagtgccacataggcacaacccccgcatcgcgagttttcataattcattttattttcaaacacacctacaccacatgtcgggttttgaaggcttcacaaacccatttcccaagttttcgacaaacaacggtgtatgtgggatatttggtatacgcgctcagagagcacgaataccgaggtaccacaagggtggagcgacaaggaatcagggtagtacgacctacggaaattagtgcgactactgggtaggtccgtcggtttggcacgcaaaccgaggccaagcaagttaagtgtgtgattctaataatgcaagttgcaaacaaaataataatgacttttcaattataggagcaattgatcaaagggtgacttgccttgctcaaggtcttcacgaagcttcacgaatcttcgagaaaacccgcgatcgacgaaaatccgataaccacaactatacgcaaacaattaaaaacctacacaagacccaaaataaagatcctatttagactagataatagtaccattagatagatctcaattttacggaattattggaagttgaacggagtcaatcggatgagcggttgagaagatatggattttctaaggattaaggaatttctgtctaaagaaaaaggatttaataatttattaaaccctttctgcaaagaaattgaaggagggatatgatttagacttcctcgggtggcttgggtgcggcccaagagggaaggcacggctcggccgaactaatgggccggccggcccggagaggcggcccaagggggcgcggggagagtgagggagagagagagggccggtgggccaagtctaccttgcggggtcccgagtggggcccgcttgtcggtggcgcggctcactgtgggagcggcgcatgagggcggcgctagggtttcgggtgagcgcggttcacgcgcgtgcaccggatggaccagggatgcggcgggcccacgcgcagccggttggcgcaccgtggaccgcgcgcgggggggggggaggaggcggctgaccggctctgctcggtcaaagccgaggtggcgccgacgtggcgcctacgtggcagccacgcaggccggcgggaggaggaagaaggggaggctgagatggatggcggacggcggccgtgttcaccggagcaagcgcgacggatttggtcttcgggggggcacaccggagtaacgagggcgtcgagaaggagcgagccaacggctcggattcgccggagggagttcgacggcggtggaattcgacagcggcgtccggcggcgagagaaaggggaaatcaccgaggggcgacgaagactcaattaaaggcggcgggagcatcttcggtgttcaaggagctcatttccggggtcggatgggtctgagcggcgccgtgaaggtccggcgatgagaggcggcctccgggggtgggcggcaatggcggcggggccatgccgggtggcggcggtccttggggcggcgtctacgcgcggtcaaggggaggagctggcggtcgcgcccgtggtccaggcggtggcaggcggtgacgccgatggtggtagggaaaaggaaaaaggagggggagaaagggagctctgctccttgctgtttcgggaaaagttgaaggagggagagggagtgagagaggggctgcctctctcggctttggaagctagcggcgtggagcggcagagcggcagcgcacgacgcaggcgacgccagggcttgacgcggcggcaaccgggcggctgcgcggcgcaggcgcggcagggctgacggcggcacgaccggccggtcggccacgcgcgagcgcgggaaagagcgaaggcggtggcgggttttgggcggcgacggcgggaagcggcgtcggcgcgagagagagaaaacgagagagagagggagaaacagcgagagcgagagagctctctctcggctcggctcggcacgtgcaactcacgtgcgaggctgagggaggagaaacggctgagggagggaggtggctaaggggggaaacggcccacaacacccgagggaggtaaaatagacttttgtagagaagactgatttggagtggattcgaattggggttttggattcgaattcaaatttgacattcgaactcgatggtttagggaggaatcaagggagactcgaggagaagtcaaggaagagattcaaaacggaaacttggatattttttttgtagtcggagcgaatattcggcaaggattcaaaggaagggattgactttcggaatttgatttcggagacttgaattttggataggaaatcttgaggtggaggatttttgatttcgatgagagggaacaacgggatcgaattgagatccatggcataacttagactctcacacaaagaacgaaaattttcgcaattaggattttgccgagttagtttttaacgactcacgaaaagcggagcgttacaggtaccaggaagtaaaatattttctaatataaaatttagtacctcctggcattaggtatatggagatataccaaaatttttaatgtaaaattttaagtacatttttttcatgtactagctacctccgtcccaaaagaaaaactcacttcaaggcttaaatctggatatatgcaaaccctaaagtgtttttttaagcaaaattcatgcgaaattcctgggaaccattgagccacttctgagcacacggcgacacatgtaggttatatacagtggtgacaaatgattagagcactctactcggttgaactttctatactcatcatcatccaagttatccatggatggataaagcgcacaaaaagcactacactacaagaggccaacgagttgcatgaagaagatatagatatctaattatctatcagcatcaccaatgattaatcatgcaagagaccatatacagttgcaccgtctagtcacgatcgattagtatcatagtacgtacacctccattcctaatataagtatctataacttatttctacaattttaaaattgaagatatttttgcctgtagtttggtacgtcattcgtgtataaattggtttttaagtttgttcacttttaaaaatacatattcgtatttgagtcgggttataagttcgttcgtttttagaaatacagaaggagttgcataagaaatttatttaaaaaaactcacatactaacttaagatgattggacttctaattgtagctcatgattttctagacaaatatatatccaaacaaattctcatagtgaatttcatcttaactaaaccgtataacaataataggattaaaatagtctttacccgttgcaatgcacgggttttttttatagcttagtaaaacataaaagtataaagaagcaatatctctcggtcatctcattggttaaatctcaaattttaaattgtttagatttcggtcttatgtacttgattgactgaaaagatgtttagattgttgtgcactggaatcaatgttccagaaatgcttatattgtaataaatcttagaaatatttatatttgagaacctgagggagtataagcaacttatatatcaagcatactaattaatccttagatctccccgaaaagaagatgtaatcctaggtgattacatagtgcatatttctactcaccggacaagattattctgcaatctgcagattctgcactattgagaatcgattcattggttattattttatatacatatattggcgtaagcagccttggtgcgaatctggttccaactttccgccttccgagatcgaaagcgtgttccatccacatgccgctaactgacagcgtcacagcggttactaacgtacccgtcttctctgttggaaagcgtattttattcgcaacgtgcggttcttccagtttctcggcgcctcggcggtgcccgcgcagcgatcgaggggaaattcctgagagttaaattcgttgaatcttaccatcttgtttgttatgattggatccatttgcccttgcatgcttgattttgcaggtgtgggcgaaggggaagcctcgaagtgcaaagccgcccctgcttgcacgcgatgtgttcggtgaaatgcctctgggacgcacaggtgtcatttcccgaggaagctctgttctcgtaacattttgaggtagaggtcactgattctgattttttaacacgatgttttaagcaagaagttaacttttctcagcaactcgatctaacttttagggagatgcacattgccagtggtgctactacagattactgaaccataggcgctctatgctgtgaaaaggtaaatccagtaatgctgtccgctgttctccacaatttttctgaaattggtagcattatgtctgctttgtgggcattgatgtgccactgccgcctcagtcaaagttaaaatcgacgggatctccatgttcctgacacggcaaattcttcgattcgaatgaaatgtttgctttagcatcctaaagaaattcttttgttatatttatttttcttttaatcaataatcagttatgccaacacggtgcacaacctacaaacagggcagctaaaatttcaatcaaatggatcaggagcaccttctgacattgaatgcttgcacgtcatggaatgtggttaatgtgatcaactgatcatccatgtgctgatgggatctttaagtagctgctttgtgtccatcaccctatctgtcaacatcgtagagttcttcaccatatcaactttgaggtgtttcagattctttttatttggttgctgtcatagttagtggagacaatggggatatccaggcaaggaatctgaagagtatgtaacttctactcacgcgcatcaaaatttcagtatctcatcttttactgcctgcttatctggtgagatattataagagggaggactcagtaaactcctctaaaaaatggttcgaagtaaaccatttcaattattcagctcagtacgcaaaacaatgaggctggctttaggtatgtatccttcctccctgcttccactgtaacagttcattagtctaagtgaaattatttagcaattaggtcctaggtaactagctgagtagactaataaactaggctctaaaaatcttctggatcttattttgtagcagaaggggttgaccaggactgctctgtcaaagagcagaatgtccttaacatcagcactgcctgcttgcaaattatatgcttacatggtatgtctcttgctctcttcattagtcattacaaaacagtgttcgtagagatgcatacttagatccatgctattgttgcccaaatagaaaaaaaaaattatgattaacatcgtaacatgttctgtagaatgaatgggtatggaagcattatcagtatataccattgatagactagctagctgattcgcccctccttccagaaaacagagaagtgattggttgaatgtactcatgaaagtcgcaaaccaaggaccactatggaggcttcaccttaagatatgcatattaacactggaaactatgttcatgcattggctggcaatggcacatacatggttggttttgtcaaagtgcattgcatgacaagatctcatacgatttgatctctgggttctaggaatgcctaagatgcatgcaaagtttacttctagaaaaacccaaataaaaaaaagataatattagaagtatatacactatttccctttttttcttcattgtcctgaaaagattggtggcaatcattccaacagtagtgacagaactcataaaaatagccctgtacaatgtaaggtgtcccccttgtacattcagtcattcacttccccttatatataggggagagactagagagggaccctcaccctgagctcattgaggtggccaaataggttctgatcacacctttctcctcctccatgcttactacactggcactgtagtgcatgcaagaggagaggcaaaaagatgatgatgtccttagcagcttaggttgtggctacctagctcttcaactagcttcttcccagaatccacatagagaggcagagctatatagcagagtaggaagatacatacacacacatatgcatataattcctagctctagctggtgctagctctaggagatgtgtccattccattgcagtgccacagagggctcgactagactagtctgcatagcttctttcggtttacacaagagtnnaggtgtttgtttccaagaggccagagtgatcgatcgagcttagctcatcggttcttgggccatcgatcgatcgaccgatcatgcaggggcagcagaagcagaatgcaggtggtggtggtggtgacaatgcgagcccttgcattgtgctggatgggcccatcatcgtcggcgccgggccgtcggggctggccgtggcggcgacgctccggcagcacggagcgccgttcaccgtggtggagcggtccggtggcgtggccgacctgtggacgaaccgcacgtacgaccgcctccgcctccacctccccaaggtgttctgcgagctcccccacgtcgccttcccgccggacttccccacctaccccaccaagcacgacttcctccgctacctccactcctacgccgcccgcttcgccatcgccccgctcctccgccgcaccgtcacccgcgcctggtacgaccacccggcctccctgtggcgcgtgacgacgacgacaacgtcgtcgtcggcgacgtctgtgatcaccgagtacgcgtcgccgtggctggtggtggcgagcggggagaacgcggaggtggtggtgcccaaggtgaaggggagggagaggttcgccggcgaggcgctgcactcgagcgagtaccggagcggggagaggttcaggggcatgagggtgctggtcgtcggctgcggcaactctgggatggagatgtgcctggacctctgcgagcatggcgccatgccgtt

SEQ ID NO: 6766 - DNA, 7593 bp, Oryza sativa
agggattcggcccatcgaaccgcgagggaggcgaaatagacttttgcggagggatttgatttgggaaggatttggattcgggatgaactcgacgatagatcggggatttgagatctgagatggcacggacactagacaacaagcaaagaaacagatttcgcaattaggatttttaagagatagttttcccgctaggcgccacgacggaacgggcgctacagtccgcccccatgtgcgcggatcttgctatgacaaggcagatctagagcgggtgatggcgggaggtatggaggtggctgcggcaacctcagcggcgggcgggtgatgacgggagtggcgacgatggttgcgatgacctcagcagcggtggctcagtctcagacggttggctgggcgtgggactgccgtcgacgaaggagccggaacagcggcggcgacaggctcagcctcaaacggccgacgggtgtgggaccgccgccgccgaaggagcgggtaggtgggggggtttcggtgcttgggttttttcttgttgggattttttttcgtggttatttttttcatgcggttagcttaagcacccgtatgttaaaatcggatttttgcaaagctttgggtgcaagcgggcaacccgtcctcatgcaaaaataataattttggccgccgaatctttagtagcgagtgtcaggcatatgtcaaaatcagaatattaaattaattttctgtaatatgggaatatgcgatattcttatgttgtacggtgattcctgaaccaatagtagcagtatcatctatatcattaattctgcagtcactctactgcagcctgttgagggacaaatgcgatttccttggaacaaaactaacatgtaaaattaagaaaaaaatcagatttaaactattggcataaatctgcataatgttcaaattacaaaccacatagctagcactaccttttcaaagttaaggtgatagtgtacacgtgcccctagtaataacagaactcaaacttaaacattattatgtctcgacagacatttccagcaatccttacaattactaactaactttgcatcatgcgtgtattctggtcggctatctgctgatctcgtatataggacactgtgattcattatctaaaaaattattaaagcctaactccaaaaacaccgtcaaaaaactgtcagcgctgccaagtactgatatctgaagatcctgcaggcgccgatttgcctgtctaccatatattaattcatctgaattgacattaccttattcatgtagaacatctgaatcttattgagatctctacttgtttatgtagaacatccaaactgatcaatcatcggtttgattaattgcagcaccgatgcagccaaattaaatactatcgctccgtaccaagacaagcagtaatctgattgcaccgtaccacacggaactctcactctcaagagaccagatcgatttgctgaaaattctagcatctaagggtgtgtttaggccctatttatttccaaagtttttttttcaaacttccaactttccatcacatcaaatattttatacacacataacttttctatcacatcgtaccaatttcaaccaaacttccaaatttcagtgtgaactaaacacagccttaagttcacgtcaaaattggaaatttgattgaagttgaatgatgtgacgaaaaagttggaagtttgtgtatgggaaagttttgatgtgatgaaaaagttgaaagtttgaagaaaaagttgggaactaaaccatgcattaattggttaccttcactttctctatacatgcatgtgtggtcagtactaaacgcctgactgtaaaaggctaaatgattttttcccactattttctagcagggcgaactatcggtgtccaatatatagtcgacacacgcatatgcaatggcaaccggtcaataaatgcaacacttgcaaataagaaatcagtggcatgtgtatgtatatgcctgtactgttgaatatagtcttatttgatactgttgaacttgaggttataattggtgatggagagtaaagttaaagtcagacaccataaccggataaccctttaaatagagagggtgtgttacagtgtaaccatgacgactactataatataacgtagacatgcacatagagagaggatgacgatgaggctaagaactcatagcggctagtaggcgctatgtgagttagggaggaacaaccataattcaagtttcggggattaagtttcggatgaagtaagacttatcaatacacagtattttcgaacaagttgaagtactatatagtactgcattagctaaaatttggacctactgaatctctcaagaaaaggtccaaacacatcggtttaatttatcgtcgtaatcttcgggatccaagtcagtgcctgcgttattgtatggcagcctctagtagcagcggcgcgcgacggcgcgagatcgataaattaatgtgcagcgcgtttatctggtgtcacgacgactcaggactcacgagaatgcatggcaacacgtaccggccgccgggtcgttgcccatggcaccgccacacggtcggtgtgtgacagtgtgagcagtgagcgcgcgcgccacatgctgcgttctccattgccacgaacacgaagtcgtcacggacccgtgcacgcgctgcaaatctacctgcatatgcatgcgctttgacgcacgaaacactcaacgtggagcatatcaatggcacaacgcacaacgctggtacatactgtagcacactagcactaggacactgtacgcctctctagctacaaagtgctaggctactgtagagctagcccggatgaaaattgagacctatatcatctatccatggatctgatcgatcgatatcgttcgaccatgcaacgtacgtgcgaggctcttatctctcttgcggtggcgccgaccgccggcggccgcatttactgtgtctcgggccgcgaagatcgatcgaagaggggaacatggggatcgagaacgagctagctgaccatggcggatcgatgcgcgcgcgacgacgcgaaattccgccctgattggcggtggtggatggcgcgcgcgcggatgccggttgcatttatgttttcgtgcgtgcatttgccgtcccgcgtcccgcgtcgcgcgctcgatcgagcatgggatggccggtttcgcgtagtgagtagcgacgttacgtacgggaagatgcattcttgccattttgaattggttgtagaattctgtgtaggcgcgccggccgaatgggttctgaaaaggatggcatgcagttttgtgtaggttttctatcgtacgtgtgtgtgtgatgagagttgtattatcactttggaattatggaagtctgcatgtacgtgatggcccagaaaattaagttcagcatatgggcacctgtacgtatctagctatagttgtgggattttgatttgctaaacttcttatatatccattgcatcgaacgttgtttaattgtcactctcagatacattgtcgatctagttatctgctgaaacgatcatgtcagttcctgtataccaatggctatatctacaagaacagcttgaaacatttctgttcagtctcgacgagtagtcgacgtaaccaattaagagaacagagaaggacaccaaaacacagaagagatcgatcgacttgtcgagctaatcaccctgaataaactacagaccatatcagtttttagcccttcgtccagggcctaaccgagtagtagtaggggttgttaattcgcgcatacgcgctagtaatagagccgtgcgcgcgttttccttttttccttttttcaaatttggcgtacgtctccctcccctcagcggcttagcgcgtttttcttttcgatttttttaaatctatctcacgtgttttcaattttgatttgaaagctttcaaatcttaacttaaaagttttacaatctgaattaaaagttttaactcaaaattcaaacttgaacaaatcttgagtcgaaagttttcaaatctgggttgaaagttttcaaaagttgacttaaaaggtttaaaaatttgagttgaaagtttttaaatatgaattgggagtttcaaatttaaaggcgaatgtttaaaaattgagttagaaagttttaaattatagatgtactcaaacatgcactaatcacgtcgttaatcacacgctaattatgaggctaattacgtgaaggatgacgggcgtgtgcatgggcagtgggcctgcgcgtccaaaacgcgcgcgagttggctcgccagcgcgtacatgcgcaatagcaatctctgtagtagtggccattcaagatgttgtaccgtacctagctgttggtattatccgatgatatatatactccctatttaaaaaatttatgagaaaattagtcacgtataaagtattatttgtattttatgatctaataaaagatactaatcgtagaaaattttttgataaaacaaagagttagggtgtgtttagttcatatcaaaattgaaagtttggttgaaattggaatgatgtgatggaaaagttggaaagtttgtgtgtaggaaagtttttatgtgatgaaaaagttgaaagtttgaagaaaaaatttgaaacgtttgtgtttaattcacatcaaaattaaaagtttggttgaaattagaacgatgtgacggaaaagttgaaaatttgtgttgtaggaaaattttgatgcgatggaaaagttataagtttgaaactaaacccggccctaaacgttgtatccaaatgaaatgaaattttggtagtacggagggagtaggagcgtgacggcggggcggggcctggatggaaaaaaacgcggagatcgcaagtagcgcattgaaggcctggggaagaggattcatgtgaccctgcaccggagaaatttgattccattatcgtcccatcagcctgagcaagatactgtgtgcggtccaagcttcggcaatgggggccctagcttcgctgatggtcgccgcggtttcggcgtcgacgacccctgctaatggtgaactttaatggtgaactttgccgagcaccaccactgcagtttcacaactgttgatcacctattcatctgcatgcgtatggctggcatgtgcctaaagaatcgaacatccatatgaacattgtgaaaccgggggggccatgcatagcggtcttgtgtttggacgccaaaaactgttgagcatatgaccggttttccggtgaagctacaataatctgctagctgttctacgagtgtgacgtagtatacgttttcacttacagctaccatattaaatcctgcaaatcttgacaggtgcgcaacagttcaattaaaactggtgaacaataatcctatcaacacaaaacactaaaaataaacccctcaaatcgttggtgatttttttttagacatgtacaaatatctatatacaaaggcatgtacttccacatttccataaaaaacaacctagtgttagagctgttgttgacgaaaaaatcgaacacaccggcctgggagatctgcttagctcctggcaggtccaaatcttgatgagattcgggcgtgccagtcagtttgatcctgcaactgacaagatatgcaaatagtagatcaaaatagccgatcggatgacaagccgatggagtagtttcagccgatagccgataatagccgatgccgataccaaccgatagcgatagggtttaagcaatcggctatatgtccaatgtagataatgatataaaggcaattggctgatgatgatgtaataaaataacaatataatccaatataaaccaattagctagcaatgatatgataaataagcatcgatccgaaggttaaagcacacatcggctggaggtccggtgtcatgaaatccacaagattagattaaacaatgaaacctttgttgtcattggctaaatccaacttatatgtatatgcaatcctcatgagccgatgcaacgtccagataactcaccggctgaaaccccgatgaaacccttattggcaatcaataagcaggctagagattatggttctaagcacgacttagtagatcaaacttaactgatgcagcactaagtatgaaaagaaacataatatctagacaatcaagccgatgactgattttcagggtggtagatgcctaggctaatctaatctagaaaggcgatttagctgataccggcagaaaccctaaagcgagagatagtcgatagagctaaattgatatgctaagactagattaacatagacatatgataaataggtaggcaaatatatcatccaaaccagagcaattcaagaggtcgaatgtactgatgcagccttgaacgacgccgacgtaaacgatacaattgcctgggccggcggaacattggacttaccccttagccggagatcgaacactgatgcagccccgcgtcaggtgccaagtcccgccggacgataaaataaagtagaaaaggtaaaaggtggcgatgcgccgaattgtattgatcgtgaagatagattacatagaccccgggtgtacatatttatacccacgggttgatacaagtccttatcggataagaaagaaactttcctaaagataaaaggaaaagataaagttcttataggacactaaacacactttcctaaagataaaaggaaactaacaaactattcctaattaatagataacttgccatgccgcatcctctttgaactcggtctcatctggataagctccctttagtagatcaatttccttaaccgaatatagcaagaatccgacaactgacgacttgacaactctcatcggctaatcttaggacttcgaagccgatgctgactctaagccgatgactacttcgggcttaccaaatttcactgttaacagctgtccagattcattttaataaaaaaatatcacctccaatgctagattagttttctttttgaaacggtgggagtacatgtgagtaagtagcaacatcatgatactatgtattgctagatgctttccttcggccggtcagtactgttaggatgcgtttgattgcaagccacactttaacacagtttaccacatcctgacaaatttaataggtgtttggttgtagccacaattatcgcaatattatcttttccaactaattgggtcctacgtgtcaatgactaaaaaaattattgcaaaatttccttaggcttgataaattatggctaagaatttaatcacctcgccttaggcaaggtgtagcaaactagcaactatattattcacacatgtaatagtgtgtcccatgatctcccgcgtagtacgtacgcgaggctacatcgtggttaactccatgacccatattcacgtagtacgatacccatgtgtccatgacccggctgcgcctacacatgactacgtgacacggtcgggagatcatataccggcgcctcgtttttcttcctacttggacgcatatgtacttgtacacgggcaaagcacatgccacatggcgccgcaacttaattaaccgctacctcctcaaccacagcttcccgccattattactccccccccccccc

SEQ ID NO: 6767 - DNA, 6003 bp, Oryza sativa
gtcacccacaacctcagcggcatgggctgcagcgccggcatcatcgccattgatctcgccaagcacctccttcaggtacaaattaattactactcaccatgcatgcatgcagatcagcacgcaaccaaccgttgtaacatcttctcccatgcaaaatgtacaacgttcgtgcatgagctaattaaacacgaacgtaatagtaacaaagaaatgacatatcaacgttggacatgcatgcaggaactaatagacgaattataactagcagggtgcaattatacaccagtaatgcaatcctgacagtatatgaactgtgtcaatgagtaggcaaggatataggattatattacacgtcccagtctgtgcgtaataaagattccttgttttgtttttctggtcaacatatttaagtatatctggagtcaaccctgttggctagatttaatttttaaggcatatagctttattaatctttacaattaatgaatctattgatagtagtagtagtagtagtatggttttctaccaaatcattttttatttacattaagaacagctaaaagagtatacttacacacacacacacacatatatatatatatatacacacacacatatatatatatatatgtaaattaattggtgctacatggagtatgggctccaagattcaaattaagtatatacccaatttgaatgagtatgaatttttttttaaatgtttagatatgaacattaacttctttactaacaagttcaaacaagtttgaactgagtttgaacttttttttgttagattttggttctaggtatataacattcaaacatataattcgttaggtatgtaataatgaattgtgaaataaagttaagtttgagttgttttgttgttaggtatatgtatgaatcaaattcatatacctaggtatatactcacaatttaaaattttttaaaaatttgagagaatttgtgtgttttataccttggagcccgggcaccatggagtcccatatgggtatcccacatatatatatatatatataaccatatactgattaattaacaagattataagtttttctttggctgctaaggctgttgtgtgcattaataacctatagtaaacatagcaggacatggtcagttcatgactgtccagttggacattgttaagtccattttagatagtactactcctcaaaaggacaataagccatgaaacatgaatagtccaattaatctgaaacagtagagctgatagaaatagatagtgactaaattccataatacaattggtcggtcccatgcatgcgcgggaatatgggctgctggatctgagacaaactactgctagattgacaagacggtgccatttgtaattgaagggcgtaatgagaatttaattaatttgaccacccgagacgtaccaccatactattcctaccacagtactcctgtactacatatctataagctaatactactatacgataccttataaacatgataatgatctatagggaggcacttaccaatttaagtattaacactactttctccgtaaaaaaaactcaccctagtattttccagtactagattgagttttcttagacagagaaaatatatagtaaagaatcgtcgtaactatagcttctacgtaaaaaaactcaaccgagtattgggatgtgatatgtcacgcctctcggtacttagttgaggggttttttttaaagacggatggactatataagctgtgttcagtttacggtaaagttgaaagtttggttgaaaattggaacgatgtgattaaaagtttgtgtgtgaatgacaggttgatgtgatgaaaaaagttaaaagtttatatgtaaactttggatctaaacacaataaagaatcgtcgtaactacagcttctgcggcagtagacacacatctccaatattttgatcaaaactgtgtgctacgaagaaattcgaaagaacgcccagatcgattcaggctgtgtcccatactcccataccacccattattcaggctgctccatgtgaccactgtaacactgtcctgtttccaacacccaaagacagatcctgatctgaacgctcctgtgttcagattcagaacactggccagctatagcccagagagttaattactgtggttgggtggcagttactgccaaccttacctgctgccaccaagtactccgagatcggtagcactgtacatacagctagcaccgaaacgtgaaaaatctcaggccgtcgcaggacatggcaacaatgaacacctgcacctaccatgcactagtcacttcatggtttaactccatttcagaaaaaaatcagcacttcctgatcactgcatgcaactggtttttcacttagatctgtttagttacgtaaaatgaaaatttttagatgtcacataggatgtttaaccgggtgttagaagtggttttcgaacacgaatgaaaaaaaactaatttaaatcgtgagacgaatgtaacccacatatgctagctaatggcggattaattaggctcaaaagtttcatctcgcgatttcctcctaactgcgtaattaattttttaatatatatttaatgcttcatgatgtttccaaaaattcgatataatgtttttaagaaaaattttttttggaactaaaccaggacttgtgtttgtgtacatgcaggtgcacgctgagacgtacgcgttggtggtgagcacggagaacatcacgctgaacgcgtacatgggcaactaccggccgatgctggtgaccaacacgctgttccggatgggcggcgcggcggtgctcctgtccaaccggcgcgccgagcggcggcgcgccaagtaccagctgatgcacacggtgcgcacccaccgcggcggcgccagcgaccggagctacgcgtgcgtgacgcaggaggaggacggcgccggcaacgtcggcgtgtcgctgtccaaggagctcatgtccgtcgccggcgacgcgctgcgcaccaacatcacgacgctgggccccctcgtgctcccgctgtcggagcagctccggttcctcgccacggtggtgctccgccgcgtgttcggccacgccgccggcgtcaagccctacctcccggacttcaccgcggcgctcgaccacttctgcatccacgcggggggccgcggcgtgctggacgagctggagcggagcctgaagctgagcgcgtggcacatggagccgtcgcggatgacgctctacaggttcgggaacacgtcgagcagctcgctgtggtacgagctgtcctactgcgaggcgaaagggaggatcaggcgcggcgaccgggtgtggcagatcgcgttcggctccggattcaagtgcaacagcgccgtctggaaggcgctcaggacggtcgacggcggcgccggccgggacgccggcgcgtgggcgcaggacatcgacgcgctgccggtgcacgtgcccaaggtggtgcccatcgtcgacgacgacgacggcgccaatggcggcgacggcgaccgacacgacgcggcgtcgcacgtacgaccggaataagctacatacttaattatgtgtacttgcgtgtaaatcgtcacgagtcatggatggactgaaaaatactgtcgcgtgttgtttcatggacatgaggacatcgtatcgtgtcagggaaggactgataattccttgtgcggcattttgtctaggtatactgattaatcaatcgtgtgtgttaaatgtgtgaaaggttgagtatatacgacaataacttgagtattttctctttgttatgaatcttttttgttgttgtacgaattaagagatgagcagggttcataaaattgtttggtttttgcgaaaaatgatcggtttcgtaaaaccgatgatactcagtttgtggaagccgacttgtattagccggtttccatacggtattgatcaaaagttattggtttttgtcggttttccgcgtaaactagtgaccaggggttttctacttcgaaaacgaaaaatcacccctacacgagtgcaatacctattatagaagaaagtttacgccggaagaaagcttatatcttaaaaaaaatagcttatcgtagaaggacgcttgcaacataagcaagcttgcaggagaatcaaccttatggcgtaagcaagtttatagtgtaagctattaatctcatccgcctgttaataggaccatgaagttccaagacgaggcggaaccctcccagacaccaccgactctttttgtactctaatccagaaaaaaataaagtatattttttcagtgttccacaactttgtgtttctttgattatgcgttgatcggtagaatacgtaattcttaacactcttggtcctatacttctcttctttttagagaaaccacgagtggcatatattcgtagaccttaaatgggcccaaaatataactgggctttactagcccagattccctactggacaaggcccacgagtccgtgacacctgtcctaaatgggcctaaatggagtactagcccctttagccggtgcaacggattccaccaacgctgtcctgtcctatcctcccatctccattgctcccacgcagccactgccgctgcggtggttccggagcgccggccgccgcctccgccgcgacgacctcactttctgctatcaacctgtagcaaaccaggagcagcgtcggcctcctcctccgcctccgagctgtgtcgttctccggattgagccggggtaagcgactagtacttcgccttttccctcccaaattgccgtgccatctccgcctcctcttccattctctccatggttggtctggctcgaattggtttgcttatttggttctcgtaatccagagtagccgtggaagctgaggccgaggtgcatttgtggttttcttggcgcggataaaggctgggggtggggagatgatgagcccgtgcgattgcttcctccatgccaccgcgccgccgctgaatccgccgtcgagtctcgcggctgcggcgccgggagctcgctggagggatagcaacctctcgttccagagcagcgcagtgtctgcgccggcgagaaacgtcgagacttcccccaatttggtggttccatgtacggttcatacgcaggctgctgaaaggaagaagagtgggaggtgggtgaagtatggcgggtcgattccggcgatgctggaggcgcttgagcgtaatgaggatatcggggaggcgctccggccatggagggacacgatgagcaaccgggagaggacaatcattctcaaggagcagaaggattggaggagagcggttgaaattttcaactggtttcgcaggaggaggcgccatgaggtcaatgtgatacactacaatgttgttctctgcgcggttgggagggcgaggagatgggaccttgttgctaggctatggcatgagatgcattccggtggtgttgcgccggataattcgacgtatggcacgcttattgatgtgcactgcaaagggggcagagagaggatggcattgctttggcttggcgacatgatcaagcgtgggttgctgcctgatgagattactatgagtattgtgcttcaggtacacaagaaggctggggagtatgagaaagccgagcttttcttcaagagatggtccttggagtcagatgtaaagatgaaagggcatccttgctatagtttgtatacttacaacaccttgatcgatacttatggaaaggctgggcaacttgagaaagtatcagatacattcaatcagatgttaagagaaggtgtttcaccaaatgttgttacatttaacacaatgattcatgtttggggtaaacaccgtagaatggagcaagtagcttctctgatgagaacgatggaggagtttcagtgccttccggacactaggacgtataatattctgatctcgctatacagagaaatcaatgatattgatgttgcggagtactatttcaggaagatgaaagctgaaaatctgctt

SEQ ID NO: 6768 - DNA, 1800 bp, Oryza sativa
aaagaaatgtatgagaggaacatggtgattgatgaatacacacaatcagctgtgacgaggatgtatgtcgatgctgggatgcttgagcaagcgtggtgttggtttgagaagttcaattatcagttaaactctgagtgcttttctgcaaatattgatgcatttggggagagagggcatatactccttgcagagaaggcttttatgtgctcataaaaaggaagatgctaagcacttgtgtttgtaatgttatgatcaaagcatatggtttagtagagaagcttgacgaggcttgtgagattgctgatggcatggagaggtatggcattttgcctgattacttgacttacagttctctgattcatctaatgtcaaccgctaaattgccagagaaagctctttactatttgagaaagatgcaggcagcaaaattgctgattgattgtgttccttattctgtggtaatcagttgctttgctaagaatggcaatttacacatggtcgactgcctgtttagagaaatgatcacttcagggatccaagctgatacttatgtttactctatcttaattgatgcatatgctgaagttggagatgtccagaaagctgaagcatattttggtttgttgaaaaaggctggtttatgtgagagtgctacaatatataattctttgataaagctctacacaaaggtagtgtatcttgcagaggcacagaaaacgtacaagcttctcaaatcattaaatgcagacaccaacctttatgcgtcaaactgcatgattgacctctatagtgaccattgtatggtgaaggaagcacgtgagatttttgagaatttgaaggttacaggaaaggcaaatgaattttcacatgcaatgatggtgtgcttgtacaagaaaattgctcgctttgatgaagcccacaggatttctaagaaaatgcaagcttcaggatttctaactcaggcattaagctacaactctgtgatacaaatgtatgtgtctggtggaagaatggaagatgcccttaaaatatttcagaagatgttggcatcgaacacaccaccaaatgatgcaacattcaaggcactaaagattattttagtgaaacgaggagtttcaaataatgatattagaaggttagaattgctcagaaaaaatagaattcatgattgcttgcgccactggtacaggatgctatgcatggcggtaagatcaggtggtagttcttctcgacgtattagtgataattcagctctgaggacgcatatttttgacattggcaattccaagagtggcaaaagaaatacaagaaagcatgtaacttcataaatatttcgagtctaactggtttaacatcttcgatgttgacacaacacggtgatgatccatctactaaacagttgatggaaagcaccgtgttatcttcaaaagaaaaccccatgaccactgtttgactggtgctctaagaatgtggtgaaatttccaatggatcaggctagattaccgcagggatgcaggtcagttttgttgtatattccccaatctgtatgtaccacaatacatgggttcacacttttccaacatcagggtttaatgttattaactggaacatctatagattatctaaatacagcaaagattcagtaattttgacaatctccaacacagcgtatttcatttctaactgtattactaacctggaaatattttttttcctgtaatggcaggtctcttttgcgttttgttaatatgatgcccataatagtttttctattcatacttcatattgcttgtaaatgtt

SEQ ID NO: 6769 - DNA, 9092 bp, Oryza sativa
tagtgtagctgccgtagaagatcagatgcttccattattcctgacagttgaacagaaaagaagagcctattctctgaaccaggtatactaaattctgtaattgctgaaatttttaaaaggactatacccctacttttactttgctctcctagtagtataaaataatacatctaatgtcattgttggatccattttgcagatttttgtattcttcacttgtcctgctctctctggatagggacctgccaacttttgatcaagtgatgttgtatcctgtgtatgaaacggagacaacccgtgatggtgcttaatccaactatttacgcctcactattcatctcagctctcgagatgataacagtgccttaaaaaagaacaggcctgttacctgtacatgcatgttccagtgttcttgcatagtgtggatgatttcttcagttgccacatttctgcgaacttggaactggttggcgaagtatagtaatatttcagcaaacttgcattatggagtagtaaaaaaaatgcgtttttagctttcaggagcagaaaatttgctaggatttcaaagctacactctggagttctgtatatcattgtgatgaccaccgcatatacaaatacatacagacagtgtctgaatcagtccaagatcaatactaaatgagactgttggtgcatacaggaccacttttgtctaatggagaagtatacccctacaagtatcctgtctacatgggcaaagtcagtagcaatttattggtgcaccgggccgtgtatcaatctggcagtacctttcgttgtgggtcctgcaaattttcagctgaaaatgcagtataacagtactatggtgtcgacattgtctcgcaaacagcatctcagttaagtcgaagattagctcgcaatgatcaaattaagatgtatgtgtcagtatcacaaacaccccagcatctctcaacattcagtaaatacttacatgttcagatctagcatacagtacattgggatgagaaatttaacgtgctccccattttgtattgcagtgtgcatgaaaattgacattgggctctgagacttttttggatttggaagcatataaacgggaatggatttgggatcggaacagagagaataacttctcggatccagcgactcacatgggacagaaaacagtggagtgagttttgcacataataccagctataatgaatgcttgattcctagttcaataaaccgaagtagtacatgtatgtacacatggttgtaagctccacaaaataggcaaatgaattaagaaaaccatgtgtgcctattggcagtaaacaacgccaaaaatgttgtgtgcgctttggtgattagtagataagcaggaatcactcggtcgtgagctcgttgattgtttaggactagtggtgtactttaattaattgttctccaaccaagaatcaaccaagttgatcggtttttaaaatccatggacgatcaaaacagaatgcaatacagtattcagcttgcgtaggacatacacacaccagaaaacgctcgacgatcgatttgcctcgagacttgaacttgttacatcatcagcacacatgcatggattagctagcactctagctcgttgctacctcagtcccaaaataagtgcaccgtggatatccgtgcccaacgtttgaccgttcgtcttatttaaaaaaaaatatgaaaaatttgaaaatatgtagtcacacataaagtattattcatgttttatcatctaatagcaataaaaatactaatcataaaaaaaattcaaataagacgaacggtcaaacgttaaacgtgaatagtgtaaaactgcacttatttgggacggagggagtagtttattaccctgatgtcctccgacgagctaaatttaccagcagtaactgacattgacgggctaatcctagctagttaatcactctattaaacatcagaggctctagtatgtttgtggttggaatgtaattagagcagatgacagggcagaaaggacaacagatctaggggttaattaggacgcattgcatgcgttaatgactaatactagtacaagtagatcagaataggtctaaatgtgtaataatcgagccgcgtcgagccgagcgaggttaagtagactgaaagtaaccagatggtagggcgaatctcatatcatctaatctcaggtggtcctgcacaggatgatgtctgcagaggaacaaacaaaaagtctgcctgggtcgctttcccttaattcccgcttaattttggatctactatcttcattctccgtaacacacatttggatctacgttcaccagggtgtcacttcatgtgttttgttttgttcggttgcgtcgtaaacaacttgtctaaatacctcagcctcgatctacgtctctggaaagtagaaacgccaatctagctgaaggccgtcgttgtgatgggccagacagcccatattcggtctatgcaaaaccccgcgcggttgattccttggaccgaagctggctataatgcagctcagtaagtctatttcttcttcctccactactgctaatgatcgaatcgcctcccttaaccacgaaacagagtataacgccttgtccattttgaaaagcagtgcaaaccgactacttctgtggttttaaaagcagcttttgttaatgtagcaagttgactgcggtttcctctacatgggttgactcactaagttgacgtgctcagtgaaactactttccaaaccaccgaatgagttacaccgtgtttagatctaaagttttttttttcaaactttcaacttttccatttcatcaaaatttttctacacacataaacttcaaacttttccatcacatcattccaattttaaccaaacttctaattttgacgtgaactaaatacagccttagtgtgcatagcttttcgaatttaaggaggcattatatacggtttttcggttgagggaggagatttttgattaaaagaaagagataagggagataaaatagacttattattaacgcaacacattagcctagcccacgtttcctcaaaagccttaaccgattcggccggcctgcgtacgtgcggtgcgggccgtgcgcacgcgcgctcacgcgtcacgcggcccgcagcgtgggatgcggagacggcaacgcgaggtgctcgcgtcgggaacttgggctagtaggagggcggcgcggtttctcctgggctggaaggcaacaagcggctgcagagtttgggcctacttctagttctagtccgctgctgctttcgacgtcgtttatcagcgacgattccatcttggactctctcatcgatgatcgggtcatcgcacacgttttgtgttgttcgtttcggccaaagccgtgccgtgccaccctagaaacagcggtggccggattgagtttgattcagcgattagttgttttgttcccgtgcatagacttatccggccggcgccgtggagtttgtttcagcagttgtttcgtccttgcagcgtcgaagagcactaccgtacgtcgtagtcgccgtccaacgtacgtaatgcagtagcagatagcgactacgtactgcacgggcgatggagtgaccaaagcacaccggtgcaacttggctcgacgatcgacaacgctggcgacgagttgaggacccgcataaatgcaccgatcgaagcatgcacttgctgattctgctgtcgatcgatcgatcgatgcgtgtcgaagggtgaaacgcatgtgcaacgacctagctggtcaccggctctcgatccatcgatcgccggaacgtaaatcgaccaatagtcaaattttcaccaacacacaaaagaattacacgtcaatatttagaaaaaaagagttataattagcagaccgtttatgtcaggtgaaggaagaaaatgcaaaataatcgatgaatagtcaagaaatcgagaaaccccaagggtctttcggctagctctataagatgatgggctagacaatattcgcgtctttttatagtcaaagaaatcgtatgcatgggagatgatgtgctagctttgcatgcccgtgcaacttgctgtgctgcaggatcatatatagtcaagaaattggttgaaacagcgaataatttcagtcggctgcctatcctattagacagtcccgatacatagggcaacttgcaataacaaaattaagcaagatcctgccgcgtactgtgtgctgtgtgcaaaccaatccaaaactgttgatgcattaactaagtgctactcgatcgtcatttctcgcagagttgctcgatcgatttctcccatcgtcttctgaggatcgaattagagagggagggtacgtacgtaatgttgtaatgagctaacgcaatggacaactcatatgctagctcgcgatataatgccacaccccggcaaatctgcaaatgctgatcagatcagtcgtcatctacaccgaagaaaaacggtggcaagcgcgattattgtgcatgtggatgtggatgctgcatgccgctacagtggctggctgcagcgctgggtcgacgcccggacaccggacgattgcggtggcgttccagtccttatgcagatgaacagcgcgcgtaaaaccgcatgtctgcacacttggtcggacgggccggaccccgggcgaatgtcgccaaccacgtcgatcggtcggttgatatgtagccatttcgtatgatttttcattggtgcaaagtttcgtcagagatggagccccatatatataattacgtcaaaggttgttgacaggatcggatcagcatacgtacacaaattaaagtactcatccgaacttgcaggattaagtttcagaaaattgagtaactacatgcatcaaattaagctagctagtactagatctgaatggttcacatatctctcgatcgtgccatcagtagctaggtagaggtatcgtgagggttgcaagggctacaagctgatgagcagataatgaagaaatataatggaatgcatggtcgagtggaccgcagagcatcgacacatttcaggatatggccactggaccatgagctcgaacagtgcactacctgatctccatgcatgaatgagacgagatcggaagggacaacgaggtttgcaattgcagggaatagtctcgcttgttcaaaattgagctcgaaaattaatccactcattaactagttttacttatgttaggccgctgcggttatctctgaatttttctatccttgtttcccatttaatcctggaccactgttcactgtacgatgatgcgaaaaaaaggtccatgttccttgaacaatggctatttatgttgtaacctaattctgacttaaaatgcacgtctaactgaatgaatggagaactagtgcagatctaatataatctgccataagtgggaactaattaatccttggggtctcggttaaacgatgaattcattgcaccgacaactcctgttattttccccaaagtaaggagcttttgttaaatcagtttcagactttcaggcgcatgcatagcatatgtactatcatagcagccgttttggactttggaatttcataattatgttgtgtaattccacgtgaaatccctgtggattaattttatagtagatcgtccaatatgatttgcattctggattgggcatgtagtatggcatggtcaccctcaacttgtacaagatcgagccagttaaaaccttatatgtctgaaaagaaaaacattttatgtcctttgcaggaaacctgtgttacatcaagatctgcctaatttaattagttcaaagccaggatgccatcattagagtatgccaacagtcactactatataaatgatttttctgcagtaaatccatcccctataggttgtagacataccgtgattggtcacgtctgtaaaaatcaatctctattttcgcgaatggctccgcatataaaaatctattttcgcaaacgagcttcttaaggggccacatataaaaatattccatctcctcaatagaatgtttttcttctctttcttcatatcctctccttttctctctctttcttcctctcctctgagtggttgggaggcggatccggccttgagagggtaggatccgccaccctagggagcggttgcggcaacggtggatggtgagggcggcggatctggtgacaacaccctcgagagggtcggatccgtcgccctagggagcggctgtagtgacggcggattcggcgacgccgtcccgagagggccggatccgccgccctagcgagcggttgggggcttggcctcaaacgggcttggcctcacttctcctcctccacaatcgggtgggaggtgtggtcgcggcgagcgcgaggctcctcctccaccaccaccgccaagcgagaggcgcggcgccgtcgaatctggcgtcctctttccctcccgtgtggatccggccgttggtccgtgtcacgcctcgaactagtcccgaccgggactagcccgtgacgctccaaattaacttgttaatcgataccagtcccaggaatcagtgctggtatcccaggaagacagaatatcacagcaacagaggtctctttattatagagtaggagtacagtcatgttgggctgcggacagatcccgagctcacaactgcattacaaaagggaagcggaagccaagacttggaccaaacatcacaggcgcgacttggggactaggccgaaaccctaaaactcatcgtagccggcttgctcctggaagaactcctcgtcagcgggatccgcttcatcttcttcagcaattggggggggttatttatatagagcaagggtgagtacaggagtactcagcaagccatgggaaataagtgtttaatgcaggcttcaaagaaaggctgttgtttttgcaattgattttatttgaactcttttctgaaacaactaagtgagtgcttctcaaacgacacggatgagacagtgcgtctcgtccggtcggagtatgtgcaatgtttcagtcttttgaattgataaagattggcacccggccaacagctttcaaacggccacccggacctggctgatcccatcagccgcagattttccaaacatcaaacccattccacaacagcaaatttcacaaggcagtagtcaaacaaaactacgctaggaatcacctcacatccgcccatgaccgtgggcacggctgttcgaacagttttaataacctctgcagaggggatacactttacccacacgacattactaacctggatcatccagcccgtgcagaacggccacgtctagagaccttaaggcttttatgtcaaggcatttcgaaagccgacacaggttcaccatatgccaacgagaggggtcccagaccaacaccagattaggtcccagaccatactgtgccaggaagcccaggggtcctccccgacaccaccccggcgaatccacatgtctcttagcatcatggctcccccgataagctagttactcagccaggggtgtcccattccacccatgtggtcatacttgtcttatgttcggatgaaattccaaggaaacggtccttaagtgcaagagcgggaaaccgtacacccggtacgttccccggtccgtggttttggaaattcatttagttcgcaagcaccgacccaggtgtcgggttttccaagtcttttgtaaaacccaagttttacccaagatgtttctcagattttaagtctgaaggcgaccgtcgatacccgtgcagagagcacgattaccgaggcgcaactaggtgggtacaagggaacatggtataacaattacaatggaagggtcaaatgcaacaaattaggtaggtctgccaatctgccttgcagacgggacaagcagattaagtgcgatcctatcaatgcataatattttttaagcaacataattaagttcaaatataggctcaagatgttcaaaggtggcttgcctcgctcgagatcttgagcttgatcctcgaaatcctcgcactgcgggtcttcgagctccgaaactacacgcgaaacaggacaactcagcaaacggcgaaaataaagccctattactgacctctaagtgtgccattaggtagatctcgagatctgaggaattttggaagttgaatggagtcaaacggacttacggttgggaagatattgaatttctaagattattggatttttggtctaaaggaaaaggatttatttaaatcctttttgaaaaagaaaagaaaagaaaagaaggagggagggaaattagacttccctcgggcggctagggcgcggcccgagaggatggggcggctcggccgagcttaatgggccggccggcccaagaaggcggcccaaggcgcgcgcgcgggcggggaggggagagagagagccggtgggccgggtccatcccgcgtggtcccgggtgggacccgcttgtcggcgactcggctcaccgtgagcgaggtgcacgcgggcatgctagggtttggggagggaggcgtggcgcatgcgcgcggttcgcggaggacgcggtgcggcgggcccacgcgcagcctcacggctcaccgcggaccatgcacacgggggggaaacggagggagcggctggccgggtcagccgatccggtcgcggccgaggtggcgccaacgtggcgcctacgtggcagccacgcgggccggcgggaggtagacgacgatgtcggccggaacggacggcggacggcggtggcgattggcggagcgaaccacggcgatacaggcgaaagcgagcacgccggggggttgcacgggacgaggggagacgagccaacggctcggattcgccggagggagctcgacggcggcggattgcggcggcggcaaccggcggagagaaaagggggaaacggcgatgaggtcacgagggccgattcccgacggtgagagcatctacgtggctacgggaatccgttgctagcgtcggattgggcggagctacgccgagcgaggccggctacgagcgggtgctatggagcacgggcggcgacggcggcgagcacacaacgagcggcggcaacggtcggggcggcgccggctagctacggggaggcta

SEQ ID NO: 6770 - DNA, 1199 bp, Oryza sativa
agacttatagctttgcactgaactctattgcaagtagtagcaacaagttgagtagtattaattgtgtccgtctcagaaagaaagaatgtacgataattctggctatgcatctggacaacgatcgttctttttgaaatgggtcgaggtagtagtagtactactgcagagtggtgtacattccgtttgacttgaggccggcccggccgggctatctctcacatatgtccgtataatgtgtatgttgtgcatgtgcacctctgatgcctcttgtgctgtaacaaacgcatatgcatgcagatagtaccggaggtggagtcattcagcggcaacggggcgaggttcgtggacggcaacgagatggcgttcgatgccgtcatcttcgccaccggctacagaagcaatgtcccctcctggctccaggtttacacatacatatatatatctctctgtatagctagactgtagaatgaatgcagttaaggcaatgttgctgatcgataccagtactgtgcttgtgatatgtatcatcaggaggacggtgagttgttcacggaggagggcaagctgaggagcagcggcagcagcagtgagtggaggtggaggggtccaaacgggctctactgcgtgggattctccgggcggggcctgctcggcgctggagcagacgcgctgcgagctgccgccgacatcgccgggaggtggcaggagacgcagcaggcagcagccaacatctcctcggtgtagtcgtccacaggccggatcgaggacggacgggacggacggtgcatgctgcgctgtgcacacaggctcagctacctcagctgctgctgctgctgctgctgatggcctctcgctcgcatgcatggcaacatggcataggtagccatggccggagtcgcatgcattgcaaatattccacagctcgcgagctcacatctgttgctagctagcgagcagcagcggccggctggtgaccagcgatggcgctggtgaccagcagcagcgagcagatgcacagagatcatatgtagtcgatgcatgggagaggaggaggaggaggaggaggggtgtgtgtgtacgtgtatgtgcagtgcaggtgggttgtgacaaagttttgcataggatgttgcttgtctgatgcgccccatgcaatgcagatacggctgaaagagtgcagtcgttctttttgtttttataat

SEQ ID NO: 6771 - DNA, 2082 bp, Oryza sativa
tttgatgcataagagagcatataatatttgaactgtggtgtgctgatcagttagtacctccaatgacaagcacatagactcatagtttctctcgtgtttgatggattatactagtacaatacaacactagccctgttgcagttagttaaatcgcccaatggctataagagcaggttacgtcgttgaaggtcaaaattaagtatcataaaaaaaaagtgctacagtttgtggcactatgcaggcagtatgtatcagcgtagcaggagagaagagacaaaaagaggtcggcttaacgattgcgagaacagggggtccagtgaagcaagaagcacaggatgcatgctacctgacgctgctctcgtcactactattcgtagctaatactactgccctacatgctacattctgtagctgccaagggctggacccatatttgttttcgtcccaactactaatgtcattgctgttccccagctactgatttcgtctatgtcctcatcaaggaaacagtagggggaaaagtttctccacacttaacattttctcgttaattgctacttcgctactcgttcatcaataaatataagacattttgggtttaaattttaactgtaaataaaaagaattatgctacactactcttcaagcttcggtaagtttcatcggattaggtttacgggtttagagaaacattaaaggatagttgagttggtaaaagacctgcaataggcggcaaagataggtcggcggtgaggcaccaacgctaaaaccgtggggatggatggatcggatgatgatgcatggttgtgggtggggttaataatgtcgcccggggggagcggcaagagaaacatttttcacttttggtgagctaccagaaaaaatggatgagatacggagtggaggaaacttaaatgcactagctcaacttggagacagtggaggcaactacgtgttggcggaagatatgggagagaagaacgaggatgagagctagagaggcgacaaggagggagtgagttgagtggctagcctcatcggaaccagcatggtggagggcaagagcatcagtatatgtaacaatttgccctttagaaccgcgtggcctatcctatatgaccggcggatccatttacacatatcactgcacttacacacatcatcgtttcatgtaaaagaattaacccatgggtgatatgattggagggataagcccttataaaatggttccacccttattaaactagtatggtgatactaaacatgcacacattgctctaatggaccatgtatgtcaaatcctatttggactaggatgtcacagtacactaggttaggcgggagtaaggtggtgggcaacgaaagtagtgtgatcaggcggaggaagtgaggaggagaagtggagttatagattagttgattgatgaacacataaaattacgagtaaattacagtttgggctatatattcttcccaaagttttcctttggtatattgaaaaggggatgattctaacaaaagataatcttgctaaaagaagatggaagggtaacttgccttttagcttgtgtaactctaatgagtcaattcaacatctcttctttgattgcataatggctagatacatttggaatacaatctatcttacttttgaaatcaagcaaccacgtaatagttcacacttgtttggaaattggttaagaggtttgaacttaaacttaaaagacaaacttgggtgggcatagcggcgatttattgggctttgtgactcagtagaaatgacttagtctttaatggctacaatcacgtatctttcttgcaggtaattttcaaagcaactcagttgtcaaggctttgctctttgcttcttaaggaagacgaaggcattgaagtaatcgcgaagtgcaagcttttagagaagcgtatgatggagctcttctctacttttgggtgaaactttagaagaaggattgaagcatagcttttagttcctcttgcttgttgtccatctttaaaacttatttatgatttacccatgtaacgggagagtcttatgtactcgtgtttgtgacttttaggctg

SEQ ID NO: 6772 - DNA, 8848 bp, Oryza sativa
gtgtaaagttttaaaagtatacggacacatatttaaagtattaaacgtagactaataacaaaacaaattacagattccgccagcaaactgcgagacaaattgattaaacctaattaatccgtcattagcaaatgtttacggtagcatcacattatcaaatcccggcggtaggctgaaaagatttgtctcgcaatttacatgcaaactgtgtaattagtttttttttcacatttaatacctcatacatgtatccaaatatttgatgtgacgtttttgctaaaaaattttggaatctaaaccaggcctagatataggtcttgtttggatcctccggactattaaatagccttccagaatcttgctatttaggattattaaacgtagattactgacaattaaaaccgattccataacccctgagctattttgcgagacgaatctaacgatggatattaatccataattaacggctaattactgtagcatcactgtagcaaatcatggattaatataccttgttagattcgtctcacaaaatagactagaggttatggaatgtattttgtcagtaatctacgtttaatactcttaaatagcaagattttggagggttatttaatagccctccgaatccagactggccatactctatcggtgttggtttcagaaagggaatttgaaacccagaatcaagtttcggacgcatctctagctctcagggtactacgattgcacgaatcactatgatccagcaggcagtcaggcagagagagttcacgtgattgattgatcggaggcaaggcagagagaaagaatgcatgggtgcacgccattgacgagatgtatctatcgagtactagtagtagtggtatgagaggagagagggtgacggttgatgatctcagagacggaatgcaaccgtgtccacgtcgatctttctcggaatacatgaacaatcccttttgcctggctctcgcagaaacggtgtgccagctctcgactcatgctcacatactactatgttcaaaaataagctaaccctaattatgaatgtttcgttgataggattagtattttttatagggcggagatagctagcgagagggagggagagagagagaatgagagatgatattctagatgtagttctgggcaatgaggcgtctgcgtcgtcgtcggccctgcgtgtgctgccacaaaggccagtggtggggaacgcacacatcttcttaatttatgtgcatggcgccaaactccccgattgaattcgatcgataccgctgcagatcgatgcatgcatgcgtagtagtagtagtagcagctccctcgccagattccaccaaattgcgcgccggtcgatcggtgtacatgatacatccatccatccatccatcggctacatctacccaagtctcgtcgtcaagcctcgatcgcatcgcaccccacgccaccgctcgctctctcatcacacacggacaccaacatgtgtagtacgtgtatgtgcacatgcagggtcaatataggagtcgtcggtggatcggtcgatctcccgtctctccacgcaacgtacgcaaacgcatgcgtatacgcgccgcgcgcggcagaacgggtgtgcgtgcgtgcgtacgtcgcgccggccggggcccgtacgcaagtacgccgtgtgtgtgtgtgtggcgctgcgtgcgatcgatcagcgcgcgcgcacacatgcaaatttagcccaagcgacgacgcacgtacgacgagcgctgcggcgctacatacgcatgcatggatgtatatgccgccgtccgtaagctggctggccggccgggaacccgggacgtcgtacgtacgaacgcccatcctcgatatatccaacacaaacatcatggatgcatacacacacatggttcatggatagatgcaccgatcaataaatcggagatatccttgtgtatattatacgacgtacaatagcatcgggtacttctctatcatgatatatagagatcgatgctagtataaacagagtatgatcatcggcatgggtggtacttccccggctgcctgaatgggtgctacttaaggcactactcccatgagagatgaaagcacaacatgcatcaatgcatgcacacgggactagctagtagcaacgatatgatcgacaagtactactcctatattatacgacgtacgtacaattagtatgttgcgtcacaaatcaatcggtcagacttaggacccatgcagatcgatatttggttcgattcgatagatacatgtgggagcgtgacgtacggccgctgaatacttgtatctgttgcatgtacttgtatgtatctcgtcatcctcactgtgtaaattttgccgtttctttccttcttcacatgacggcactatagtacgtgcgtagaagtgtaatttgtttgtttgtttttttggaagacgtactgcgttgtttaccgtacaggcgtacacaaccatcctggatttctctggtggacaagtacgtgtacgcccatgatacggggaaacacttttaactacctaggtggagtccatccatttattacatgtcaaccaaataggtatgaaaaaaatttagaaaatttaacaagataccttcatatgtaaatgtcacatcacaaacatacaagtttaaatttaacttctacaagctctagcaaaaatatcaaatcaagtttgatttgttatttttgttacaacttataaaagttaaattttaatatatatgtttgtatattgatatattatatatcaatatatcttgttaattttttataaccatttaatcgacatgcactaaatgagtgattaaaatccatcgccatgatacccccaggttgttcttgtatgtgtgccctacaggcttttaggagtacattctaaccccatgcccgctgcacagtaattgacgcggcccatctgcgtggccgtcgacgtatccagtatatgggtcaatttggatcacagattatgcagtggtcctaaatgggacgggctagaggcccacaatattttttcacgttacatccaaatttgtgtggcccgattaggatcgctgccaactattcccttcgtctcaggattttgagtttttgttttgcactatttggccactcatattattcaaaaaattttagaattattatttatttatttttgacttactttattatccaaagtactttaagcacaaattttcgttttttatatttgtacaattttttaataagacgagtgatcaaacagtgcaagcaaaaaactcaaaatcccttatattatgggatggagggagtagtcagtttggcaggccgacaacaccggcttccctatatattttagcaactttataggtgtcttatattgatgtcgagttcgaattatatccttaaactgtaatactgatgttgagctcgcattttccaaaacaggttaaataatatcttaacatagtatgtatgtttattttagctgacgtggcaatatagtcagaaaaaatacatgggggccacatgtaatttaacttcaacctcttcccatatatgggctccacattttttttactaggaagccacgtcaaaaaaaaaaaacatccatctatattgtcttagaaccttattttcctgggttttaaaagatggaggttcaacatttatagtattacgattccaggatgtaattcaaactcgacgtctagattagaaaccttaatgaacttattcctactagaggctctaatcttttggcccaatcaacgtatgccaaagccaaaatttaaatttttgaacttaattttgaagtagtttttgagttttttcaatcatagtttcttatacaatatggtcatttaagtcgctaagaacataattgtaaaagttttaatcacaagttatattttttcgctactacgccaaatagcgtatattccgcatatagccatccgatgaggctgccgtttatagggttctaaagaaaaaggctggtttgggccgagcaccagataagtcgggccgatctcaaacagaggcggtggcatggcccagtccagaagaaatttcgcatctccaaaaatttccacccgcgaaaactccgtgcgacagtgcgccgcccaccaaattcaaattttgaacgcgaaaacttcccccgcgcgtcttcctctcatgcttaaatctgcgcaaatcacgcgctcctcgcaagcaacagtgagtttgaacagaacaacgcgacgacccttgcagcgcacgaccccgcggactcgatccagatctagggcttctcgtcggcggcgatggcgggcaagggaggcaaggggctcctcgcggccaagaccacggcggcaaagagcgccgacaaggacaaggacaagaagaaggcccccgtctcccgctcctcccgcgccggcctccaggtacttcccccttttgcccatcttccctttcggatttgtagatgtgagtcttgcttgttctctcctcgagctgcgaatatcttggatttcggttttggtgcgcggatttttcccaaatcctccgtttgaattcacgatctgaatttgtcttcctcagttcccggtggggcgtatccacaggcagctcaagtcgagggcgtcggctcatggccgcgtcggcgccaccgccgccgtgtactccgcggcgattctcgagtacctaaccgccgaggtcctggagctggccggcaacgcgagcaaggatctcaaggtgaagcgtatcaccccgcgccatctccagctagccatccgcggggatgaggagctcgacacgctcatcaagggcaccatcgccggcggtggcgtcatcccccatatccacaagtcgctcatcaacaagacctccaaagagtgatgcgaaaaaaaaaaaactccctcatgtgctttgcttgactcgaagtttggtgggtgttttactgttaatttgttatgttttctcatttgatttgatgtatttgtgctacagtgttcaatccttagtgggtttaggtgccttttagtcttttgaaattatcgtgacaatgttggttgcagctgaattcttgtgaattcttcactccgtatgctgttctgaaccatccatctcgatgcttcagttcagattatcttgttaatgtttaagatcagttcgattgattggcatgtgcccatgtgtttgtcaagatgttgtactgctggtaatttggtctgtttacgtttttgaaatttggaaacgtatctgtcatgatttgatgcgtttgcgtttttgaattgtaccaatacctgtatggaaaccacaagttatggaaaccagtgcaacatcttacagtgccagcaagtcacaaaagaactaccaagacagtttacagtgccagcaagtcacaaaagaactaccaagacagtttacagtgccagaacagctaagtagctgtatatgattatatccttaagcaacagagttttagactttagctcctgtgttttgtccaacagcttctttatccattcctctaagcaccttttgtcatcctctttttcaatcttgttccatcgctgcacaagcgagatcatattgtatatcacattaagagtaggtgtttgtttagttcctaactttttcttcaaacttccaactttttcattacatcaaaacttttctacacatataaacttccaacttttttcttcaaacttctatttttggcgtggaactaaacacaccctagaattcaaagtttattttcaaaaatccaatcattcctaactagacacaaagttctcttttttaaaaaaagataaaaggatggtgcccagctattgcaaatttagggggcatttaagatgtgacaattaattatttgccacccacagtttatgatatgtgaaccctcgtgtctatgatatgtggatccagtggcaaatcttaattatcactcgtaagagtaacaaatatttaaatatctccatttatatacaacaagttttgctgggattgcaatatatctagaggaggtaaaaagtctaacagcccacaaggcaagggcatcgggaggcgcctcgtcgaggtggtccaagtcatcatctggaggcggtgatgacggttgtgccccctctgcggcggacctcaggcggcgaggctagccacggtggaggatgacgaccaatcgtcatgctctggagcgaggcggcacagtcgctactgcatcctctccaccggcgcgcctcctcgcttgcgtggttgtgaaaaaaaaaaagaggaagaggtgggcgctgacatgtggccccgcatactctttcttctcacttacatgtgggcctgtatgttttttatttttatttttatttttgctgactaggattcaatgtcagcgaagcgagttgctgatactgttataggaccgaaattgtatggttttgtataatttaagggttaagattttagtattggagggaagcgatatcaagtaaactcggtgtaaagttgagggaaaagaaagggaagtagatggaccgaccaaaacatttacctgggccgaaaactgaaaaagtcgcgcgcgcgtgggccagcgtcatctgggccgaaaaaaggaaatgcctttggaaggtacctgggcctctaatttctaccttccctaaaagtgtccatttgcccccggtaactcacaatcacaggtatgcaacgtgactacgattcacaagcttccgtgactgtagtcgatacatgtacgcaaccaactatgcatggcatgcatgatccattgatgcatgaaattgcagcactggtagatttgatccttactgcatcatgccatcatgtacctggctggcatggctgcactgaactctgaagtttctcgcttctatcctttactgcatcatgtactatctatctatccggtgtcatcgtcttcgtgaggccatgatcgatgaagctaccgttcacggatagaatggccctagccttgtccacgattctcgcttcgtcttcccatcctcgacaagaacagcattgctcttgatcatcaaaccagtgggccggctgcgtgcgggttcactggacgtcaggagcaaaacgaattcaattcctggccggtggtttcttcgacgaggccttttgtgctcttgcgggttggaagcgagcagggcgaatttcgcaacaatggtagcgcgtcccccaccaccacatcaactctggatgggtcacttcaccttcccctgtccaagcgcctcacgatacttctcaaaaatatcttctctattattctttcctttcttccactgggttgtattcttcagctattttgaggcaactccaatttacccccaaggaatacaaagcgtagaaaatagaattttgtgctcatgaagtttagaaaaccttttgttgctactactaacttggtaccgggtccattctttttctaatcgagatacatattgtatcttttttttttgttagaacgtttttaaaactgttaaacggtgtgtttcgtgtgaaactttctatgtaaaagttgctttaaaatatcaaataaattcatttttctagtttatagtaattaaaacttaaataaattcatttattgtcttcgcttaatctttatcttcattagttgtgaacagggtaataatcttcatatctgatcagtgcaggatttcttgattgagtccatatcaacagtagctagcatatgtatcagcattattgaagttgtcaacagcttaacatttgccaaggcactcgtggcaagaagaaaaaagaaaacacagtatgtcgatcgagatcaattaaagccatcgttttcacctcacaagccaggtgatcattcagcgccttatctatccgtgctctaatagcgaacgacgaaggggaggttacacctaaccaccactcatgatccatgacccccatcaaccggagggaccatgcacaatattcacaatttgcacatacacgcaggaacgcagcaagcaggcaaccaggcatgcacctacatgccgcgctgctcggacgatcgacgccttcctccgatcctcgcatccaccgcaatgatccgctgatcttttccctgcacgcacgcatgccggcccgcggcaacacaccgcgacggtttcggttgatcactccggctacgatcgatcgatgccgacgtatcagccacctcccatacatgctgggcatcgcctcgtatcggcgaaatgattcgttcgttcgttcgttctcctttgatcaatgatgcatcgtcacgagcaagcctgagtgactgtgaggccgtgaccgtgtgaccgcgacgcagtacacaccagctagctcgatcgtctcgcacactgccctgcctcgatcggcagctagcgatccaccgatggcgacgtgcaacacaaaaccatcgcgcgatcggggcatcggtggaaagcaagtgtacgacgcggatgactgtgtacgtagcagcgtgcagtgcatgcgaggaggaggaggggcatgggaatcatggcctgacgatgggggtgagatccccttgggttgtgtggacttgaggtcatggaggaaaagggagtcagttgcctttcctttccttccctttctctgccggtgcgtactacgtgagcccaggccacgcgcaccttgtgaatgaagcgcgagcagatcgatcatatcgctgcaatttgcaaaagctccccctgcctttccctgctccccgcctgctcttaccatctctagctaatcgactatgcaacttgagggaaattaacctcgatgaacagggagatttcactggattagagaatcaagctgatcaagggggggcagtactagtgtactactgctgtcatgtgtccgttcccagttcg

SEQ ID NO: 6773 - DNA, 8333 bp, Oryza sativa
gggggggagagaacagcataacaacaggggaagttctgaagataacattgaatgcgtgatgtggccacataacctgatcacagctttcatgtattgattggtgtatgaagttggatatgacctgttatccttttttgtttttctttttctcaacgaaaaggagagggcggtccttttccaacaggattgtggtatcgccccccctgtatagttgtattcaaccgatacgaatggcaccaaacacagtgacggcttgtgtattttgatgagaaaatcagcacaatggataggataactaaagaatcgttctgaataattgaaacagttgacattttctcacccaccttatttatgattggaagcaacttgaaatacttaccagtacaagaaaacggctcaaatgattgcccgattctcttatggcatgtggagcagagcaatattttactgcatctgaagcctttgcaacgggacaatctctctgatcaggaatggtacattatcctctctgcaacaccctcacacatgttcttcgggtggctatcgctcagccacggactcacagctatacctgcatacaaccttacaagcctgtcaatctgccacggcgtgccggcctgggatgtgttcattgttcatgtcccaatacccaattcgcaatgggcgagaagttatcagaagaccacgccgtgtgttcatcagccgtaacgccgtatgcaccaattgcaatgcttttccaatttgctcaccggttgctgggaatgttgagagtttacaagatgagagtagctaggcaggcatgtccggacccagctgataccgacgttgcagggaagcacagatggactgtatagcagtagcacgggaacagtgtacgagggagcatcgctcatgatgttgtctgatgaatggaaccaaagtagtagacccgggcacgcctacagtggaagaaaaccacaggaattttcataccaacacgtcctgggtctggacaaacctcccacagtcccacggtaacaacaacggcatatactgtgtttagttccacgctaaattttaaagtttgaagaaattgaaatgatctgatggaaaagttaaaagtttgtgtgtacgaaagttcgatgtgacagaaaagttaaaaattttttttaaaaaagttggaatctaaacagagccatagttatttttttcatcagtacagctgtgtgtaccatttgatgcagaggctaggatatttaattcctttatcaaaaacgtttttaacactactagcagagagcaatattggccaacaaatgagactgatattttgatacctgaggtgcggttgcgatgacagcaagattggggcatagcttgcgaaccggcgaaagcggatcggaacaagaagagacggggtcccctaatctaacgctaaagctctagccaaacaagtgcccgagttttccccgcaaaaaaaaaaaaaaaaaaaaaaaaaaaaggaccaagtgcccgagtttgagtgagaatccggggaatcaaacgcttcaagacatgtgtaacccctatggcgtgtgctagctcacgtcccgtcccgcgaccacgacaaaacgccattttagcccgacgcgtccagcttcattggcctgatcacacagtagttgaacctgccctgtttatcagccatgatgcgtcttggcgctacgtgagatatgaccccgatggatcgatcgctggtttcactgcacgatccgtggcaagcaacgcaagaacccttgggcgcaagtttccttcaccgattgggtgactgatctctgatctgatcagtttttgcttagcccacttttgtgtgtgtgtgtgtgtgtggttgttgcatgcaactgtggaacacattatacacaacatggcgtctgatgctgctgcgtatggtggctgggttggtttattggacggccatggccaaaaggcttagacgtcaagttatgatcctgagaatgtgatccagtggatggatggatgctactgtcagatattcagattgccaatggtggcaccatgctggattgattgatagtccatgggaccccggtcttctttcttgatactgttgttacaaacagggttggcctaatcatggattcccgggacatttccatgtggaaattgctgtgtagtgcaggcccgtttcacgcgtacaacaccaatggcgagaacctgatcagacctgaactacagctacaaaaaaaaaaaggacaaaagttctgaagctaggtgacatttcgtgtcaaagtatggtgaccagttttggcaaaatttgctacaggacacttaaaaatatgtaattagctgtgggacaccgcaaagacgtgaatttgtctgaggacacttaaaaaatgtggtaatttgctgtaagacactgaacacattaaaatataatatccacccaattgataagagagaaaccacacaaaatgacatttttgcccgtatcttcttctcccctctttcagtcttcttccaacgctcactcttgcagtgagctccattggcttgcccatggtggacaggcgctcagcgtagttgacggtgcggtcgcacggtatgccgagaatgagcgtagcaggaagttcctcacgaccgtttagataatttaaaggtgacggatttcctcgccgctgcagccataccggcatccaccaccgcgccgctactgcctgactccgagccgacggcgaccacggcgccgacactgtcactgcctcactaccttgcttgttctcctttcaaccagccgccatcgctccatgcgctgacgtggacagactttcagcgccatgccaccagtgccgctctgcgcgtgccccgccatgttcaaggagagagagcgcctccgccggagcatacacgccatgcaccgccaccacctccactgcactctgatgttgcggcgatgtggtcagcaagctccggagtcagttcttgatcatggccagcacaatgccgccgttgccgttggctgtagtggcactcaccatatcactgctgacgccatcgtggatgacgagctgtgaggaggtggctaccatgacggagtcagcgaagtggagcgaggaggagctaggagggtacatgtagccgacgctgctgccggagcttgcgtagcaagtggcaccggtgctgcccttgccatgatgctgctgttgctccgagaaggagatgatgccgaggaagtcctctagcttcggctctgcggcgagcgccgacaagaaatagatggggtgatggggattggggtcggccggtcggggatgtattggggaattgatggaggatcggggaaaagaagaagggcaaaactgtcattttgtatgatttctctctcatcaattggatggatattatattttaatgtgttcagtgtcctacagcaaattaccatatttttgaagtgtctttgggcaaattcacgtttttacagtgtcccacagctaattacacatttttttaagtatcctgtagcaaatttttgccatcagttttttacatgccgtgaagaagttttgtatcatcttgcaaaataatttttcaaacttccaacttttccatcacattaaaatttttctacacacacaaactttcaacttttccgtcacatcgtttcaatttcaaccaaattttcaattttaaggtgaactaaacacatcctttgtttccttctaaatcgcttgaaaaaaaaaggctttccactcggtttttgccatccaacgatcacctgatcgatggaagtgggagcatcacgaaacgagcggcaggactgacacgagagtagtaaaaactgcaggtctgcagccttaacttctcctgtcacccgctaaataccaaaactacccacaaaatacagcaacatttacagcttcgacactgcactcaatgccctcacacgctaaaggccaagcaggggtaacagggtcatttccggtgggaccgatgtgtcagtcgccacgtaggacaacgtttagataggcacgaccacgcagcatgccacgccgatctcctcgcgccacgtcacccctccggatccctttaaaaccaggctctcctcttcgtcttcttccaacagatcgacaccgaaaattcgaagcaaaaaaaggagaagaaaagaaaaggaaaaaaagaaaagaaaaacaaaccctagccgcaccgatcgaagccagtgagacgccgccgacggctatgcgtgaggcgatcgtcggtgaccacgatcgccgccgccgccgcacccgcatccagtgaaaccctgcactgtcgtctcgttcggttgtgaggagatgagggcggcggcggcggcggcggggcagatcgatccgtcccctggggcgccggcgaagtcgcggctgaagaggctgttcgagaggcagctgctgcgggtgtcgccggcggagaggctcccgtcggtcgcgggtgtcggggagaaggatgagtcgtcggagccgagctccgtgtgcctggacggcatggtgcggagcttcttggaggacggcgtcggcgtcgagcggccggcgggcgccgcgcgctgctgcaattgcttccacggcggggaggcgtctgacgacgacgacgacggccccgctgctgccgaggcggcggccacctccgacgccgcagagaccatcaaggtagtgtggtgtctccgccaccgctagttattatcctcccatgttcgccgcgttgccggcggcgagaaggcgacgaacgccggtgctgaccgtttctcgcatttctcctcagggcctcgtccactgcgccagcctccgggaacgcaacctcctcgccgacgtctccacgctcgtcgagcgccaccgcgccgcgggggcgcgcaagcgcgacctcctccgcctcctcgccgactcgctccgcgcggcggggcacgacgccgcggtctgcatctcccgctgggacaagtcctcctcccacccaaaaggcgagcacgcctacctcgacgtcctcctccctcccgcctccgaccgcgccgagcgcgagcgcatcctcgtcgacgtcgacttccggtcggagttcgaggtcgcgcggcccaccaaggcgtaccgcgccgtgctccagcgcctgccgtcggtgttcgtcgggaaggaggaccgcctccgcctcctcgtggccgcggccgccgacgccgcgcgcgccagcctcaagaagcgcggcctccacctcccgccatggcgcaagcccgagtacatgcgcgccaagtggctttcaccctacgagcgcgacgttccttcaccgcagcagccagatgcctccgccggtgagctcgccgtcgacggcgagggaggtggagcgtggactcaatgattgatgatcaaggactcgtcttttgttgattcttttttcttcgggaatttgcatttgcagcgtcatcttgggctggatgcaaatgttttattctttcttttcctttcctttttcccccttcatttttaccctttaatgggtttcattttggccatggagtagtagtaactgtagtagtaagcacggataagacgaacgggaacaaaaaaaatgtagtgttagttgaacagaaaaaaaagagagataatggattacggcaatatctacttctttcagtttcagtgttggtctgataacagaagataaatttaacttaatggagtacaataacataaaggaaaaacagttcagaaaaaaacaaaagaaagcagtacattgctcagcgaccagtttttaattggaacaatggaacgtatatttgcatttcatcaagttatttcttgttgatttcctatccggttcctgtaatttcacgtggagcgggtgtgcaatttgctgggcctttccagttttgcagaacaagataccgggaaccgcagtgacagtagcttgatctgaactctgaagtgtgttgacatggagcggctttgatattttgcagcttcaacgtctccggcatcgtcatgctgatgggtttagcttgtgaagcggagctgaagaaatggttataaaaattcttaatggaattgtttaagctgaggttgctgtcttgtgcaagctaaagctcaggtggggggaaagaagcaagcaaggcagagaaaagagcaagtggatataggaagagtatataaatctgcatcggtatacgcgcttcttatgggttgtttattcctgctagctcgatgagaaacggcgtaatccgaatctggatcataagataatctgagcaggtcacaatactctgtagatctaacttaactgctttgtcgatcctctgcggcctctctctttgcttgcttcccatgtaatgctcggtcgatgattggtgaaagaaggaatccacacggcttaattgtactcgatcgatgagtaatagcacaataacctcatcccgaaaggccaaaacttgtccactgaagtgttgttatcggtcgatctgtcattctgtactcctttgtccagccacacggaacgaacatgctctggtgatgcctggacgcccggatcacgccagagagagatagtggtggtggtagaaaaacaaatcgcgagcgcgaaatgcacttgacgaggcggggacgcgggccgcggcctctctcccctctcgcggggaacgcacggttgttttcgcgtactccgccgccgtacgcgccgctcgcgacctgtcacctccccaccgcacctgtggctcgtacgcgagcgcgagcgagcgagcggcgcacggcgcacacgcgtcgtcctctgcaaactgcaaggcgaggcgattgttgggatcgactcgcaaatggccgagacggggatgcaccgtgcgcgcacgtactccgtactccagtaggagtaaacgcgggtgggggtgtaccgtgtatgcgtgaccacgcaccgctcggtggcgcggcgcgcatttacggccggaatggcctcgcatcggcatgcctccccgtagttttttcagttcgaaacggcacggctgttccggtcgtttatcaatttatcatcgcactcctcgtcttttttcgggggtttccgttggaaaagggagagcagtagtactggcgagttggctcactccccggggtgggggagagaaaaagcttttggaactgaaactgacccgggtaagaaagcgtagctttattgcgtgctccggctgtgcccccgctgcgcatcacacaatgattgtactccgctgcatgcaaaagcaggcagggggaaggggaacgaactgcctccccgtgcctttctctctcacactcgcacacagacacgcacctttcctttcctttcttctctctcacacctccctcttttgtttctgaccgggaaaaaagagacagccatttcgctctcccctctgtgtaaaaatgatctgtttggtgtcacacttgatgagtcatgaaggggaccctcctttgtatcggtaccagtacgaactcttcttgatcttatctcgcagaaaatggccggtctcacttcaccgagaaacctcgttaggtctctgacgcttatttaccaccctatggcagaaaacctacatggcaccaaaccgatcatcaccactctttctcccccccccccccccttcttcttccgtgcatcacaccacataattcatcgatcgattggggggcgcagtggacaatggtacatgcatgcttggctgcaatgactgcgtgacgcttgcggcccttgcaaggggcgcaaacgcaaccgcggcgcgtaaatgcgtgctccccctttcgcagctctcccgtcttctctcacaccacaccacccggctgcgtcagctacgcataaatacacggcagcctatagctgcactgttgcacacaactccgggtggtagtaggagtgtactagtacgtagtacggctgcttgcacttctcatgcgatttacgcctgctttagttaccaattttttctttaaactttcaacttttccatcgtattaaaactttcatacacacaaattttcaacttttttatcgcatcattccaatttcaatcaaacttttaattttgacgtgaactaaacacacccttaatcaagagtcacctcgtcatcgcgctactccgactttacactagcaccagtacttactactccctccgttttataatataagagattttggatggatatgacataatgaaactggacagacgatttattgtactataatattatattatatccatctaaaacctattattataggacggagggagtactctactactccttcgtacgtataacgccgtaacgtggcagtgatgacgcgatttattactaaaataatactggtagtcttgtactgctacaccttgcagg

SEQ ID NO: 6774 - DNA, 6271 bp, Oryza sativa
catgtcaaatcagtactcaaattagtgatgatggcgcgaagaaataaatcagtaaatctaggataatcagctgatatgcatggctcaagaatgtagatgagggccctattttctccaaggttgctcacggatttactatagaaaaaaagttgatatcaccagttggtggaccttggccatttgcaattattgggctattctgtgagcagcccatgacactgaattatctgtcacttttcatcagtatatgcaaagtcaaatgtactggaaaaaaacagcatgatacaaaacttgcaaaattacaacttgcacgcctaaaacttgctctccatcattgcatctcaagcaagacagttttttcattttcagacgcaaaggaaaatcacggatgtagtactagtactccctccgtcccataatataagggattttaagtttttgtttgcattgtttgaccactcgtcttattcaaaaaaatttaaaattattatttaattttttgtgacttactttattatctaaagtactttaagcacaacttttcgttttttatatttacacaaattttttgaataaaacgagtggtcaaacaatacaaataaaaactcaaactcccttatattttaggacgaagttagagatcagtatagaagttgcacgcatgctaggaatattcaggccaaggagaagatgacaatagaaaccttataggggacaggaggattaggtcatcagatatgctcatatgcaagctatccaaaagtgaccaatggatcgattcccttggcctcacgagtttgtgtccttacatacagacatgtgactccaaaacattacatgacaatttctcttaatcatgcctctcaggcagactttgtcagttttgactttggcagtaattacatcttacaagtaagtaaccactaggcaaaagagagactaaccatagttttacttcaaccacaagactaacctaccttagttttcttaacttgtaatctactgtttcagaaatgttcaagctctagaatcaagctgaattgctcaactactgttgccgtcggcttacttgtcccaactcataatatctttggggttacttactacacgaccacacatgcacgaatgcaaaacggaatcttatcgccattaactatcctaattatggtgtcacaaagctaagcttttagttgtcgcaatcgtgggtattagtgtgtggtgtgatttcccgtcatgaatggattctctcgtcgtcgtcatacacactactgtactgcttttaggatgattggaccaggcatttaccggcgattcttatggctaatacactacttttttttttctgctagtaccaagtagtatatccctagatcacacttcatcaaagactgaaagtgtaacatgtgctaattaatatgctatattattctcgagtaaaagtgcatgcatatctagaccttaatgttcttttcttcaaaaaaaaaaaagaaaaagtagtatgcgtctatgtctaattagcttgagttaattacaacagcaaaagtaaagggaaaggaacgagagtgttaagcatggacttacgaagaagcgggtgatgaggaggaagaagaggaagccgcagcccatgacgacgctctcccatcgccactgcaatcaaccaatcagtcagtcagtccaattcagtcacgaccacacacacacacacacacacagctcgtagatcaaatcagcatgtaaaaactaattaatcagcttaattgatcgtagattagagctgtaaaaactctccggttttcatcgcgagaagaaactatagtctagtactatactcctaggtaggagaggtgaccggacagatcgatcgagacgaggttgcaggtgcagggtcatgtccctgtcgcagttacactcgtcgtcgtcctcctgtgtcacctctccccgttgcggacagacagattgccagtggccgcacgacgcagctagaatactattcactccattccaaaatatatcatattttaaaccgataagatactttctataacaaatttaaacatagagtctgtttagatttatcgtactaacataaaatattctatctagacagggttcgtttgaaggacattgagggaaaaagcacctcgtttttcgcacgcacgcttcctaaactactaatcagtgcgctttttgcaaaaattttctatagtaaagttgctttaaaaaaatcatattaatccatttttaaaatttaaaataattaatactcaattaatcatgagctaatggctcacctcgttttgcgtatcttctcaatctcctcaatccccttcttctcaaatacacccctaaaatcttttatattttgggacctaggaattaggcacatgtacaccgacactggcttggctaatgcaaagatccatccgtatacatgcataagtacatgtactgtacatacgtatgtgtattcgaattagatattaaaaaaaacgtgaatattagaaaatgactttatattaaataattagaaaggaggaggttttaaattcaggtcgactagcccatcatcttgtaaaactagtcaaaatcttgtgaaactagtcaaaaagactcctcaacgtttctcggatatatacaggagtagtataatttaatgtgtaggtacgtacgaggtgggtttgggagaagacggagctcatgacggagacgaggtcggtggcggtggtgaagtggtcgaggccgaacatgcccttgagctgctgcaggcacaccacggtggcggcgccgcccatgaacccgacgatggtggcgtgcgacaggaagtccacgatgaaccccagcctcaagacccccagcagcgcctggaacacgccggcgaagaaggtggcggtgagcgcgacgtgcaggtacagcgccgggtcctccgccgccgacacctcctcgctcagcatcgacccgatcagcagcgacgccaccgccaccgtccccaccgccaggtccctcgagctccccatcatcgcgtacaccagcggcggcacgaagctcgaatctgcagccaggaacacatgtcgaacacctggtcgtcatgcatcatcgcatcaatggcgtctaagctagctactgtatgtgtatgtgtgtgtgcgcgtacagaggccgaggacgggagggaggttggcgagcttggcgtagctgatgccctgggggatggcgaggctggcaatggtgatgccggcgatgaggtcggacttgagggtgccgagggtgtacgacggcgcccactccatgaacgggaacacgtaccggagcgccgccgccgcgcgccgcccgcacccgcgctcccgccgcaccaccctgaacgggtcgtccggcaggaatgtctccttcatgttcccccccagcgtctccaggaacggcttcgccgccggcatcggcaccctcgccgcccccgcccctcctccgccgccgttcgccgcgcttccactacccatcttagctcgtcgcactccttcgtctacctcagctccggcgaccgcgcgatcgagctagagcttggattaactaatcttaactgcgcttgtatgtgtgagcgagtgagtttgagatgagcgttgttacggcgagggatatatatagcggccacggcgcggcgagctcgagctcgagctcgagctcgagcgattactatggcggcggggcccaccaccccgccgcgtgtgggtcgcgatcgcgtgacgctgcgccgtgggtcccacctgtcagtgagacgtgtcccggagcccccggcacgcgcgcgtacgtgtggcacgcggccacgcggggggaatgataagttgggcacacgggacacgtcaccggtcgctgttggtgcaggttggcacggggtgtctggctcgtgtgcgaccgagcctgacccgacccgacccgtatgtggctcggctacgcaaatctcccggtttttgcatgctcggttcgtcgattaatcgggtaaacaaacgggttcaaaaaaataatttttgaggggggagtagagaaatgacgcatgtgaaacacaattttcagacgaatttttgttaggcacaaattcagtatattctgactattagccgctacatactccatccgttcaaaaaaaagacaaactctgattttccgtgtccaatatttgactatccgttttatataatttttttataattagtattttcattgttattagatgataaaacatgattaatactttatgcgtgacttgtctttttaaaatttttttataattttttcaaataagatggacggttaaacgttggacactgaaatccagggtttgtcttttttttttttttagatattactcgtaaatatgtgtctggctgagacgtgtgttcatgttactgtcacgctgcagagatgatgattgatgatgagatgggccacctgcatccgtgtgattatagtgccgtgttttgttggcacgttcgtacgtgattttccagatttgctgggatatcattccacagatacaaaccgggtttaactcgtccatctctcgtgtcctaactcataaatatgaccagtaatttgactaaaataaccaaagagcatgtggatatatatagaacatcgtatcaggccaacgtggcatgccacgtggtttatgttgccatttggaacagagagagcacttgtgtgatgacgtaatctcatacatatgtaaactatactgtttgttgcgtgctgaatttatttttttttaaaaaaaatgaaagacaaggtgtatatatatgtatacgtcatgtagcgatcctgcggccagatcgagccaaagaaaagagcactaatctagatactctttctgaaagctaggccaatgcaatccacacaacaaaatcaattaactaataactaccaaaagaccatttaattagagtatcttcccaggagacggcacggatcgacgtggcctaaacacccactaatccaacaattaagacgcacaaacacgtattaaccttttctcaagatcagtggctgctgccccagttggaaacgccttttaaattagtggcagtatgatgataatgacaatgataatgatgatgattaatttgatcatccaaagtgtgtgggtatccaacacagtggcaggcaaagctagcttaagctgggctcagctagtggccacagttgctgcactcgttgcgttgccttcttgacctcccaaaaacaccacaagagattggagattagccccagcgaccgatcgacgtcttaatcgaatcattgaccaccctgcatgagtgcacgtgcatcgggcccagaaacctaataattgaggccctagaagatttgttcatcggccaggccttgtttagattcttaaaaaattttggccaaaaacgtcacatcaaatatttgaacatatacatgaaagtattaaatgtggaaaaaaaaaaccaattgtacagtttgtatgtaaattgcgaaacaaatattttaaacttaattacgccatgatttgacaatgtgatgctaaagtaaacatttgctaatgacgacttaattaggcttaataaattcatctcgcagtttacaggcggaatctgtaatttgttttgttattagtccacgtttaatacttcaaatgtgtgtccatatacttcaaaaactttacaccaaaacaacttaaacacaccctaaccatttttacactatgtttcaaattactcattgttttagtcttttccaagttaaacatgagtatctttaaatattattttttaagaaaattaccgagtttaacatcatgataaactataattacagagttttagtattcactattagcaatattttataagtacacaattcgcatgctagtaaactataaatttttaaatgagttgataaaaatagtaatgtttaacttaggaaaaaaaatgataagtaattgaaacgtgtgtagtacctgttatggtgtacgcgattccacgtcactaattaaattaatagatagcgaaatgcctgctattttagaaatttgaaagcgtcaaaaacattttcgatttgaattcttgggttgaatgattgaattaattgtttagctcaattatcagttagctcgttgtgcaaggcaacaggtcagtgtgatgcagatacgcagcgcagcgcgtgtacgccaccgaaagagctaattagacgcgtatcagcttatcagcgggtcaaagctgcactaaggcgttgacctctctgaccagagctcagaggaaataac

SEQ ID NO: 6775 - DNA, 15573 bp, Oryza sativa
cccccccccccccccccccactctcctcgactagctatcttgctggtaggtatattacagggacagctccccctcccctcgccggccgtcgcgctctcgaagccgtacgctgttcaaagcgaagcgaatcgaataatcgatcatatccattgcctaattcgtagcacgtcgatggatcagctggtcgtcggcgtggcgcggccgtcgagcccctcggcggcggcgcacgtcgcgtacaagatcccggccggcgacgggccgtacgctcgggccaagcactaccaggtatatataagctctgttttctctcgccggcgttcatggctggcgccgccgcgtccatggggaaattatagctctctctatatatgcatttatttatatattagtagatgctttattaggttaggtaattaatcaggatctagttaggaccgagacttggtacaaaggccttaatggttcttgctcgcttatttcttttttcgaacgaattccttaatttgctaacttttttttgagaggaagatctggctaagttgtttatttggttattactgcttaaatttcgatgagaatatgcagaggaaaaaaataaagaacattacacggcgtaagaatacaataattaattttataacgtactccatatatatacatgccatatggtacagtctttactacaatttaccaattaatggatttcgccaggttggctaacctcagcagatctaatattgggggtgttcgtttgtgctagctctgacagctgttatggctgcagccgtagttaaatttttgatagctactactattgttacagctgtgtatagctgcagagtagcggaaacgaacaaccccattgtaatctactcccaactggtacaaaatggtattaaaatatattttagatacatatttcatattctcggtccttttttgaaattaaaggacctatatgtcctctagtcatcaataaaatatttagttttgcacatcgatctatcttcgaacaacaccagccactattttctattattgcatacactttaactcaacgatattttcatacattgaatctacttattaatacttagaaaattagtactatataaggtcaaagctttaaaatattttttccataaatatttctagaaccatgcacatctataatttctatttagtcagtactcactagcaattttagaagataataaagattattatacaagtatattacaacaacatctactagcaattattgtactagagagtatcttaaatctcattcaagtatgagacatcatctagaataaaatattatataattatgttaaatcatcttcctcatattattttcataacatttcaacttccagtatttcatgatatttagcatatattcatctattatttgtgtagtaaaagcataaggtatcacctagtggttctatatgactgaacttccatatacaacggctttgcatgcatgcatgcatgcatggtaacgcacctcggagctagctagctaacgaagttcactttcttttcagctggtggagaaggatcttgacgcgtccatcgcgtggttctggaaggcgatcaactccggcgacaaggtggacagcgcgctcaaggacatggccgtcgtcatgaagcagcgtggctaccacgccgacgccatcgacgccatcaagtcgctccgccacctctgccccaagcagtctcaggactccctcgacaacatcctcctcgacctctacaaggtatcctctcactctcgaccggccggcatgcagtaatggccgctgcagggcggatccggcacagggatggcggaatctcgagcccccactattagcgtgaagaccatgagaacccccacaaattctccgaattcttttaccatacgtagatgggagagaggattatagctttatctaattgttcagacccctctgttattcagtaaatgacattgttgatgatgcaggcgagcgggaggacgaaggaggagatcgagctgctgaagcagaagctgcggaagatctacctgggcgaggcgttccacgggaagacgacgaagcgggcgaggtcgcacgggcggaagatccacgtctccgtgaagcaggagacgtcgcgggtgctgggcaacctcgcgtgggcgtacatgcagcaggggaatttcatggcggcggaggtggtgtaccgcaaggcgcagatggtcgacccggacgccaacaaggcctgcaacctcgcgctctgcctcatcgagcagcgccgccccgccgacgccgaggccgtcctcgccggcgtgctcgccgggaggtaccacgcccgcgacgacgaccacggcgccccgcacaccggcggcaagatcctcgccaaggtggaggagttgatggcccgcatcaccggcgaggtcgacggccggagcaacagcagcggcggcagcagcagcgacgacgacgaccgcgacgtcgaggacgagatggtggagctgctagacgtggtggtccggcagtgggcggcgccgtacaggaggagcaaccggaggctgccggtcttcgaggagatcactccggtctgcagggagcagatggcagcttgctagaagatggtaattaattaagagtagtagcaaattgttaattaaattagcaggtccatcatctagtgttgggtagatatatagaatttcatgcacctatccgacgtgtcaacggcttcaactttatagggagaactagctgcaggtgcatgaagctaagcatgcatggatgtttttttttcttgtgagtgtgtgtgtgtgaaattaatagtgtgagatagagaagtataatgtgtgtgtgaccagttgcatgttttgtactctggttgtgttgttgtgtacttatgtagagttgataagtgcatggcttggtgaaggatataaatgtgtacataaatgtctggtgtattcttcccaattcaatatttccgttggaaaaaagaaaatattttctatctataaagcttatgcccattaaacacctaaagcttaacatacaagtataatgtatttattgccactcctaaaatctgcatgcaaacatgccacatcaacccattaaggtggtgtttgggaaggatctcacaaaaattttagtctctgtgggagagacttatacttttgtgagagtgagacttatacttttgtgagagtgattaaagtctagtccctccttcccaaacaccatataagtacacaaaactcaacatgcaaacatataataattatatctataatttatttcattctaaactaaacatacacatgctaaatcatcatactaaaatcattttcataatatttcaatacaaattatttcatcatttctccaacacttaacatatagggttcccgcagcaaagcgcggggcatcatctggtttttatgatgaaggataaaagtctaatcatatctatgaatccggacatgcatatgtccaaatccattggtagcgttggatttttttaatgatataaagggtgtatgtattaacgcattatattatctgggtatatgaaaatagtgtgtatattattttagaaaatcttctttaatacgtcatttgctccatattacaattaatgtttgttctagtcaaacttttcaactttgatcaaggtgcaacatttttaacccaaaacaaatatactataaaaatatatttagtggtgtatttaataaaattactttggtgtttaaaacattatcatatttttctataagattggttaaacttaagaaagtttgacttagaacaaaaccataacgtcttataatataaaataaaatttctttatacaatattaggtccgttttattgcctaagaaagtttgaattggcttctcactgtatagttgcaataaaaaaatatcttgatatcatatactagtaagatgcaactgtttcaagttaaaaagggaggatgctatgtggcagtcaaacagtcgttaaatatagaagagcatgggcctggacaattagctctgtacgaaatatattgaagcaaacatgcaaaattacctcttctgaattacaagaatactagtaatattacattgtagaaagaatatggacatccctgtacaagcacaggagagggctctattatatattgtgagcctttgggtccagaaataactaaataaaagttgatgagctagcaacaccatcaatcaagctgatagattcatggtgatttcgcactccctatgtgacagttttgtttcaaaacaataaccctctaacacgccctttctccttttttatgtgtgccctttcttcagcattatcagaactgaaggctatagcaaatattaggtgaggtgagccgtatatgtgttgtgtgttaccagcagttcaagtcacggcaaaccgtcaagatgatgacgaggatcaatgcaacgacaatgccgaaaacaatgagcttcatcttcatattctcccaccacatctttcgccgaatctttgttcccgcttttctaaagtcttgtgcctataaatgaaagaatgaatatcatcatgtccaatagaccacatattgtgcaattaagaggaaataagattatgattcaatgtgagagcaaatgatgaaacctgtgagcggagatcctctgtcttgtcgacaagcagctcaattttctcaccacgatctaaaacctgatgcaacagatgagaagaacacatttccaaggcttcaaaaccaccattgtaggctgtatggaccagtgtccaattggtgacagtaaagggaacactaaccttttcaatgttttgcatcataactcctttgacctctgtaacctgagccttcactttggcaagcttgtcaatctcctcagggtgcgcatcacagtacttcatgtgttctttaagtttaggcctgataaaagaaatcctttataactagcttattcagattgtaattaagggcactcacaccatcatatagccatataaattatgataactcagtaaaattttgcatagaggccatcaagcaaatttttaaaggaaaatacccatattctcgcttgaggctattcgcggtagcattctttgcttttcctccactatatttcttggaaaaatcttcctttactctctcaatgaagccaactggaagttgccgaccagcagactcggtagcaacaacacagtatgctgaaaaccaaatgcattgtcaaatgggaactagcaaaattgaaacaattctatagcagtaactttgctgttcaattagttttatctatactaaacaccaaagaaaataataaaacaataattaataaagatgtggttttctttaacattaaattttacaccaaagaacatatgggatgaatctttttttttccttatggttatatgcgatgaatctcaatgaataaaataggcgtacctttcaaagacaaaaaaaaataacacttattcgtggcatgtaatgtttatataaggacaaagtaggctatggtttgccttttctccaaaaaaccgtaggctatggaactaatatcgcaatgggagtaccaacaaattatcaaagtgcaaatgaaaaggtaatgctaaattgctaagtggggaaaaaaaacctaacttgaacaaacactgaagatctgtaggttttcaataacaaaaaaagatgaagatccacaacatcagataaatgaaatatatattgttgcacattaaaccctctagaaacgacattatgcttataaaaaagaagagttctttttgacaaaagaaaaggaactgtacacctcacttgtccagatcttaaccacatagttaaacgagcatttctaatcaagtaacaacgaaacaccacattaattaaactgatcagtctaacatcaatcaaacaagacaaactatgcacttgcactccgaacacgcccatccaccacattgcaccacgacaaacacggcattaacccagatccaccatggaatagcccaacatgatcccaataagtcgagttgaagggacaaatggtgcaaatgcatgcattgttgaagaaatccgatcgattaaacagatacgacacaacgatccagccaatgccaaatcctaaagcatatccatgaccatgagcagcgaaatggagaaggaaatagaatcgcatccttcaaaacgacgctaatcacatactgtcgatttaaccaagtgatagtcatggaatttttaatatacgagaatcgagaaggggatggatttttttttttttggggggggggggggggggccattactgaatccgtcgtggacatggtagttgaaggtgtggccgtcgcagttgtagctgtggcggttgttggtggaggggagcttctggaggcactgcgcggcgacggaggcgaagttgccggagacctcggcgtggtcggccagcacgacggcgccgcgcgccacgaagctgtagaccagcgtcgtcctcttctgcggcgccatgtccccccctccggccccggccgccgccgcctaggctacgctacgctacgcgcgcgcgcgatcggggaactcctcggcggcagatggagggagggaggcgggcggtgggaatgcgcgggagcgatgtgtgggaggcgaggaggtggggggtgctgcatggagagaggaaggtggtggtggggaatggaggtgggggaggcaagccacatgctaattttggctgatggttgattttctgattttttttcccctcattgaatgatttgctaaatttaggtgttattaatatttgttgtttagaaaatgttataatctagaaagtttttatcgccctcgccttatcccgcatcgcagccgccgtcgccatagccgtagtcttctcctgcatcgcagccgccgtctcgtcgtcgcagccgctgccgccctcgccttctcccgcatcgcagccgccgcctcgtcgtccgcctcatcctcctctcccgcctcgccccggcggcctttgccccagccgccggccggcttgtcggaagagaagagaaagagagagagagtaggaagggagaggacggggaagagaacctgctgatatggcacctgatatatgggtcccatgctgacttaaccaccatgtcggataaaaccggggtcaaaaccgccgagggatctagtttacattggttttgtaagttgaggaatacgttgcatccggttttacggttgtgagatgattctataactcgatgataagttgagggaccttcaatgcacttttatcctcatagatatagctacgtgcggtgactatgggtggtaatgaacataactttttttctgtaaaatataaggactgagttgaaaaaaaggttcggctgacatttaataaccctaacatggacaaaaatggattgtgaaatagcccatgagttctggcccactaccaccgatccggtagcggaaagaaagcccgaagactaaaaaatacggcccgtcccggcccatgcaaaaccgcaaccgtctatctcagcttgccttctctctctctctctctctccatcatctatgtaccactccgcccgcggcggcccgatctccgatccgcacgcagcaaacctacctccagagagagtcgcgtggtgggtgtgggacccacaccccaagtcgaaatcgcgattcgattgccattttctatcgcgcaccctcccccccctccaatctcattcgttcccctttcccatgggccgaaagaagcgaaccctcaacaccgccgccgccgccgcaaaccctactcctccctcccctccggcggccggccaccccgatgcggcggcggcggatggcggcgccgcggtccgggccgtctgcgagaaggccctggcagcgctgcagcgggggaaccacgcgaaggcgctccgggtggtgaaggacgcggtcgggaagcacggggagggatcgccgctgctgctccgcgcgcaggggacggtgctggcgcgctacgccgcggtcctcgacgagcccgtctcccgcgcgcggcaccagcggctcgcgctcgaggcggcccgcaaggcggtcgagctggccccggactccatcgagctcgcccacttccacgccatgctcctctacgagatcgcctccgacaccaccgggtacgaggccgccagcagcgagtgcaaccgcgggatggccatccagagccccaccgacccggcgccccactccctcaggctaccggccccggacgtcgagcaggtcaaggccgagctcagcaacctgttgcagaggtccaacatgacgtccatctcgctgtgggttaagaacatgaacatgggctacacacctgaggataaggttcgggttttccccattcgccgcggcggcgccgacgattcttccgaggtccggctcctgcctgctgcgcctgcgccgcgccgcccgaatgagatcaagaaggctaataagacccctgaagagcggcgcaaggagattgaggtgcggcttgctgcgatgaggctgatggagcagcagaagcacaatgccacatcggcctcatcatccacctcccaatcacagtcaccgggggatgaggccccctcctcgtcgtgtcagtcatcagtgtctgggcatcgcgctgaccggaggaagggtgggtccaggaaggcagcagcttcgccagtgtccggtcgcatgaatcaggtgcgtgagttctgggccacagtgcccatggatcggaggcttgcattcttaagcaccagtatttctgagctcaagtcacactacgctactgcgatgcataaggagaaagatgctgccagtttggtatctgatgtgcttaacgaggcgataaggtttgccactaggagtggaaaatgggagtttttggtatgtggccggtgtgaggagcattttgctgatgctgaatcacatgtacatcatgcaatggaggaacatgtgggtgtactacctccccggttgaatgatgtggtgccggaggagattgatgatgcctgggcagaaaagctcactggttcaacctggaggccggtggatgctactgcggcactgaaaattctcgaggaagaactagctgacaatgttggctcagatagggacaaagattcaatgtcatcggatatttggagtacaaaagataaatcagacacatcagattcctcaacctcgccacacaacgaggagtgtgaaagttttggcgccgtgacaagggaaggtgacaggaagtggccactgtctgatgatgaggaaagagcaaatattttagagaggatccattcgttgttcaaaatcctcgtgaaacacaagaatctttcattgagccatctgaacaaggttctacatattactatggaggaactcaggaagatgcattccgcgtcactgctgcttaaccactcgttggatgagtcaccactctgcatttgtttcttggatgtatcatcactgcggaaggtgctcaaattcttgcaggaacttatgcaggctagtggacttaatgataggaacacagataaggatgaggaagtagctgacaaagatagtttcccaaaaaatcgcagtaacttggagaaggttacacttgattctgattcatcattgcttatccttgatggccaggcatttgaaatgagatctgaccgtgataatgttgttgctgacccattcctttcatggttatatactggaccttcagttgaagagcagctgttggactggaaccatatgcttgatgtgaggtctgatcagtgcacgcacattcttcatgagctcgagaaagagttctcagccttgcagaactcgtacgaacagaagcatgaccagctgagcagtgaggagggcttgcttgctgtggatagccttttatgtgaagagcaaaggcggagggacgacgtggatccctatccatttcaaggatatgaggagctcctaaagaagcgacaggagcagctggagctcaatgctgaggaattgtttagcggttgcagatctgagctacatgctatctctactatcttaagggaagttaaaacagcaccttttagatacgatgaaaccttttctggcatgacctcgaaccatcgtgactatgatgggacagaggaagatgaatggggtttttatgactttgaacattcaaacgattcggtggtacagttggttgtttcaagactgaaggaacatgttgctatggaggtcagttcttctgggtgttcagtattcccataaaaagttatatctatttcacttacagcttaacacgtaacaactaacaatatatccctctcttatctgtttcacttacagcttaacaagatagatgctaggattatgcgaatttcagccgtgattgagcagctgaaactcaagcttgggcctgcttctgtccttgattaccgaacaattatccttccccttttgaaatcattcttgcgagtatgtgtacactaatctctttactcattcaattgctttaatacctccttgctttgttcatttcttaatcgtggttattgtgtgacgattcagacccatttggaagagctggtggacaaggatgctagggagagatctgatgctgcaagtgaagccttcctggctgaacttgctttggatgctaagagaaatgcaaacaaagtgagcgacacaaaacaatcccatgataagtcaaaggacaagaagaaagtgaaggattctcgaaaatctaaggatcttaaggtatctatgcttttgaatttgattatatgtgtactcctgttactcacaaaagggtattttatctttttcctaaattacatctaaatattttctaggatttgagctggagtgatcagtacctcgtccgcccagatagtgtagacgaggagacatcagagcaatcgtaagtaatgcttttactctccttttgctgataaaatcgcactatctaaaatgaatctgaatgcaatgtgttgcgcatgttttctcaaacgtgcatggaatgccttcttttttcatgttcccttttctctatgtatcctcagttacttagtaatgctaaagtgctaatctaaatcacaatcagtgtaaggatttttggttagaaagaactcatttcatatgctgtctgtgttgttttcttgttaaatctagttagcaattaaattaactagttataacttataaggaaattgagaaactagtcagacagctcacagctgagagctgacctttgaagcaagctggaacctgcttacaatattggagaaagtaaattttgtgcatataatcttcttgacatcatgtgaacacatgtgttggagtttacttgatctcaatctttcttttggtaaaccgtttcaaccatgtaaacctgctcaatgtttgtgcatctgttttgaataccgtcttatagtgcttctattaacgtggcacgttcctttcactattacagcttgtttagttgagtggttatcaaatgttgatggttgagtaatcctttattgagccctcactagttgtttcgctctttagcgaagaggaccaattactatactgtcatactgtttttcgtttcctttctcttttgcactggctgctgcatcaatgaatcataagagctccagcccttcctttagggaaaaacaatcctagcaatagtgcccatgcattgtttctgatcaaatagatataaggccagtaccgaactaaaaaatgcataacattatcctcaactttacataattacatattttgcatcacatcaatcaaccagcatgatgcaatccttttaaaaagtgtttatcgtacaaataaaacatgcatacttgcttatatctattcacaacatgaattatgaactgaaaccttgaaggaggtatgtcagaacatatcatcacaaccaccagctccataaaaaggagtaaagaggcatgtcagaacacatcatcacaaccaccagctccataaaaggagtaaaggactgtcatttatcttgagatgtcaaccaccacacattttagaattctccagcaggcggtcagggacatgaaaatattttcgatcttgtggaattcattgctttgaatcattgtttattatctgctgtgggcttcattggaacatactgcagatgttttctaccttccgttaatggctgcattggtttttagtcatgtgcagcttgaattaaaaaaagagaggcagtaatagaatcgtgaaatgcatctcccttttattctatcctattctgcacatgcactatatcacgggtgaggctagtatgcaagaactcgctggtcgtgagggtgcaaatgcattccgaaaaatcttcagcgagggcgcgccgcaacacactcgtgtaccattgtgtaattagcatgctgccgcttaattaatgcaccaccatgtgattagcatataattagggtgcagttatttgaaaatctcggccgcatgcatatgcatttggctgataaaatccacaaagtaattaagtgttattgtggtgtaggttaaaaaaaagatagcaataccttccaatcaataaatttttatccattttttaaaacttcccattgtgataaacacctattcaaattttaaaatctctactcataagttttgtgcaatataaaaagtttgtattcataaactttctatagatcaatattaccaggagacttttgcagtaatttaaatgatctactgatgggattttaaaaaatgcaaactgtaagattcaacaatctctacttataaactttctatatgataaaagttctatttgaaaacttttacagtaattaaaaaaaaactagtgatggaattttttttacaattacaaattgtaataactcagcgagtagaaattttaacaatgattgcatctacatgcaaaagtattctatatatgcaaacatgcatgcacatatagagctgagcgtgggcccacccacgtgcgcatttgtgctatctcggctcgcatgagcgtcgcagagtagccttttcgctatatctcccatctggtgattcaggactcatgcaacaccatttcttgatatacaatatttggttgttttgtttgaattttgggagtctgtcattctttaggttcatgtaatggtggtcatagtgcatgcccctgtgaaaaaaccattcttgaatagaagtgtaatctttatcaacattgatattattatttgctttggaactttcatgtttggatgagttcaattttattgaccatgtacactattgcagtcagactcttgttgattgtgatgactttgtctgcagactttcaacaagtgataattacttaaatgatcaagaagaattcaggaatcgattacgacttgaagcagaggaaagaaagttggaggaaactttggagtaccaaagatggatagaggaggaagcaaagaagaagcatcttgcagaacaacacagaaggacttcaccaggttccgatgggtcagcttgccttcggactgatgtgaatttgaacggggatcaggataagcaccattgtgctcaaaataactcacacactcatcttgagggcataaattttggtgattttcggttttctgaagttcctttgcaggaagaacattctattttgagatcatgtgattctgatcttctgcaaacaaaggagaaaaatcataacgaggtacataatggtctgggctatcctggtacacgcccaatagccagcagcgatgtggaccttattaagcctacagtgaaagtgaatggagtttggaaaaatgtagaatatacaaaggctacactgaaagcgaatggagttgggaaaaatgcagaaaatacaaaggttccaactattcctagcacccaaaagtctaggagaagtaccagccaagctcataaaaagtacattcaaggttgttggtttgtcttgtccaaatcagatattttattttaatcgtttttgcaacttcaatccaaacaattctttacctgtatgttttttaaggtgtgacaggcacttttcctgttgacgatggtgatgatgatactaggccatctattcgacaatctggttcaccagtttcaagatggagcagttctggtaaagcagttgacactgccaatcacagttatcaagacacaaaacaaaatcagctaccactattgtcttattcacaccgtgtgcatggtgctcactccgctggaagagagaattcaagtagtgagaaaggttagttggtgttcactcttatgtttcattcttattcatttaacttgtgcttgtttattcgttttaactacttttattgaaattgaagagtgtattaactccatgttgcacgaaacttaacgtgttaaaactttgagtcgccagcacctaaaatgatcctagccttaatctgtctcctactcgtgaacttctatttaattcaaagaaactggcagaatgttttccagctcaattgtcactcgggcatttaatttttttgccacttttaagatgtggcaatcaaggatttgccactcagtctatgacatgtgggtccagtggcagtggcaaatccttaattgccactcgtaagagtggcaaatagttaaatatctctctgatagatgaaatactctatgaaacatgcaatccatttgttactatagttttgtttgaatgctcaagttatgctaaagccttaaggtctgtgaagtattaaaacagagaaaatgcatagctattcttctagatatttaagtgtctcttttcttattcattactattgccatgtccatgttggttctttttttttttctctatgttttctctaatcacctattatttttggtggatttctgaagcttgattagatggtagtaatgtagtatgttagatttcatatttcatagttgatcttttgatttgagattttttaaacgtgttgcttaatccagttgacagtagtgcaatcccatcaacaaatctgtacattgaggatgacaaaaggttcaaagcagaccttgagagagctgtgcttcaaagccttggtatactaaataccctttttttgctatgcttttcttccctcttatcaacacgctcttactttggaccttgaactgctgtgaaaatttcaatattagctagctccatgataaatgagtcttgtatatgttatctgttaatagctggagatgtttagttgtgattttggttactcagaacaagtttttttttatatgaactgccaactagtttgttgtagcatatgcgtggacatggtgatgcagtattgctaaaacgaagactagcttggctatagccccaaagtgaaaacaaaaaataattcgattttaggaaatgcataacattacctccaacaaattaccgattttgagttatttagtgtgtggggtgcatctttaatattattaatttttaatgagctgatcaatgactgtgattgacattgaaatgatatgtataaagtgcaatttgcaatgctaaatgtcatactaaggatgttttaagtaacaggagaatatgccttttgtcttttcactattgcttcattgtcatcatagatatttgactat

SEQ ID NO: 6776 - DNA, 618 bp, Oryza sativa
atgcaaactgttgatagcccaacaacaggatacttctgctctcctcccacaagttcaaaactttgagttgttcagaccgtttgtcagctttggaggagtagaagtcatacaaaggaatatcatcaacttgccaatgaagaaattcggttctccatgttgatagaattccctttgggagaataatcaatggccttccagcagggtatttggctaggaagctgtggacaaaactaattatcaaaaaagtcttcccagaacctggtgcatgtgccagaatacagccaccagggttgttctcatctgccaagttcttgaccaggaaattgaaaccttccacttggtgaggtttcatatgctgtgaatgttgagggtggaggcatagagcatcagggaccacttcgagaatagctcctgaagttttgtcaattgcatctgcatcactagaatttctgtgttctgagggacgtgctctgtacgattgcttccgctgacacatgtaacagataatgagaaatatttttgaacaaaaagaaggaatgtagaaggaacataatgtagaaggaggctaggcaaggagctattagtttaagagtagcaaaatgatttccatgtgcattt

SEQ ID NO: 6777 - DNA, 17674 bp, Oryza sativa
tatatagctgccccgctggcttttttatatagtcaaggtgctgtttgggtttatcaagcaattgattggatacaatatcattgctttttgccacgtaagtgtgcatttttattgaccaatattatggcttaggctgattatatattatggtcatttttcaggcggttggtaaatcctttatgagtttacttactcggatgttataccatatatgccatatatttccaggtgtggtgaaaccatgtgtcttttagggacttaagcacatctgttaaagcagtgtgcgcatggcgtatgcccaatactttggaaatttctttattcacagcattcaagcttctttataattgttttgttatgtgaactttcaaagatgttgtcaactttaggttgtacgcatcatattttgccaagcagtcggtatatcacttgaatcatattattcggggattcacaccgcatatgctatatattggtatcaagtcacttggttgactataattatcaaaaaccactcggttggttggattatttattccttgactatatgtttggtttgttcgattaaccacatagtcgggggttacacctattaggtgcatctagtcgatgcacctgactatatttttcagccctccacagtcttcagatttggtaaaagtactcgggagaccatggcgaagatgattgaagcactcggctttggagtaatctagttcgagagaaggttatctttccgactgtgaaggtctcaggggctactgtggagattatgggtaccccatacccacacggcatggttatccgactagttataggggataacttatatctatgtaatatgtaacagatcatgacttgggtgttacgtttccttgtatattacggaacggcctaaagtcctgatttaggaaaccgataccgtattggttaaggtttctatcttgtaatcctgccccccatcctatataaggtgggcaggaggccctctagggggcagatatgagacaacctgatcgtcagatcaatacacactcggcggattcaaatccccaaacaggagtagggtattacctctcattgagagggcctgaacctgtctaaatcctttgtctctgcatccatccacttttaggtctcgtgcgctacccccttttattattgccgaaatcatgtttcgacatacggcttaccatccacaaactgatggccagacagaacgggtgaatcaatgtttagaaacttacttgcgttattttactcactcttgcccctctaaatggtccacttggttatacttggctgagtattggtacaacaccagttagcattccacccttggcaaaaccccttttgaggtcttatatggccacactccaaatcagttaggcatcactgtcaattcctgtgaacttccaaatgtgcagcaatggttgtctgatagaggattaatgatgcaactcctgcagcaacatctgaacagagcacaacaaattatgacggctcaagctgataaaaaacgcagtcccaggacttttgctgtgggggattgggtttatttgaagttacagccgtatgttcagacttctgtggctgccagggccaatcacaaattgagcttcaaatattttggtccttatgaggtgctgcacaaggtgagggcagttgcttatcatttagcattgcctgctgggagctctattcatccggtctttcacgtgtcacaacttaaatcagctcggggttttaagggattctcttctgcacatcttcatgttcaacttgagcagaagcaagttcctgtggctgttctggatacccgggtgcgtaagtcaggtaatgctgtcattcaacaagctttaattcattggtctgattgtccagttgaggaagcaacttgggaggacttggaggatcttcattcccattttcctcgagctttggcttgagggcaagccaattttcaaggaagggggaatgtcaggatgtctgcagtggtgatccgggcgatggcaacagctccaaggaggaggatgctggcgggaggggaagaagacataagaaagctaatactagagtatctgggccggagtgggccgtgtaagcgtgcgtgtgcgtaagggcccaaggccttgtctgtaagcaagagcaggtgagagagagagaaagagagctaaatacagaagcaaactctgtttgttcatctatcaaattagtaaaatctggaggtgattggcggcggcggcggcgacggaggaatttgtaggaatccccgtcgatctatctgttcttgagtatttggttccatttctctgttggattcttaacaggggaccacctgccgggagccctacctgctgcggttttcggctctcttcgccgagctcaccgacgacatcgtgccggtggcgacggagtgctggatgagcatgttccacggcacgacggcgaggggttgcaaggcgatggacccgttctacttcttcatgaacctgttcccggagtacaccgtcacgttcctcgacaagctgccggccgagctcacctgcggcggcagcggcggcaagtccagccacgacgtggccaaccatgtccagaagctcatagcttccacgctctcctacgagtgcaccagcctcaccaggagggacaagtaccaacactggtggagaaatgctttttagtcccggttcgtaacccccctgtagtcccggttgacgaattcgggactaaagatcgctatctttagtcctggttcaaataaccgggactaaaaatcaatcttttgtcccggttggtgttaacaaccgggactaaagatggttgttaacaccaaccgggactaaagatattttttctttttttttctgcttttaatattgaatattgatttcacaccatcccctcccatatccaaatcatcacatattacagaacatctccaaatcatcaaacaaatcatctccaaatacatcacaaactgttaaaaaaattacctcacaaggttctaaaaaatacatcacagattcacatctcacacaaaaatacatcacagattcacattaaaaaaaaaatccggccggcggccactgccgcctcccctcctcccatccgcgccagccagccggcaccgcgccgatcgccgccgagcggccacccaccgcagccgccgcctccgcgcggcccccggcgcagccgcgtggccccccgcgccgccgcgccggccgcccaccgccgccgccgcgcaggccgcctccgcgccgtcccccgtatcgccgcctccgcgccggccgcctgcactgtggtgaaggaaaaaaggaaggagaggaggggagttagagataaggaaagagataagaagttagagaggaaaaaaagagatagaggaaggagtttgttgtgtggacggaaaaagaggatcggtactatggattatacagtgtgttttgatttttattcccggttagtaacaccaaccgggactaaaaataggtttttagtcccgattggtgttactaaccgggactaaagatcatagggccctgacacggcctgacatggaatcaaccgggactaaaaatcatctttagtcctggttggtaactccaaccgggactaaagatgatttttagtctcggttggtaacaacaaccgggagtaaagatcttcctcttattaaccgggactaaaaatcatttttagtcctggtttttaatggaaccgagattattgtagatttgggttgaccgaccaaagatgatttctctaccagtgaaagcactcgccggcaacgacggcattgtcgccgtcaagacagcgaaggccaagtaatcagctcagtgatcagcctatctgccgatctcctcttgcaagaacagtaaaaatttataggaataaaaggggagtgtttgcatgtcaattatatagttatgaaattttttttaaaaaaaattggaaagatgtattaacatgttcaacttctgcatttcgcaacgaaaaaataaataaactacaactagttaacgtatatttacagtcaaatttgttttttcgttgtgagatgtacaagttgaattttaacttacatgtttgtggagtgatacaacacatattaatatatcttctcaaattttttaatcatttgagtgacatgtaagagcgatcaaaatagtttcttgaacaaaagtatatatgaaaacatggaatcaaacgataggagtaagaataaaatatgtatttattatgattattagtcgattagtagtctgaaactacgatgtacatacgttgcaactcttccggcagaagccaggggattcactggtgccgaccatgtaaccggggttcttggcacactctccagcagcagcccagctggagcagagagcatgttgatcctcgcatttgtccgaggatctccggccattttcgtcgtaggatctcacatggatccatttcgtcgccgaccacttctcgccttgtatgacagggcagcttccgtgcaggctgcctgggtcgaacgtcgcgttggggtagaggctgaagaacagcaccgcactgcctttggtaggtttcactgccaaacaaaatccaaacattgttacaagcggacaaaaagcaaaactgcatgacgagcccaacagttgcgagttcaaactcttatcttcgaaattgcacattattacatttgaacaaaccaaaatttgtaaatataattttggtttgcgagtgtcaaccatacctgcgaagccctgttctgcgcagtcggaccatgtctcgtctttaggctgtgataacctagcctgtggggagaagataaattgtaatgaaattttgcagcaaaatcaaacgaggccagaaggtgtaaaatacctctgcatcggggaagacggtctctccacccatcttgacattggacaggtacatgagcacagtagcaatccgatgacctccacgagctgaggcttgccgtccgcgaatgtaatcaaagtgtggctcgtatttctcaccttgcccataacgtagcatttgcatagattcaccgttttctgaccgttcaagaatcacaaaacgggcaaagcaatagaaggtgatgcactctgaagaacatttggagcaaggtccaattaagcagttttccagtgttctgtgcccttgcaccatacctgctggaaacatggtccaagcagcaatcctctcctctattcttgcaacgacttcatccttcagataaataaaacattagagggtcagaagcaatttttattatccacacgcgtgctgacaaatcactgcaatcagaaaattcagtataggtatatgcaacgtgcatagaacattggctattttagccctttaggaatacatgaaactcgattaattcctgcgtattcacatggtaaaagaaaaatcctataatccaaatgtggactttgacctcattttggaatgaagaattttggaagaattgcaccgatgatcagtccaaaacccctgtgaaattcttacgtttcaaatgaatccttgctcaacaaagacttgaaaattgaaattgtttggatgcttatgtgatccggacaagcgacattgcttattttccagccttaaagcgaccctcgctcgtagcctcacctgtttcctgatgaggaacatgccggagctggtcctcgtcttgctcatcacgctctcccccgacttgccgtttaccaccgtcgacctctccatcctaccctgcttcgccttcgcaattcacacacgcacacaaaaatagaaaaaataacaactcaatgaacgcacgtatcagatttcccaagaggggatttgatttgagcgcaacctaccagcgcgatgaggtgttcgcactccacatccgacaggaacccctcgtacaggaacaccctgccacctcacagaatggagagatcaacggaaagccgccggctcgccgccgcacctgagcccagagattcgcggcggtcgattaatttacctggggctccacgagacatcgactgtgcgggaggcgtcgaatcgcccgccttccccgccaccgccggtggcggacgtctcgccggtgacggagaggagaagcagtaggacgacgaggaggacgagacgagccatgcccgtgcgacggcggcggcggcagagacgagcgccgccggcctagctcccttgggcggcggaggggggtcggagacgatgaggttgatctgtggggccgacgcgccagtgagagtgagagggtgtttataccgtggggcccacgtgtcgagtgcgtcgtcgacgcgtgctccggaagctccgaaatggcggcgctctgtcagtagggcccagtggaccgaacaattgggcttgactttttttctctttcgaaaaaacggatagttgggcttggaccttaaaccctctcaacttagagttgaccttaaacttagatttgataacaccccgtcaacttgaaacggagttgctagaaatatggcgccatatgctacagtcgatttttttcagccacttacacagtagttacacctcatttacactccacttacatatgtaattagtatgtaattttcgaatttacatatgtaattttagtacttacatatgtaattttgagacttacattgtaaatacactaaaattacatatgtaatttaggaacttacaatgtaaatacatgccgactattttttgatgaaaaatatgacgtaataaatatagctacaaccacttgaaaaatagtacaactcctagaagaagggtgtagctgtatctatggcgccatatttttcatcaaaaattcccagagaagagtactcacaactcacacaatgacacaaacctaaatttcttgtaagaatagtacaaatttataggaagagaagtatatatgagagtgtagctcaattagatatgtttcttgtggtggaaccaattcacttggttttaggtttcaaacttaatatgagtgctcgattatttatttttttagtggtatcttcgtcaatattaagatatatcggtccgatcttttgaaagcgatcatattggtagggtgcgtgcgttgtgaacgttcatttttgtactgtattttttttgaaaaataattacttgtttattgtgattattagtcaattagtagtatgaaactactttgtacatacgttgcaactcttccggcagaagccagggggggagtcactggtgccgaccatgtaaccggggttcttggcacactctcctgcggcagcccagctggagcagagaacatgttcatcctcgcacttgccggcggatctccggcgatagctgtaggatctcacatgaatccacttcgtcgccgaccaccttctcgccttctatgacagggcagcttccgtgcaggctgtctgtgtccaacgtcgcgttggggtggagactgaagaacagcacagcactgcctttggcaggtttcactgccaaacaaaatccaagcattgttgcaagtgaataaatcaaaagtgcataatgagcccagctgttgccatggagggtactgtctgtgtatgccgagctaccagtttattcaagaaatcgcataaagaccgcaagaaatgatctctgctggagttgctcgtagcgaatgcattgcaatttgtaacagattttttgtctgccttggcaagtgtcaaccatacctgcgaagccctgttctgcgcagtcggaccatgtctcgtctttaggctgtgacaacctagcctgtgggagaagagaatctgtagtagttgcaatcatttcattctagtaacaaaatcaaacaatggtaaaaaggtgtaaattacacccaccgctccaggaaaaactaacttccgagaatgaatctggacaaacgctaatctaaattcatttcaaaaggtgtttttttgggtggagagagtacctctcaatcagggaagatggtctcaccacccatcttgacattggacaggtacatgagcacagtggcaacccggtcaccttcacgagttgagccttgccgtccgctaatgtaatcaaagtgtggctcgtatttctcaccttgcccgtaacgtagtatttgcatcgattcaccgttttctgacagtttgagaatcgcaaaattggcaaaacaatagaagatgatgcactctgcagaacatcgggagcaaggtccaattaagcagttttacagtgctcagtgcacctgcaccatacctgttggaagcatggtccaagccgcaatcctctcctctattcttgcaacaacttcatccttcagataaataaaaaaatttgaggggtcagaagcaattttaactacgacagatcacagatgtgctggcaaatcactgcaagtctgtaagcagaaaattcagtaggcatgcgccatgcagagaattttccggttactacgattcagaaaagagaaaatcatatgatccaaatggggaccttgggatcacttggaaagaaggaactagggatcaattttatgtagaattaatcacaccaatgctactgaaagttttaaacatatttcatctagacccacgaacttacaaagctcatatcgatgtctctaagcttggattattgtatcatcgcggtccaaaacacgtttaaccatgatcttatctacatggcataccacatgaaaaacattcttttatatgaattggactgatcgctctaaaactcctataaaattcttacgtctcaaaaggaatcctggctttacaaagacttggattatttggatgcttatgtaggacaagcgacatcgcgacaaggacatggattttccagctttacaccaaccctggtagcctcacctgcttcttgtcgaggaacatgccggagctggtcctcaccttgctcgtcacgctctcccccgactcgccgtccaccaccgtcgacttctccatcttaccctgcttcgccttcgcgattcacacacacacaagacgcaccaactcagtgaacacaccaacacagatttcccaagaatagaggatttgatttgatcccaacttacgagcgagatgaggtggtcgcactccgcatccgacaggaacccctcgtacaggaacgctctgccaacccccacgcaacagagagatcaaccgcaagtcgccgccgccagagattcgcggcggttgattcattatttacctggggcgccacgagacatcgacggcgcgggaggcgtcgaatcgccgtcctcctcccccgccgccgccgccggcggcggtggcgtacgagtcgccggcgacgaagaggaggaggagaggtagtacggcgaggaggacgagacgagccatgcccgtgcgacggcggcggagacgatcgagcccccacttcggcgacggaggataatgatggatggtcggagacgacgagatgattttgtggggccgcttcgtcagtgagagtgagagcgagagggtgtttataaacgtgggacccatgtgtcgagtgtgacgtcgacgcgtgtttcggaagattcgaaatggcggcgccgggtaggacggtaggagcgtacggtacatgacgctggttgggccttggtttttggttgagctgggggcactggcccgcgtgggccagtgggcctagcggaccgaacagttgatgggctttgagtttatcgtttgagaacggagtaagttcactctgggtccctttgtcgcccagtccaacctcgcctatgtgattgtcattcttctatttgtttcattgtgcaaatgttaatgtactaacctagttatttgtatttttaaataaaacaccttcgaaggtcgatggatgatggtgttatttataagaatggattatggtttagatattaatacatattatattataaatacaacaaatagcaacttggaataagtagtataaacaatgttgtcatataaagttcgttttctgagtaatcatatttttaaattcgtggtaaggatggtccgcgaatgatactatccaaaaataataaatagtttgccacggataatattttatggcaatacccttaatgccacatgcgagttatattcaatgtaagtaaccaatgagaacatcagttggcaacttggcataagagaaatatatgaatgcacatgctatttttcaatgaaaaggtgacctaatctattgaaaacctaaaaaaacttatttacacgggagctttaaagaaaaggagaaattccatatttccattgaagcactatcagtcaataaagcatcaaccggatgccaaaacgtgtcctgaaaaaggcaattctcgatttaacactaatcatcattatcctaataaccatagagaagcataacaatattccaaagccaaacaaagcgagacttaggctgcgttagaacaaaagggagtttgtttgtttcgttttccgcgcgtacgcttttcaaactactaaatggtgtgttttttataaaaattttctatataaaagttgttttaaaaatcatattaatccatttttgaagtttaaaatagttaatacccaattaatcatacgctaatggctcaactcgttttgtgtatattcccaatcttctcaatcacctctctctctctcaaaaacagccttatagtactaaaagaaaattaaaaaaaataaaagtacgaatctcgaggcagccgggtgatccctctccatccgttgcggctgccacccgcggatgccgttaaaccctaactccctccactcccccctatttctagggttttaagcctcacccaaaccgcctcagccgctcccctctccccttcgacaacagcagcgccgccgccgccgcaggagccgcatcgccgggggttcgccggagggagggagtagccatggatcggtaccagcgggtggagaagccgcggcccgaggccgccgtcatcagcgagaacgaaatccgcatcaccacccagggcctcatccgcaactacgtcacctacgccacctccctcctccaggtacagcgagccccctccccccagccgccgctcttcctgcttcgctcccgcgatgcccccctcttgcgggtgccccgcgcctagtagcgggttctccggttagatcttgctgtaccttgtaagaaaaaaaggtagtagtagtaatttttgggatgaggcgaatgcccgttggtgtggtgcactctacggcttggaatatatttggggaagcatgagttaggcgcgtgagtaagacgaggtgtggatttggtgcattgtgtgctgctgctgagttgctgattggaatcttggtgataagggttgtgttgagctcacaaagttcctgcctctgttagtttcgatgtgcaaaaacatgaaagatattaaagatgagttcttttttgttgcgtcaatgcctaaaggaacagcatatggggattatattggtgccgtgcaatgcattgtttttcaacagttaggtagcagggctgtgacctttgtactcacatagcaatgagtgatgagggagctgtttttctgcacggctatagtaggcacatgggatttctcttgctgtggcttgagttaaatttttgagatactcttgttattaatgtgccatgtgccaagtgccaattgacgacaagaactctctgatactaccgtttatgcatgcccgatttaagttgagcgcaatatacaagttttatgtttaatatgcaaactagcgcaacttttaatgcctctttaaagagctggttgttcctataattctgatattgaatatagtggattgtcacacgggtattatccttcaatcacgatttagtgccaaagtttagctctcatcgtaaaaaaaatgatttcctaattcagctcctgcacctgcgctccacaccgatttcaaattatagaagagcaaactaggaaacagttccctgtcctttctttctgcaggcacatcaaactgtatccctgctggccctttgccaccctgtgataagtgtatttgcattttgcccgattggatcctcctcttcaacccccagtctccaagttgactgttttgtttccttctcagccctatgcccatgctagctctattgctgtcaccgaggatctgctgcacgacgagactgatgtttgtggctgacataccttgaccaatgtatctcctgtttttatggactggggggttcacagcatttttattaaaatatgaatgcagaagatgcattcttgtaatccatatttctttttagcagtgtctatattcatcaggtagtccacatgattgttctatttataaccacttaaccagtacaaatctgagctgttatgtaacaactgctggaaatataacccattttgacaacattttgcagtatcactattcacttattttcgtgtgaagtgttatgccatttgtactgaggcatctaccaattgtcaccgtttatgtactctggtatgtgcatgctatgaatcttataacctgtttgtagcaggaaaagcgcgtgaaagaaatagtgttgaaggctatgggacaggctatcagcaagacagtggctattgctgagatcataaaggttagcctattgttatctctcttgctttaggtaccaatatttgaactgttgagcaattaactcacatctaactggcaactgcagaaacggatccctgggttgcatcaagatacatcaattagttcagtcagtattactgatgtatgggaacccattgaggaaggccttgtaccgttaagtttctgagaacaatttcatctgtcagtatattcttggactacactttttctttatgttatttattagtgttatcttgtgcagattggagatgactcgtcatgtttcaatgatatcaatttccctgtcaccgaaggagcttaacaagagttcagctgggtttgtttgatttgctcttatctcctcagtgttcaattcaaataatcacactaccatagttctgaatgaatgtagcaacattttatcgtccttttgaaggtatcaagctcccttgcatgcagagccaattaagccacaaagataccaacaaacccagcaatatcaacaacaacagcaccagtctaggccaagccaagttcaaacaggtgaatatcttttcactaatagaagtattttcgtaccattataagccggattgctaacttgttccttttgtattggagattcatatgggcgcggccgtggtagaggcagaggaagaggaaggggttggggtggtaggggaggctatggtggagggtatggtggatatgataacaaccaaggaggttatggtggatatggacaccagggtggatatggacaccaaggggggtatggcaaccagggaggatatggccacaatcaaggtggttatggagggtatggttacaaccaaggtggatatggaggatatggtaagtaatatgatgatatgctagaaatgtttattatgagataatctctcaatcaggaatttggtgtcctgaaattgtttgcaatcatttatagtaaccatttatcttttcagaaaatggtggctggaactacaaccggaacagaggtggtggtggtggcgggggccgtggaagaggcaactggggatatggtggtatgtactatttaataattgacaccttattttattcatgaccaagtaagctgttctgtgttcatgcctctcatatgtcagaggtactagtgttcttctgaactagctattatgttttacattgttttaatcggaatctgataattatttacatgctggtttactaagaataaagtcttcacaatttacttcttgtaccgtaagttcaaatccaccttcttggctcccatatatttgaacggagtaacaatttttaacacacgctgaacttaaaatagcaacagtgtctgtcatgtaacacaattacatgaaggtacttgaaatgagtggaaaatgatataatatgttgagccttttctaaattatccaggggcatttcatttccaaagttatctgctttaccttcactttagtggtatctgtttttgtttgtaccaaagaataggagacgtttcgtcatcttgcagcggcataaaacatccaattgtggaaactgttatttcaggtccaggaggatatgaacgttcaggtccggcatatgaacgtggtggcagaggtggaggtagcccaggcggcagaggctatgcccggggccgtggacgaatgggcggtggccgtgggcgaggcaaccaaaactattagatcgactttagttggatgtgccagcccggtcgttgggtgctgtatgaagaacaaaaactgtggatgcgttctccataggacggaaccctagctgtttctttgtgatcaatcgactagtcttcccagcttttcgctataatcatcaatggtgtctgccattgcttcgattctgtgggattttgacaagaatgttaagttttaccttggacatattttcctgtatttaagagtgcatttttgaatagcttgtctatcttcctccagcttctgagtttcgtgtttgatgtgaagctccttggagtgcaccagtcagactcttctcaaccggaagaaaatgaattctgcatttgttcatggaaaagcagaacagaatttccgttgaattattaagtttgttgcaggagtacttcacgatcaaaatcattaggtcatcatctaaagaaaatcaatagttcctcaacatgtcccttcaaacatttctcaagatgggtttggacggggttgtttgcagttctacgtcactgtgtttgattgacatttaaaaatggttatcatgcggtataatttctatctgaataaaaaatcaccccatttgatgcacatactatttttaggagtaacactacaggctttatccaatagttaaattctatagaaaataaaagataatccatatttacatctctactattataaaaattgaaatgtttttgctggtagtttggtacgtcatccatgtatgagtcggtttttaagttcgttcgcttttgaagtatgagtcggtttttaaattcgttcgcttttgaagtatgagtcggtttttaagttcgttcgcttttagaaaaacagacatgcatttgagtcaggttttaagttcgttcgcttttgttttggaaaaacatacatgcatttgagtcaggttttaaagtcgttcacttttcaaaatacaggaggagtcatatgagaaatctctttaaagaaacttgcatgctaagttgagatgatttgacatttaattgcagctcatgattttctagaaaaatatatatcaagtgaattctcacaataaaactattatgaagattgaagatgtttttgccggtacattggtacgccatccgtgtttgagtcggcttttaagttcgttcgcttttggaaatacagatctgtatttgagtcgggttttaagttcgtttgttttttggaaatataggagcagtcgtataaaaaaaatctctactattataaaaattgaagatgtttttatcggtactttggtacgtcatccgtgtatgagtcagtttttaatttcgttcgtttttgaaaatacatatccgtatttgagtcgatttttaagttcgtttgcttttggaaatacataaaagacttctaattgcagctcatgattttctaaaaaaaaaaatttatccaagcgaatttctacagtaaatttcctctcaactaaaccatataacaataataaaattaaaatagcctttatccgttgtaatgcacgggtattttttctagtgaatataaaaataaaagatcacatgattaaatattgaacaaaaaagaaaagaaaaatcactacaactctaagaataaggattatactatcaaactaagaactgctcactgttgagataaagatgaaactcatgtagataaggatgaagatgaagattaattgttttacacaaaacaatgtggtattaacgtatgattaattaagttttaattattataaacttgaaaaaaatatttatctgatattttagagcaacttccatataaaaagtttttgcacgaaacgcaccatttagcaatttgaaaagtgtgctattaatatcaaaattgtcatccaacttttgttggagaaaaagaatgggcatatatctttaaacacatcatcataggaaccttgactattgaagttgtgtttagctccaggggtataaagttttagcgtgtaacatcggatatacagacacacatttaaaagtattaaatgtaatctaatatcaaaacaaattatagaatccgcttgtaaaccgcgagacgaatttattgagcctaattaatccgtcattagcaaatatttactgtagcaccacattatcaaatcatagcgcaattaggcttaaaagattcgtctcgcaatttacacgtaatatgtgaaattagttatttttttcgtttatatttaatattttatgcatgtgtctaaatattcgatgtggcaggctctaaaatttgccagggatctaaaaagggcctgagtggtatagttctaagctactcactattgagtgataaatatgcctattatggggctttggcagctataagatctgtttgggaggttctgcaagctgctgtttttcataatcaaaagttctccaaacatttcagtttttcattaggattctgagaaactgaagttatagaatccataaaataaactataagtcaaaagttgagtttagcagtttctccatattcctagaaactgactgtcaaccggttgtttctatatccttaaacggaacctataattccttttagaatctcatctatagtctggatctacacccttttgtaaaaaaattctagctaggttaagaaacaacctccagtaataaatctatatataggctatgtctatattcgtattagaagtttttattttagggagtgatggaatttaaaagtcacccctacaaaatacagaaaacaaaataatatagtagctagaaactaaagaagtactccctctgtttctaaaaacttaaaattaaatgaaacacactatgaatctagacaatgttcagattaataatccttaggaaatatcctggttattatattttaggacggtagaaagttttctgaattttcattggttgtttattactagcttcgagaggccgagttgctccacgtggagagagagaggagcagagagatggggctgacgtgccgagcaattccatgggccgtgcggctacacgaaaccaggtgtagaccatttccgcttgcacagcacaacgcccatcatcctggatccccgtcacgcgaacgggttagctaagctacagtcacactagtactccctattaaaaaaattaatataaataagaattcgatatcacttaaacgaatatagataaaaaattatccagattcgttgttataggtggtggtgtcgtatccttatttcggttttttttttttttaccgaaggagaacaccgttggccagctaccggacacgacccgatgaacatgcccgtctaggcgtccatcgagtccactgctccagtacatccgaacctggacgcctctccgtccaggtgcttcgcacggccagatccatcgtcatgatagactggctagacgagctactctcgttctcccttccccccccccc

SEQ ID NO: 6778 - DNA, 609 bp, Oryza sativa
ccatctccccctccctccccggctctctctctctctctctctctctctctctctctctctccctctcccccgctctgcccgtgtgctgcgcacgcgtgcacgtgagccgcgccgagccgagcgccctccgccctcgctgccgtttccctccgacgccgcccaaatcgccgcgccgcccgttgcttcccgcgcgcgcgcgccatggtggccgaccggccagtcgccccgccgtcagcgcctgcccgcgcctgccgcccgtgtcgtcgctccgctccaaaccgcccggccgtcatcgccgtcgtcatgacccggcccccgccactccacgcgctagcctccaagggacggaggcagagctcctcctccctctgccgcgtcgcccccgctccctcctcctttccccaaagaggcaaggggcaagctccctttctcccttcctttttccttttcccctccccgccggcgtcatccgtctctgtcgccgttttggccgcgagcgccgagcgccagctcgcgccttgaccgcccaaggtcggtttccaaatcgacatcgtcgtcctataaaccaaggcgccctcccatcaattcctcctcccgtttcgctcgccg

SEQ ID NO: 6779 - DNA, 1058 bp, Oryza sativa
aacttaccacccatgtcgaggacgacgtactgaatgcccatctcgcccttctccttgcactggtcctcctcgtcgtcgatccaccgcgcgatcctgaatgagcatcacaagtcgaccatggtaagagatccaaatttttttcaagctggacacgaggtgagtgaatctgcttgctgaattctgttcatcttgctcacctctcacgcaggtagctggcgttggtgaagtagatgggcgagtcgacgcggagcacgagcacgccggggaccctctgcgcggcggtgtactggtccatccgccggtagatcatcgtgttggggatgttcccgagcaccgtcgtcctcggccgcgccacgaacagcagcacgcggaggatggagatcccgacggcgacgacgaggccgatctcgacgctgccgaagacgacgccgaggtaggcgccgaggcagacgcagaagtccaccttgtccacctgccacaggtggacggcggccgggtagtcgatcagccccagcatcgccgacatgatgatcgccgacagcaccaccagcggcgtgtagtggaacagcggcgtcaagaacagcagcgtgatcatcaccgccaccgacatgatcacgttcgacatcgccgtcttgcagccggcgttgtagttgacggccgacctcgagaacggacctgcatacacacatggtatcagaaacccagaggtctcgagttcgaatcctggctaccacgaatgtgcataccggtggtgaggtagcaagaggtgagtgatcccacaatgttcatcgttccaaacgcgatcatctccttgtttccgtcgatgtggtaattcttgaacattgcaaagctccttcctacggcaatcccctcctgcattcgtagaaacagacagtatacatcagcactccggtctgatcaagtaatgcagaactgcaattaatgtctgcagaaatcaatcgatttttcaagcttacagcgagggcaatgacgccagtgatgatcccggtcttcagggccagcatcatgtacggcgacgagaagttcaggcttgtggc

SEQ ID NO: 6780 - DNA, 1408 bp, Oryza sativa
aagaggagcatgagtacaaaagagttaaagcccctgagaaacgttcacgcgttcttttgagggattatatgactgcaaggaaggacaaaaatgatgccggacagaagacgaagaagaagaggatacccttctgtggttgtgtccgtattaaatcaagaactgagccttaaccattaagtaggtagcaggaggaacatattcatgtcagcccaataggttgacagaacgtgatgctcttaggatctcttctgagatgagtaacactatgatattaacaagaaactcgtgcactcaaatttccctttcttgtcctgaaatgaggcagtgatgtctagtgtaatgagttaatattattaatgctgttattaattgaagcattgtgcatatgtgtttcctcttgtattgcctccatatgattgctgtgaagctaccaagatttgtgtttgtcatgaagccgccattatgtatagtataatgcctcctttggttacacagttttcgctctcttataactgcgtacatatcaatttcatcttttatttctgtactcagtaatgaatatctgtggttgattcagtgtagttgatgataggaatgctggaatagtgcagtacattgtacagatgcaaatgcctgtgcattgtatagtgtcctcttctattacctgatcaaaagcaggaactttgagctctcttgctttgtttggatgtggtgagtgattgagtgccacttatttgtttttctgggactgaacacagatttttggtaagagtactaatctcaatgccttgtagcatgtttgtgttgccttcagcactgcgaatcgattactagtatatgaattttgagctgacacctgatgattttcatttttgccatgtaggcgctcattctctttagacaatcatcatgcaagaatcaagaattcaggatggatatttggaaaaaaggtatgatcttgagtcaatacttcaaagaagtagctccaatgcatctgtacaggctctgaggctcatcattttcgccttgcaaaaaaaaaggtgattttttttcctttgaacttccttgacaacttagtactacaatactcgagatgcttatatttatctcggctttgcttgttgacaacctcaggttgatcaaactcaaccatactacagtaagttcttctccaatcagaccaggttctcatggggtgctccactgcccatgaccattcccggcttctgcgagtgcatcacgaagtcgcactccgccaccgcctcgcccaccgtggggaagatccactcatggccgatcgcctcaagcaccttggagctgtccaacttcttcatgatctcgctccccgggttcgccaacacaatctgaaaaggaaatggcaggtaactgaatcagcctgggttcctga

SEQ ID NO: 6781 - DNA, 677 bp, Oryza sativa
tgcaaaagatctgcttgtgtggaaaaaaagaagtctttacatatggcatttatattcaacaaatggcagacaagagatatgttcagagcatccactgctttcccttagaaagtttgtcttggtaatcaattctgataaagtgactgcccatttcaagttatcattccaaacctccaataaaaaaggttgaagtatcccataaggccatgatcccatccagtactagcacaaatggaatgtaagtaacattgatgaattggataacctgctgattttagctatctctacaatcttaatgcgacatcacagaggtttgttatgaaacagaacatgcccttctctgaaatgatttccagtaaagaaaatgcaatttactctgtgctaaccagagcaaattgaaaagtttgtgctgtatgcataccgttcattctttgcaggcaggatgattatagattttgccttatttgctgctgctctctcaaatgattttgtcaagctaaggctacagctgaaatgtaaaaaattggagctcaatgagttttgatatgtcaaagaaagtgtgtcaagcgtaaatggatggaagcaaatgatcgtgaccctttacctcttggtgaagacgtcaatatggtttaaatctttggcaaagctatctccaagtttctcgatttgctttctgg

SEQ ID NO: 6782 - DNA, 2409 bp, Oryza sativa
acccaagcacacgctcaatgcgcgtcttttgctgttaaaagaaagatcatattaacatagattacataaaaggaaaaacatttatataaatggttatgctaatttaataaggttacgcaaacctaatttgagcatatatcttcaattggcaacagtcactagtctctacttactcttaggtgagtagatgatgaaattagacatgcccaagcttcccaaaaacattcctctaaactttgttggttcttcctgaaaaataaaccaagatatttcatcatacttttatgcttgtccaattattacagagaggtttttttaaaacaagcatacaaataaaaggagcaatgctagagaacggagaagattaaattagaaaaatgcaaactctttaaataaaaataacagacctgaacttatgaaacaagaatcccccaacaacaactagtgaaaagcacgtaatcatcaaagtaatgatagacctgccaagataagtcagtataaattatgaaattgatttaccatgagctaaaaatatattatgtgtaaattaggaatagacaaacttttcaggatgtgcaaaaagtgaaagtccagtaatgcagtaatctgccaaaagaagcatgaaaaataccaaacatatatgtctaactgctcaacttacaaggcaatgttccgttcaagctgtgaattgaataggtagtacaagcgtgaaatgctccatcggatatcaggcaattgtggaaaactaacatctagcttcagaggaacaggttttttcataggatctgatatgcatgccaatggtaaacttgtaatgttgtgtgacatccaagggagaaattttgtcatcaactgcatctggccaataacaattttgtgtagaacacagaatgtgatgcttacaacagtaaccacgttgaagtttccctgaaaaattatgattatgaaacattaagcaagacaaaggtgtttttgtatatcatccgttgtgaactgcagctgaagggaatactgaatacatatggaatatatttcaattgaaatcgttgcttcaaaaggcacaaatcaactgcattatttctaattatcgattattctcataacgaggagttagatgaacacgtcatttagcagtctctaatccatattccaacaaaggaagcatggaccaatctaaacctggttggtccagaaagcagtagctcacaactgttattcgtcaatcataagggcgggatttggttattggggtctgattatgcatttatgtgtataataaaatcattcttgtggcactgccagtgcagaaccacttaattagatgctctgtcaaacaacccgacttcaccaccattgacctataaagcatgtattctaaaaaacacatgccaccttaatctaccaatcaaatttttgcattgccatcataaaattcacatgctggccctggtgtctatcatcatcacatcacaattcaaaaagaaaaagaaaatgaatgatgtaccggaaaaaaaaaatcacctcagcaggaaagcttgggttatttccggatgtggaagtggttggttgttctagattaccattagtcaccttctcattcatccccattgctgagtcgaacactcttactagtcctggccaacgcaagcatagaaataaaggcatgcgtaaaaattaaattgataaaatcagaacatggttcggtcaccaatttcgtttaaataaagagagaaaacgttagaaatccaaatagcagacaggaaacgcgtgctgcatttgccgcccacgaacctcgcttgcttgggagatggcccgcggagcggactccgactccgattccaccaccgcgataaacgcgaacctgcccggggaacgcatgaaacctaggaggaaaaagaaaaaaaatcagagacgcggattcagatcagcagaagatcaaaaaaacccttgtacacatgtagtaacagtgtgtacctgagggccagtggcagcgcggggcggaggcaccgccgggcggcgggcgcccgcggcggcgacgagacggcggcggcgtcgagctgcgatctcatccctccctcctccacctctctcgctgctccaccggcggcgaggtgctcgcgcggcgcgggcggaaggaccgaagcagttgagcgagagtggcaagcgaagcgaaggcgttttgacttgacgaaaaaagcagtggagtctcgaagcagtgtgggggagggatgagggggccagcgctgaacacacaaatattttttgtgtgtgatcagtggatcaagcggattgggttctcttttttttttctgtgcaaatattttttttcgtcttcagagttcatactgtacagaaattcagcgaaaatgaaaatgaaaaggataagaaggacgacggggctgcaggaat

SEQ ID NO: 6783 - DNA, 1098 bp, Oryza sativa
gaagtagtagatttctcaaatcctacaggaatcagcaaacacaggaaagacaataggagtcctttgatagtgctatgggaaaaacaaaggaaagttaacaaagaggtcacacctcttgctatttttcctataaaatgtgaagcataggaatacaatcctatggaaagtttcattcctttccaatgaatcaaacagacatgtaggaaagaatccatagggatttaaatcctacgaaaatcctttgccaatcctatgaatcaaggggccctaaacttgctcttatccttcaaatacgtagcaagttggcaacaggcggcaacatcatgaattgcagacgtccactcaaagcagcaccaggaccctcaatccattttatccaatgtcacactgagggcccctttgaatcataggaatgaaaaaacggaggaatagaaaaaacataagattctgacaggaatgtaagtgtaaaacagaggattacaaaacacaggaaaaacatagaaatgaccgtttgattggatcacaggaaaaacataggaatttgaggagagataaagactcaaaggatttcttccatgaggttctacctcttgttaaaattcctccaaaacttgtatgggaagaggcattccataggaatttcataggattccataaggttcattcatttgattcaaagggctttgtaggaaaaattcctataggaatgaaatcctctaaaattcatatgaatttcctttgaatcaaatggggcctgaaaatgtaactccccatcaatggcacagcgtcccagtgcactatgcagtgatgatatgtgatgacctcaaaatggcttgctatctgtttgctgaaactgattctacttcggagcgatgtattattgctgaaatatactgtacatcatacatgtgcaatatatactaccctctatgacttggtaaatagtactggcatgcccaacataaaatgttgctggtaagtacttcgtagtgtactatattactccctccgtcccacgatataagggattttgagtttttgattgtaacgtttaaccactcgtcttattcaaattttttttgcaaatataaaaaacgt

SEQ ID NO: 6784 - DNA, 1916 bp, Oryza sativa
acagaaggcatcaaaagctggcagcataaccaagtactaatacatgaactcgatacagtaacgaaccatggaaggaaacacatcaaaatataagcagtgtgtaagaagagattagtagacggctatgcagtacttctacttggattttcaacggagcttcatccataggttaatggagaagcaggtcacccggatgagttcatcggtgtcagtggagaaaacggttgcaggagttgttgttgggcacgtgcagacgaagaacccctcttacaaggggctgtttctttggggcttggacttcatgttatgctggccaagcccgagaggagagcagaatgtacaaaagattgggaatctgggatcgttgcagcaagacattcttccatgatcttgagttgcctttgcccaacatcgacagccttggttccgttctccattgatttctcctgcaaggtagtaacaaccaatgtcttaagtcttaacacagtcacagaggtaggagtattggttagaaggctacagtagtgctcactacagaaacataataactcagctccatgattagtatggataaataagggagcatgattcacatgcaaggataaaaaaataacatctgctgaggtttggaggactcatgctgatagtcaaaggtaccatgttgagttggactaatggatcatctagtgcaaggacaacatttaggcataaggagatctccattttttacttgaacataaggagatttcttgcagatagtacaaacaagctctccttaccccccaaaaaaggatcataaatacccaaaagaaaaactaataagctgaatggactaactacatgagcagagagaagcatactacatgcaaagcttttatgcaactcttgcagattcacattcataatttcatcattgaacctgtaatggtgtcatagtatacttcagaagaggggttttgttgcggggatataattcagaggcttaacattcataaatgaagtagggcctatcatatgcatttgtcatgatcagttgaccaccatcagcagagttcttaatggttccgcacccatcatcaaataatccctaaataaactttgccactgaatggatgttgacataatgatgcagtatgtcaattgggtaatgttatttacattcacatcattataaattatgttagtaatcagattcttacaagcttaaaatgccgaccctaaaacaaagaaagatcactacaggaaaatgtggccccttcatacactatgttcaggctagttaattaggtccatctcacagagaacctcaatccctattgactcaacttacaaaaccctgaatttgcctacaatctttatctctatgacaaattaagttgttgaagacattaaattatataaaagttttcaatgctaagttcttacgaggcttgcaacatttattcctgaatgattcctactgcattttagatttttagttcactaatcaactaatactccacagccaggaaaatccaactgctcttccatgaagttccaatatcaggtaaatctgtggatgatcgaacccacctataaaatcatctcaaaccttatcaactaataaagcagcaatcaattcgtcttccagattggaccatcctaaacactcccaatgccaacaacacaacctgctcatatcataagaggatggcacaaacagatactaaaatgctggataacatcttcgtatgagaacagtagccaccataccaaaccaaactgcacaaatcgcattccgcatcgcaagcaaacggaaccccccccccccaaactacaacaacaacaacgcgtgcctcccctcccagaactcctctcaatcaatcggcggccaaaccaaaaccatcgcaaaggagagcaacatacctcggagccgg

SEQ ID NO: 6785 - DNA, 597 bp, Oryza sativa
ccagttccacgccaagcaaacccatcagccggcccaggcccgccagaccatacctctttcgtggccgtttactgtatgggggctcgatatcctgggtccgttcaggcgggccccggacgggttcgagtatctgtatgtcgctgtcgacaagttcactaagtggcccgaggcttatccggtcatcaagatcgataagcactccgcgcttaaattcatcaggggcatcactgctcggtttggggtgcctaaccgtatcattacggataacggcacccagttcactagtgagctcttcggtgactactgcgaagacatgggcatcaagctctgcttcacctcccccgcccaccccagaagcaagggccaagtggagcgcgccaacgcggaaatcctcaagggccctgtccaattcaaagaaacataatagatacagatgctattagaaccaaaagatagcatcttcttaacaatagcaagcttgagaacccttggtggttactgttaaagtgtcagttgctactagtatttgacaatattaaaaggcgacatattaaaatttcagcataatgaagatttctgaacagacaccactagaag

SEQ ID NO: 6786 - DNA, 957 bp, Oryza sativa
cgcacgcacaaggaaagaaagaaatcgattgaaacaagacaagcacaagtaatgtaatgctgcaatgtggtaaagaaaatttgggggaaaattaaaggaagagaagagaagattacccctgacccacttgtagagggcgcatttgccggaggaggtggcgagatcctgcgggatcctgcaatgcaaaaccaaccacatgatatgatgagtagaagaacatcaatcatcgagaagaaaggcgtagcgtggataccataccagtgcttgacccagcgggcggcgggccgcgggggacggcgaggcttgtgctgctgcgacggcgggtagtagtagtagccccctgcccctgcccctgccggcgccgcgtactccatcgagatgacgagtgaatgccgccgatccgatccgccgccggcgaacccttctcctcctttctctctctaggcggcctagggtttttcttttcttttcttttctttttttgttcagcggtgggcgtgccggaaaagagagagagaggggaggtaaatgctcttgatttttgtttgggccgaaacaacaacattccttttcttctagccccttcttccttctctgtgatgataatggtgttgtatttctttttcttttcttttttacgattacaatgcatacatatatgcgcgcgcatactatactatatactatatatagataacaccacactcacattctcacgaatatgcttcctaatacattctctaagagcctgtttaggtcaatttgctgtggtatttttttttttgcaaaagattgatattgaagttttgctagttggtgtttagatgcatggtaaagtgttggcattttactagtaaagagagaaagagagagcacggctctaaacgtactttttggcaaaatttgctactatagacttctaaatgataaatgccaaattgctaacttttgctacag

SEQ ID NO: 6787 - DNA, 5022 bp, Oryza sativa
aaaaaaaaactttatagtactataattaccatatttgtatgtatcttggtttgacccatagcatagagggccccattgactctcctaccacaccttttcttttgggtgcctagggaagttgcctagttgcacatgtaattttatactccctccatctctaaatgtttgacgccgtgactttttttaaatatctttgaccattcatctcatccaaaaacttttatgaaatatgtaaaactatatgtatatataaaagtatatttaacaatctgacatttattacaaaattaattaatagacacttaaatttttgaataagacgaacggtcaaacatgtttaaaaaagtcaacggcgtcaaacatttagggatggagggagtagcttatagtttccatcatgaattatcattttattgtcaataatgttcgaataattccatttcaattttcttatatcattttcagttttcactttaacctttttgataggtttccaagaaaatcactattctactctgctcccctacatatatattcatatgcacgcaaacaagagttttaatcaaacagaattatgaaagtttctaattcggctaaattcattgacatggtcacatggcaactcaaaactccgtccctgaccatggcaactcaaaactccgtccctcgaaacatcgtaaacagatactcataaaggaagttgtttaggacaatgtttgactcaaaccttaggaatataaatcataaataatcctcaagttgttgagttttaaaatataaaaattatatgaatagatttgtcttgaaaaacactttcataaaaatatacatatatcacttttcaataaacatttttatagaaacaagaagttaaagttgtgttttggaaaccgtgtcgctgtcctaaatgacttcctttatgagtatggagggaggactacaacataatttagcacttcaaacacacaactgaaagaagaatcaaaagatcagaacagacttaaaactaagtctagcttgtttgtttgcttatttatttattcattcattattaatcacatctcggacggcctggtaccgattattacttcaaaaattcaaataataaatacaacaacccacaatagcttgaatacagacaatgagtataaacacagacaagaccaagcagtctataagaagaaattaacacttggaatagaatacaatggtgaaccgtgtcttgttctcccaaaaccctctaatccgctcgagattggcccgcacgagagaagaggatgataccaacaatcaggccatacagagcaagagcttctgcaaagataaggatgaggatcatgcccacgaacaactttggctgctgcgcattggccctgcagaggaggtaaaccagaaccaaatgtcaatttcctgcaaacaagagtgctttacttacaatagtaacagatagaaagaaactctatctgctattttgctcttgatcccagtttgatttgaatagatctcaatagtctgtactcaggactacaacatagatatgctgatgtaaaaaggggcaatgtgaatcctccttgactttataacagttaaatggtagcgatggtatatatgaatcaaagcagtatgggtgttgcaccgtaaatcatagaagataggagttgtaactcttgtaatcattatccacaaaattcaaggggcagtaaagtttctaaaagaagctaactttcacttgtaggcaaataggcaatcgaaaagggttatcaggatcctacgacacacaacccatgttccggagtgcccccaagacagatgcctagcacatatactcctgtggagaatatccagcctaatatttcaatagctacaaccgaactgataccataggaagaaccatgaatgacgaaccacccatacccagtctgaaatcacatctaaaagacattctacaattcggtgtgaatgtagcactagcatgccaagatatgtaatggcaacaatgctgtcgcttgcccaatccctgtaattacccttgtaatgtgacctcttatcaatggaaaattcaggtgggggaacctctcccctctggtgattatccaaaaaaaaaaaaaaaaacactagcatgcccattgtctgtcatgcatgctaggatgcccaattgaggaagttataagccaacgtacaggttgaggcacaacattgtagtgtaaatttgaagtttcagcagataaaaaaagagaggaattcttgttctgatcaaagactccaccagcatctagcaatcaacaaagaatgtagtcgcatgctattactctaatagttcagtcatcaggattcggattagtaaaatgtgggcaggctaacagcaattgaaagcttaataataataactactcccttgttgtaattagtagtagtagatgggactgaggaggggaatgagagggagggtacctgactccggcgtcgccgacgatgccgatggccatgccggcggcgagaccggcgaggccgcaggcgagaccggaggagaggtgggcgtaaccgtcgaagaggaagtagggcttggccttggggttgatgccggtggagatgatgacggcgatgatgaggccgtagataccgagcactccggccatgacgacggggacgatggacttcatcaccagttccgggcgcatcacccccatggacgccacgcccacgccgctcttggcggtgccgtaggcggcgcccatgccttgcatgcgtcgtgtgtcaacctcatctcagatcagatctggccccgagaaagtgaaggggaagattgggagcttacaggagaatacgagggcggaggcggcgccgaggaagccgaagaaaggggcggtctcatcgccgctgaaggtggaggaggacatggtggtcgctcgccgtcgtcggtgagggtgggatctctctcgccggccgccggaggccggaggagtcagagattggtattggtgccgtatctcgttgcctcgtcaacgtgtgtggacctcacttcatttatatttacttgctctcttcatattacaatcactttaattttttttataatcaaacatttttaagtttaattaagtttataaaaaaatataataatattttcaacacagaataaacgtattatatatttgtctaactctaaaactttttgggcctgttttgatctggcaacacagcccaaagagattccacgtcttgaaattcctatacattagcaaatgtgaagccaacaccattgacaaattccagcacatacaaaagcattgaatatgaaagtatatgctaccatctctattcctacaacaaaacaactaaccatcaccacgaaaaagttagcgactcaagccttaaagcgtgtcactggcttgatcatcgacaacccgacatacaaatcttactagtttttcaccgagaacctcaataaggtaactagaataaataaatagaagaaacaaaagactacacatctgatccatgaaaaatttgaaagacaaaccctagacaacctaatagacctaattctataggaacttaaataaagataaaaaaaacttgggaaagattggatcctactactggagacggagggtgaaggtgatcggatagaaactgtgcgatggaggtttagagcgccctgacggacacgagcgcctgtgagccggttactatatgctaatacctcattgatcttttggtaaaaacatagcatggagtatatttgtaagagaaaagtttgaatcttaggacattaatttcactataaacatttctattaaattcatgacaattatatgcatagaactttcctaaaaaaagtttcataatattataattttatcagaatttctacagagaaaaaatagttattaaaacaacctttgagacggattaaacttatatttcaaaaacattgtaaatatctgaaacaatttctcttaaccggaaacaagtaaatgaattaagagtcgtgaggtttcgtgggctcatgggccatcatcatgatagcacagccaattttcacaccaagcatctcaattcccaatttcgcaaagtacactgtgtcgaaattggttgaacagaagcacacagcaaacagcccgacatagctcttattactgttcattgacaagataagcccgatgagcccggcagatactagatcaactaggtgaagtgtacaaagaaaaaggttttacgatattgaaagtgtaatatataggccaattatatgcattaattacaatggggtcaattcagtgagagagccaacagacaagctttcatttcagttgacccaaattaactttctgcaaacaacctaaataagaattactatgagattttacattgttgtccatatgattcacagaatagtcccaacagtaaattcaggcaaattcgctggccatttttgaattcagggttaacgctgccatctttgaaattcaggctaaaaaataatgagaactcggggaaatcaggaaagaaaatgtagaaagtattctgcagcaacattaatgttttcgtccactgctcttcatcgtggagtgcccatgcaattaatttgttgctgcccaatttgcatccaaacgccaccgtacaactgtcaatttgatcgtggtgctacactataccactagtagtatcaatttgcatgaaaattatccatatcgtactatagtgcgcctgcctttggattggaggagacaacatatgcagccaataagcaatttgtgggaaaagaggcaccccactacccatgcattcaaccatagtatatatgcattcacttgccaaattgctagctaggactacgcgccctttgaatttgcatagcttacattaattatattatctaccaaataatgtaggatcatcaaaggctacctagctagtagagaacaacaagatgcacaagcataaatggacaattttggatagtttttttagaacagactattttggatagatggatatgcataagcatataattgataa

SEQ ID NO: 6788 - DNA, 671 bp, Oryza sativa
tgggtttgaaaagctaaagcaatgcggaatggaagctttcagatgagatttcgtaacaagataaagtttgatgagcttgcaaactttgattatttcaatgtcaagggcactgatgtgcaagttaatgtgaaagaatggacccagaaatctgaagcagttgggaagttgcatattgtctgggtcaaaaaaaaaaaaatttttcccccaaacccttgggggggaatttcttgaggaaatgaagggttaccaagctttgtatgaaattgggtcaaatttagggcctgtcttggaggttgatatggctactttcagagctagcaatgtgatcagggcaaaagttggaatgatggagctgggtgttctgcctttgaaactagtgttaacttctcccaagggacttttgttccaagctcatttcagtctaaagaaggtgggggggttgggggaagagaaaaaaaaactctttgggggggggtggttatagttgatcagctagatgacacttttgagaaaattgagatacaagaaaatactctggagggtagcagtcagagagagggtaagcaagttgtggtggtggatcccatgacagaagatcaccatgtcagtaagacgggtaacgggctattgaagtttgtcagaagcaagtcctggtgccagaattgatgctg

SEQ ID NO: 6789 - DNA, 664 bp, Oryza sativa
ggccccggcaccgctcgcccgtgggagtgccgagccaacttgtcgccgccatccgcgccatagagtgcgacgccaccctctccgaccaggaaaaggcacgccgccgccaggagcttctcggcggcgccgcgcccgccggtgccgacgccgatgatgacgagggggacgacgtcctcgaggtcattttccgcccgggggggggcccccaaaaaaggaaactttcagctgcgccttctgcatgaagctgcccgaacgccccgtcaccgtcagtactcttgcggggcctttcccccattcttcctcttactacttgctttgcttatatgtacgatgatttatcttaacgctagggtgatgatgggggctatcctatcccctctcttcacacatttatattcattacttacatagagttgtatcatccctgaaaaaatttttaaaaatttcccccccccgggtttccaaaatctatatttttgaggttgacgctgccatttattcttttctgttggttcaatttgcatttcctgttatcgtttaaggtttctaactagttgaaatgaccatgtaccatttctacatgatattgtttgcttttgctactcatttcttatatttcttatttacgctaccatttgaattccaataacggaacaagtcttct

SEQ ID NO: 6790 - DNA, 1291 bp, Oryza sativa
caatctcagcatagttatactgattggcacgatcatttacagcatgctcacttgcatgtgcagcaatcctaccattctcttcttgaccatgttcaggatgctgagtttttagatgaaggttcaatttgtaactgtgaatgtaggctttcccacaaccatcatatgggcagacatatggtcgctcagcaaagcttgtgggtgctggtgttgtaggcttagttgatgcaggtgttgtcgtcttcgttgctgctggtgttgtaggcttagttgttgctggtgtcgcaggcttactgctgctttgtggtttatctgatgatggcacatattgtgctgtgatcggagttccagtctgcatcatggccacattgagcgcattatgtaaatcagagggagtacataaaaattctacaaaccattgtaaattttgtgatgcaacacaataggtgatttgaaaaagattttctagttgcattttattataatatatcagtatggcattaacccgagactacattttgctgctgcaactgtattttattataatatatcagaacaacaatgagcatgcattctgaacaagtacactgggggagcaggcagtttcgtgttgtaatacttttctttgaaaaatagctatgagaatctttaccagtttcaatttaattatttctgatatggcttctataatgagatttcaagctagtcgttacatataaaaacaattgaaaaaacagcaaatggaagtcagtgcaccatagagcataccttttcatggcccttgacatgggattttaatttggagtcactcgtaaatcttttgccacatgctggaaatgggcatacatgatagttttccaacgcatgcgtttttagatgcgaacgcaggttaaaatccaatgagaaggcctgaaattcacaggatttctttgtaagaacatgaagatgcactgcaacatggtcaaaggattcactaattaaaaggcctgagaatttatgctacatttcttctcaaatcagccacttgtgggtgtgcatatgttgtctccaaattttgcaataatgtagacagcatgtcagtgtacaaacaaacaacagaccggaaggactagggtaaatttccataaagcagctcaagtgttcaactaatcagatcaggggaaagtattcaatcaggtagagttaacatgaaatcacatacaggtttgcacctttaacacaacatatgctaaggttagctttgattactatggaaaaaaaaagtaaaagaacaagtagtatgtggagaagtaaa

SEQ ID NO: 6791 - DNA, 977 bp, Oryza sativa
gcaaagctgattttaagttgtggggtctgtaatcattgggacggaacaacaagctaatcctggtgtcttttagtcctatcaggtgcaggtgcaaaataaagggcaagatataacaactaccaagggcagctcgatgtataaaaaagggtgaatagccaaagtggtccttcaagtttcatctgaggctcagtttagtccttgatgtttcaatctatccgtattagtccttcaagttttcattttagttcaaacttagccttgaaccaacaactctcttgataaatgacacttatacccctatcattcacatatataatagaaaaattgcatgcttgatttttcttttagataagcataataaattatgtaaaacgaaaataaattatgtactagaaagtatatatacgatagcaattgcttaagttccatgtgcacatgttgaaataatgggaagtacatctgcaatgttgtttattcatcttggttttctattttctagtatatagttgtatacaaattaagggcaaaagggacattttctaatagaaatattaactagaaatagccatatggcatattaagggcatattaagtgggcccaaggatgatttcaagccaaaacaaatatttagaggagctatgtggacaaaatgaaatgtgaaggaccaaattgagccttcggtaaaacttaagagactaaattagctattcaccctataaaaaaacaaacatatactactaacacagatgtggcttagtatgaaactcacggcgcattctctgcaggcttgagattgtattcagcaccatcagcagccaatatagaaaattcagtaggacgcccatatgggatattgatctggaaaattagaaaaaagattatgtgcagataatggaaacagaaaattctgttcaacagaatgtggctatattggaacattagagaacccagaaagtttaaacgaataatgcttgct

SEQ ID NO: 6792 - DNA, 3078 bp, Oryza sativa
taacaaaacatacccattacaaagagaaattgtcaagtcaatcttgccttcaggttcgacaagtgagtggtgaattcaatttcaccagtaaatgttggtgctcctggattcccaacccacagaaatctgtgctttaataggctactacagaatactaatgtactccactttatttactgcagcattgacatgcataagtcatcgctccctccaagaggagaaatccagagttcagacagagcctccaagaagcttgaaaatgtttaacttccagcaatatctaaatgttccagtgccagcttgatcgtagggaacgcatgcaccatcgcgcaaagccccaaactcacacgaagaaccaaagcttgacaacaaaaacagcagcagcaaagacaaaaagacacaaaatcagcgataaaaagggacgagacggaaagatttacctaccaggatcaccacaccattccattccatgccctgccatgccaagagttttaattgcggataggggaacctgagctgctgctactacggctgtagctagaggcacttcttcctcttaaaggcctaccaccattgaaaagaaaccatatgatgcttcaatgttctatttttacgatgccacacatttaagctgcttgagaagggaaaggcacataaggattactaccttctaggactgcgacttctgagcacccttcttggtccctgcacaagagaaaaatgtttgtcttggtacaagaagaataaatacacagacaaaaaaacatttctttctcttcttccaaaaaagataatgacatttatagttatgagtttacccttcttggaggagtaggtgaatcagaatacgatgaggatgaccgtccacggcgcacaggaggaccccgacccctggttccattatttgatgtaagctttcatctggtagaagatgcaaggccactaatctaaaacggggtaaaagggcgatcaatcctaacattacctgcgtggagaaatcgatctggaaggggagcgaattggtcggtgaatgggagatctactgcgatggcgaagtgactgtggtcttctgggaggactccacatcctccttggaggagtcctgcagaaataattaatggtcaatggaataacaaaatcccaaaattagtttactaggcaagaaaaggggggggggggaagcctccaggggagaacaaacacctctttcagagttattagaagctagagaaagcaaaatcttggcccagaagcatagaataaactaatcagattttcagctcaacactctgattatccactctaaaatgttcaaaaaaagctaagtagagcaaccatccaagaaacccagcatggtttagcttcttcgtaacagaacagtagaagctagaccactacagactgaaatgaataaagagcaaatagctgtgcaacttaaaaaagatatacacaaaactcatatgccccccaccttctcctaaattcataattcagataacatatgaaatactaaagaaaaaaacatcaactagacaagcttaaaatacttacagccttctacgaggcaatggggagcgcctgcggattggactgccccgatctcttcttggtgataggctgttgttattatgaaatatttcagcacttccaaacaaaatgctgataacaaagagagcgcacagacgcattactcactgccttggtgatcttagtcttcgagggggcggagagggtgagcgccttctgattggggatcctggtctcctgctaggagttccaccatgcctgattggagaaggagctgttcgacggcgaattggaggagaatcaggcctacacctaggtgattcaactcttcgacttggaggagatcgccttcttggagatggagctggctttctttgaggagatgctgctgaaaggaaacaagtgaggtttcaaagttcaaacactatgttttaccacccagtaaaaatacaaagactggttatggttcaaaatcaaagtggcaaacaaaattgaaggcaaggtgactagcaaaaataacaaaaaattgatgctggtccagagaaagagtagcttgaagaaggttacataagaaggagcaaaatcttacgtttcctgggctgctgtttggtggccttttcagcactaggaccaactttattatgatcaaccacatccctttttggtgaagggtgaagagcttttggagaagcagcagctctttgctgctgtggtggaagcgcgaatctgactttaacaacatttccatcaatttggccctgtgaagatttgtaagtattttaagttttaatgctatgttcatactaaaattccaaatgaatgttgcaggaaagaattcatgtactcttccattatctaaaaaaaaagaggaaagaattcatacaccatccaagtaaagaagagccttctcagcatcagctctattcttgaactcaacatatccatacccacggggaagattgacctgaatcaaagtaaatgatgagtatataaagatgagacaagagtgatgaaagttttcccccctgccttgtgcattactgaacccatttacttaccaccctatccatggagagctccacattgacgacttcaccataattttctgcaaaacagcagaagtatgagctaaagaagcagcaatgttgttgagtgcaattcagctctattacatcaggaaccgttcctattatgtgaaaagtgaaaattagaagactaatagccccaggatcccagggctctcagccatggtcttggaacatcagttggttatgattttatctactttaaaatgttgagtaaaatgaactccagcgtagacgcgagcgttgatcttgccaaggaaaaatgtgtaaagattcaggtttttgagccaaaaactgagaagatgataacctgcatacaacagcaacaacatactcggtgtacaaagcctgagaaataacagtggagggagaaggatttaggaaggaaggaaggaaaactgaccaaaaatctccttgagatgatcctcattgacgttcctggagagatggtcaacatggaggacgg

SEQ ID NO: 6793 - DNA, 959 bp, Oryza sativa
ttccttccgccgccgccgaagcagaagaggaagaagagagaagaaagaagcattggcgatggctgcggcggagggccccgttctcctcttcccctctacctcgtcgacgtccgcccgggtggaggcggtcgtcgtgttcaacatctgcgacagctacgtgcgccgccccgaccaggcggagcgcgtcatcggcaccctcctcggctccgtcctccccgacggcaccgtccatgtccgcaactcctacgtcgtcccccacaacgagtcccccgaccaggtaaactataaatatctctcttctccttccgcccggcatcatcagatctagggttttacttcttcttccattgattccctgaacttgcctttctaatgttaaggttgctctcgacatcgagtaccaccacaacatgtatgcgtcgcaccacaaggtcaaccccaaggaagtcattgttggatggtaaaccctcttcttttcttctcttctcctattctcccctcattggtgatgatgtaccactatgatattgcttctgtccctgctagtagttagtacaacattaagagttaactagtttgagtggattaacttgtccaatcatgctcaatacacacacacacagcacagcacatctaaatctcactggttctgttaggtttgatatcagctagaacaatcgcaatgatttccctgttactcatgattctctgtcctgtttttacctagtgctgtgcgacaattaacagtacccagcaatgcaaacttagagttgctgttataactgtaatttgttttctttcagagtaggaaagaaacatttcaaaaaatgaatgagcagtaatacagtacatctgtatgcaggttctcgactggcttcggtgtttctggggaagtacgcttatccatgatttttagtcaagagaagtacagagccccattcatctcactgttgacactg

SEQ ID NO: 6794 - DNA, 544 bp, Oryza sativa
cagccaatgcaacagcagcatcatacatatctgcaccttctccatcaagctttgcagcatacatccagttaccacttgctttgacatcagaaagtgatgaaactttagcccaaaccagattagtcaaggcttccccaatagcaagtcttgccatggccttgggattaagtaaacctttcgttggctgttctccaatggcacaggcaccacctgttagatcagtgtatgtctgtgcgatcacagccacatctgcaagaggaagttggagaggtccaactgtctgctgttgtgcaacaagacctgtcacacacctgtcaacttttgtggttaagaaacgcttagagcatacagatggaagactcaatactcgcttcagagcatccatgattgttactccacgggcaatatctaagggctcactgactacagagactcgcttgaattcaaaggtcttttggggcatatctcctagaaccttttcaagctcgagatcctcaacaggggttggaggaggaaggccatttaacttcgcatgctccacagc

SEQ ID NO: 6795 - DNA, 542 bp, Oryza sativa
aacacgtgtgcccttctgtactactgaaagctgggttttcctttcccatgtgcactatgcgctttcatgttttcctccactagatgttaactacgatatactacctccttcctttaatatatgacgttggttagttcaattaacatcatacataaaagaacagcgcaagtatcgattattcttaccctatgtgggagaactggataccacgcttcaaatttattctttcagttttgctaaacttctcccatacattgcaggaagtggacctccagtccaaaatcacaaacaaggtgtactttgacataagcatcggaaaccctgttgggaagaacgttgggagggtcgttattggcctatacggggatgatgttccccagaccgcagagaacttccgtgctctttgcactggtacaaagggcttcttgcttttcttctcttctgtcatctactactttacaggattacccagatttggtgcatgatacacataccattgcccttttccttttcaggagaaaaagggtttggttacaaggggt

SEQ ID NO: 6796 - DNA, 576 bp, Oryza sativa
gccttaggaatcaccattttgttactacattttaactgttttgttactacatttcctgtactattttactgtctgatttattacatgtgaacttgttcaagagagctttttccctaggaatctccatgttactgctgactggttactgcaagtatttttttactgctcattggtgtatgtatcgcgtatgaaataactgtcggctgtctaagatattgcatatgagttactacaaataattagcggtttcaataacaaaggggagcggttacaataacaaaggggaggaagaaagacaaagaacaaccggtgtcgaaacaagctgagagcaagcagccgaaagaccatagcaaaaggtgcagcgtctgtcacaaaattcaaggacacaatgctagaacatgtcctagtagaagcaaaagacaaaaaaacaatcaaccgccaagcaatagatgattatgacgaagaaaaagaggaagaagaataagtgtacaagtgatagatacattgcttctgacttgtaggacatttgtaatatgttactgccatagtatataactgtgactgtctttaagcata

SEQ ID NO: 6797 - DNA, 511 bp, Oryza sativa
cctctttcataatgtgttgcggctataaaaaaaagtatagcaatttattgttcggtagaaaacaagcaatgcaactgaaaacagtggaaaggggtacccacctaaagaggagcacaatgatcgcaaggatcatcatggaggatgaattgccaacagcaagaaacactggaagagttgttgcacagggtgataatgcaggtacaagtacaagacctgcaactgccatcttctccattggatgattatgagcatggccatggccaccttttcccagtgcaaacagcaggatataacttccaccaagaacaatcagcaacagtgatgcaagtttatgcactgtttcctcgcctgctatagtatttgccatagtaacagcagttatcccaagaagagcagtggaaacaacatgaaggacgcctccaaatgcagctgcggaagttaggatattttattagtagtgatatatagaataagaacatggaaaagtaatatgagtattcatcactaattt

SEQ ID NO: 6798 - DNA, 1014 bp, Oryza sativa
aggagggaaaagacacacgcacgccgacgccgtcgcccaccaccccctgccgccgcgccgcgcggccatggggctccacgcgatcctcctcctcctcctcctccggatctccgcctccgcagccgcctccaggccgccgctcgacaccctcggcatcccgccgcaaggttccatcttgttctttttctccccccccggatctgcctgtatctctctttcttggtgcttgatgcggttcttgatttggtgcctgtgggggcgggggtggctggctgcactgcactgcagacgaggcgtacttcaggggcggcgtgatcaggtgcagggacggatcggggaggttcgccagggacaagctcaacgacgacttctgcgactgccccgacggcaccgacgagccaggttgcttccttgctctcgcctgaaaaagattatccctttttttttgccttagctttttgcgcaggtgttctggttttaggttctcgtgtttgtgctagtagctcgaatctacttactgtaggcaatctaagagagctgtttaatcgaattgtgtttactttttgccttggcgcagggacatcggcgtgcccggaggggaagttctactgccagaatgctgggcattctcccatcacgatcttctcgtcgcgagtgaatgatggtatctgtggtaagaggattataatcggtggccattctctgtatcattcaaatgtaaacacagtaaatgtacacaaaatcaattgtaaggctagagattagggtgcttttgttccgtaaacatagtgcttgagggaattcccgctatatttttttctaattacccatatgtgtttgtcgctgcctcttagattgctgcgacgggagtgatgagtatgatagcaatgtcacttgcaagaatacgtgctgggaggctggtaaagcggcaagggataaattgaagaaaaaagtagctacatataaaagcggagttgttattcgaaatcaggaaattcaaaaggcaaaagtggc

SEQ ID NO: 6799 - DNA, 583 bp, Oryza sativa
atcattccgacgggacagggcgaggcgtgcgaaaggccgcctgttgccacctaacccgcgatctgaccggtctatgaccggtcacacactgagacctgtcacggaccgaacgagtgtgctgcgctggattaaatgcggcgtggggcgctagtccaacccacaataaacgcggttaggtgagcgccgctgtgctcacctaacccacacacgtggcgccaaacccacagggggtcggggcaccccaacccttgggggcgaaacgggagcggactgacccctcggggagacaaagggaggggcggacacatcaccctcgggcccgaccccccagagggggtcaagccacgtgggagactgcagctgccccaaagctctagtcaagatacccccggacccatgttaacgacagccgggatgtgtctagactccagaagtacggactctatgatatggaaggcggcacctaatggtgacttattggagcggaatgactacactattctttcggccggtagaacatcctgcccgctcggcaagattatatggaaatcccacgcaccaacaagatgcaagttcttcatgt

SEQ ID NO: 6800 - DNA, 594 bp, Oryza sativa
gatgatgtgccactatgatattgcttctgtccctgctagtagttagtacaacattaagagttaactagtttgagtggattaacttgtccaatcatgctcaatacacacacacacagcacagcacatctaaatctcactggttctgttaggtttgatatcagctagaacaatcgcaatgatttccctgttactcatgattctctgtcctgtttttacctagtgctgtgcgacaattaacagtacccacaatgcaaacttagagttgctgttataactgtaatttgttttctttcagagtaggaaagaaacatttcaaaaaatgaatgagcagtaatacagtacatctgtatgcaggttctcgactggcttcggtgtttctgggggaagtacgcttatccatgatttttactcaagagaagtacagagccccattcatctcactgttgacactgggttcacaaggggcgatgcttcaatcaaagcctatatctcatccaacctgtctcttggagataggcaccttgctgcgcagttccaagagattccccttgatctgaggatgcttgaagcaggaaaagttggatgtatgtctca

SEQ ID NO: 6801 - DNA, 1165 bp, Oryza sativa
aaatattggttttatactctgtaaaagacgaaaaatttgcgaaaaagaacatatctccaaattacatggaaatatccacgagtttcaaaaaattcaaattcctataacaacaataagaaatcagcgtcctacaaggtaagttcaataatacatatcactctttgttctctctataatagccggctgaagtctaccatctgcatgtcatataataaaattttaaacaaatataaatcacaaagtgtttgctaaaatgttatcatcacattttatgactgattatagtcaagatctaatggctagttataagttttccattaaatttgcactagcattttctatttacatctatttacgtcaacttaacttacattgtaaatacattaaaattacatatataacttagggacttacgatgtatgtacgtgttaactatattttatgaaaaatacgacggaataaatataggtagtcccaatcacaaaatcaactcattaaactatttgccttccaaaattttcaacacgaagaacatgattatatagccattatgtcaatgtctctaccaacgcacggaaataataggttcttgcaggaggtccactatgcgaaaaaaaaaaagcgaccattcttcccgtccccctactgctcagccgtttgctgttccgttttgtgattggatttcagagatttccgacgggaaaaaaactgaacctgattgactacctgatgctgcgtgagttggtggacggctctaatgacggctggctctaccaaatcggcatatccagtttgggttgcaagaatcttcagtttttcctcgtctggaataatgcgggtcttttttaggggaattctcagtggcatggtcaaaagggaggaaacattttcatcatacaccgtgggtttttttttaaaaaaagaaaacacataacactttattaaatgacagcatttagggaattgaaatcccgaatacttcgcccatgataaacataagagttgaaccataataagagagaggttaactgaaaaaagggaagcaaacttcctaatgaaactaagcagcaatgaagcagcaaatcgacagggtactgcggcaatgccgcgacgactgcatccgagggactctattgatgtgcacttcgcttgacaaacccgtaaa

SEQ ID NO: 6802 - DNA, 1184 bp, Oryza sativa
agcataagcgaaacaacatatttgcaaatgaaaacaaaatcttaaaatcaactttgaatttaagtttaaaattttaaattttggctgataagaataagcgaaaagataggccagtcaaaaccaggggtacttaggggttgtttggatgctatactaagtttgccaccattcaccatattttttatgccacacttgcctaaattgtggcttacaaaaagtgagccacaacttagctagcaaaattggattgtgccacgctttggtgagttgatgacatgtgggacccaaacagatgagaaggaatcttgccacaagtgtggctatgaactaaacaatagactaacttggtcaaacttgactaacatgaggtgtggcaagttggcaatctttggtaaactttgggagcaaaccaaacatcctttttacacagtgacctttgttctaactgcaccgatggggctgatgatgcatattggaggcccagccaactactgggctcatcatggatttggggaaagcccacctaaatggcatatgccctacgtgggtttacgggtggagaaagttcaaatttggttcctcattataggtgagtttaaatcatatctctcaaccgcaaaactggatacaattagcatgttcggtaagactttgctgtagcgttttaagttgtgttgtacaacgtagccgttcggctacacaaacacatagttacaggaagttgttgcttgctgctggatagttataactcctgtagctactggctggttggctgcagcgtagccacaatgctgctgtagctaagccgtccgaacaaagccaatataggagtatcttttatctttcaaaaccagtacaaatatagttccaagatgctttagacggtgatttttagctgacgtgacatccacgtgatgtttgatttggttttcatttgacatgacgtctacgtgacgcctacttgacataataagtaggaaaaaaaagtaggacctgcatgtcagttacagtaaatataatcatttttttcattcctctctatcctctctccctcatccttttagtccatatgccgtctatatctttttgtcatggcagcaggaaagattgccaactatggagctcgcttgtccccccccccctcgtgcatccgccttggacactactcgtggcgctcctgctct

SEQ ID NO: 6803 - DNA, 1224 bp, Oryza sativa
ttttgagcaaggtgacgggaagagcacaatgccatgtattgggtcaaaatctgtcaaataacgcaccctgatgttggagactcatgtcattccacacactacttttttgcagcagttctgtgtattctactgctggaagtattttagtatttgaaatgtaacagcattttagagtttgagatgttagctcatgttgacaactctgtactgcagtgtactgctgactggagcagcttttcttgatggaagtattttagaaatctggaagatgaataattctggggtaagtatacaccttgttagcttatcattttatttggagcaccctgcataacgtttcttcaatacttctttttttccttgcatctatgtgaattatttcgcagctcattcaattgaccctctacacttttgaacttagtgatgtattgatcaaacacccactggctattgaattgagtggctactttgcacattgttgtccataaggatgtgataggctgatagcagatttttaggcatgcaattagtttgttcatttcatcggtaattatgaaatttgagctgaataaaagcaagtaaggagggagttaattggaaactttcactagtgtactctgaaaggtctagaaaaaaatggagataaatgtgtttaccaagtaaaagcggcatcacttcgatgacttgttcatatataaaatttcaaacagcagaaacagctttgctttttcccctattggttgtttactattgaaccttgcaacttgcaaggagccaaggactgaatgattaggacacttaattaaaatctatggcatttagatttgatttctaaaacctttcattgtaattgtgtaccatcgaacactatggaagagtttagggtgtcagcatgtgattttcatttgttttatagaaagagcaaaagttttctttcaggaaattaaaccatccatgtatttaacttaacaatgctggagagaagatagtatatgtttctttattgtcattgtttttgttttgtatgttgaaaagtatctaatctgcatatataatgtttgatttcacatggattacaaactgtattgtttttctcatatagcgcctactatgagagtcagagagtgtgtgtactttcttgtattgtgtgttagtagaaagtaaagggtgacccttgtatagtagattcaggttattctcacatcctatgctctagtatatatg

SEQ ID NO: 6804 - DNA, 712 bp, Oryza sativa
cgcctcctccttccccttctccctcgccgagaaatttcgtgatccaccggccggcgagatcctctccaagctgccgcggtcgtcgccgccggtggcgatgggcggcgaccactaccagacgctggggctgcggcaggacgccaccaaggccgaggtgaaggccgccttccgccgccgcgcgctccgcgaccacccggaccgccacgcccactcccccgacgcggccgcgcgcgccgacgccgcgcgccgcttccgcctcgcctccgacgcctacagggtcctctccgacgaccgactccgcgccgagtacgacctccgcatccgctcgtcctccttctacagccgcgcctcctcctccgcctccgcctccgcctcggcctcggcctcctcctcgtcggcctcgtatgactacggctacggctacggccacagacgcggaggtggtacctggcgccggccgcctccgggcggagggggcgccgcctcggccggattcgattgggacttgctgctgaagtcggtcacgcggcgagggttcctcatcaatctgggtttcgccaggtgaagctgctcatatgcgctgatgcttttcttgctttggctgatttgatatgccgccattgcgtgattgttgtgctgatccgttacattgctggcttttctcgagggaatcattgtggaaaaagcaattgccaagttcataaataatagg

SEQ ID NO: 6805 - DNA, 636 bp, Oryza sativa
atcagagaaaccaaaaaaaaggaaaaaaaagaacagcatgttactaccgatctagcaaaaatataatctgagagccaagtacaagtactactagtgttactgccaacacttgatcatatgttactgccaaaataaatgtttgttactgtctaagagccactgagtacatgtattttccatacaaagtgggaaggcaaaaagaaaactacaatactacttggtgtcaatctacggcctaaatttctcaagaatcgcaggcaataacggtttgttgttgttcaaccgatggtagaggaattcctgccgaaagtgtgttccatcctcctccataaaaaaacaacagaagatttggttcagttacttgggtttgagtacgattaagggaaatctccagattttcatcaccgtctctaaccacaacctttgttattgtcaaaatcttgccactcttcttatctgcatggaaaaggtagaaaaaaagatgtgttactacagagcaagaaggttgtcactgcaaattaagatatttgttactagaaatgtccatggaaattaaaatcagagtcatgcacaatataggctgcatattaagagaaaaggctccgctcccactgctgtcgcgcctagtggaaaggg

SEQ ID NO: 6806 - DNA, 1095 bp, Oryza sativa
atgtgtttatagctagcttatagcctactatttaagctgctcttagcaccaggtgaaaatacagatcaaaacaaaaataaacttcactaacaatggaccagccaaatgaagaaagacgagaagaacagaggaccacagccaacagtgggaggaaatggacaaacaacacgctaagcgagcaccaattcgtaccagttcaggagctaattcaacgttaatgttccatccaatccacagaatccgcacgcggaatgacgcaatccaactaactatccaatctactacaagccaaaaacgcggacaaatcgaatacccagatcttcagaaactcgtatgcatcgctcatccatcgtcagcgtttcttgccgcttctaacgcgtcggtggcgggcaaatcaatccatccacagtacgaaaagtactactaccaacatccacaaacagccaaacgtacctgattttgagccaacaaaacatgactgatattgtcttttgaccagcagaatagtcagggggtgagaacccaagaatcagggacgagcaacggcctactgtgaaaacgaccgcacaaaagtcttgaagaaaataaaaggtggccaaaattaacaccccaagaacgaaatcacgcgcctgaaaagttggcaagaacagatagatagatagatcgatcgatcgttcgtctaaaatgcaccggaatcatcggatcgaacatggaccaaatctctttctaccctaatctccctctacatatttcaaaggatgttcccaagcgcatagatgaaacttctctctcttttttgaaaaccttaaattgcggatcaagaacaatagatcaagaagaggaaaaattaaaccgagagatcgaggagggaggcagggaggggattggagacacgaatgggaccttggtgtcgagcatgacggcgcagaggatgccggtgctctccatggcggcgcggaggttgtcgagcgtctcctggtggtactcgtgggatccgtgggagaagttgaagcgcgcgacgcacatcccggcgcggagcagccgcccgatcatctccaccgacctcgacgccggccccagcgtgcacacgatctt

SEQ ID NO: 6807 - DNA, 1442 bp, Oryza sativa
  unsure (1)..(1442): unsure at all n locations
atgtatgccgcgttatccagaattttttctaaaaaaagaagatagaataaatcaatatgtaatatatttattgtacaaacatgttatcagggctatggataccacatacctaatagtagttggctaaatctcgacagaactcaccacataccatgttttatacggaaacaaccttcgggtatagaaggagttccggataaggaaagataaatagagttctacatagaaacgacaaggattactcggattgtatccatattggtttccctagttctacttggaaaagggaacacgtatgggtataaatacaagaccccctaggaggagaggggggacgaaacaatagatcaagacacaagatcaacatataagctaacatgcaccaagacaagacgccggatatcgacttcagagataagcatggctagtcccctacgatgtctacggatactgtcaggagagacatagcgctgtctttgatctcgctggatgcggattcgaggaggaaggctaccctggcgtcgactacgagtcagcacttcataccgccaagtcgacaacagttagataggctaccccaaatattgtactggtgtgattatggtgaataaaagcaacgaccggcttcggccaacaggagtagggttattacctgacaattcaggggcccgaacctgtataaaaatcctcgttcccatctcatttacctcaatcttgcatatatcctaataccaacgatccccatactatgcaaataccgtagtcgtgacatcaaacgtcgacacatgtaaattcaacttggacaaaaaaaaagntgatatttctcatttatattgatctaccatgttatgtttaaaataaaaaattatttatgacaattggatttacctaaaaatgagagcgaaatctcctaatgaataaagagttttccgctattgtctatctagtacgaatatgggacatatcgagaatcatagttctatcatatacttcatccattctaaaaaaaaccaattccgtatttagggatataggatgtgacaacgaatctgaatattcgttatactatatatgttatatcatagtatgaggttggttttttatttttggcggagggagtattagctaggatatttttagttagagagagtactatagctggtagtagactactagctaggttaggcttaggtgtagaatcattggtctttttggcgcgaaaaggtggggtcgtgggcgtgcactccactaacacacacaagggtcgatcacgcgcactagaaatgggcgggattacggccacgtatatacgaccatgcacatacatgcgtcgttgcgtttcactggcatccactacgatccaactgtttaattgcgccgtgattatctatcaatctatctaatcttggctggaatttcatcgatcgaaaagccaacgagct

SEQ ID NO: 6808 - DNA, 584 bp, Oryza sativa
aaaaaataaacaaaggaggatagcggcggatctcatcagagcggacctgaagccccaatttttttttgggaagaaactagtgtcgttagtggtagaacataagagtggagaaggttattagggcaaaataagttgcagatctggaagagaagatagggttaggggggcgcaaaagagaggagatgtagggacggggtggggcggggtggggtgagtgctcaccggtgggcgaggatgcggaggcacaaggacggcgacggcgagcggaggatggacggagatagatcggcgaaggaagtttcaggcgagggggatggacggggtagctagggcctaggggatggatggtcttggcgcgggcatacctgctgctggctgctgcttcttcgtcttcctcttcctcttccaccgccgccggcacaccaccactgcgaccgcgatgcggatgcgaaccggaaacaaaaacaaaaaaatagaaaataatttctccgtcgctgtttgtttgttgggttgggacttgggaggagaggagagacccccgccccggcatttattaggggtgggccccctgtctgtatgacgcg

SEQ ID NO: 6809 - DNA, 678 bp, Oryza sativa
ggagacaagcctgccaagggtatttggaggaattgcaccaatcaggcaagcagctggtaccctaagggcatatatgcgtgatcggtccggcgagcaagttacaccatgccatgagcacaaagaaatgtttacatcccaattgagtttgttcccacggtagactgcagaagcaaaagcaaggagcgcttgcttctcagaagcgatgtctgccacggccaatgaggtgaaaagaagtaacgacagtagacccaaagaaccttcaaaaattttatagcccataagaggtgtctctgaatcaactggactaaatgaacaatatcagcatctgtttatatcagtaactaccagtcctgctgcaatgaaaatggaaaacgtcagtgctaaaatcatgaaaagtaacagtagaactgtaaacataactctaattgtgtcttttaactcataaaccctcaagagaatatagcatacgagcaatcacgacagatgtgtgtgtgctgagtccaaaagaaagcacattccatgatcttcaaatgcagctatgcacttatgcagacaagcatgcctgtgtagtggaagcataaagctggcagtttgccccactagaggctcatgccaagaaaaagaccaaagcactttcaaaagaaaaaatgacccatcaaagcctaatgatttaagaaa

SEQ ID NO: 6810 - DNA, 682 bp, Oryza sativa
aatatattctttcttttgatgaagctgcttccaaagcatgttctagagataacgtctgcagagtaagcccttatgtcatcatcaatctttatgtctatggtcccgccatttttgtctattccttcttcccatgacttaagcagtgtttgcgcagaatctaccatcagatccaccatgccctaagtatgtgaaaaaaacaaagaatcaggcaggcaagtaacactcattgttgtcttctgtcaagctgtatgcttgttcttaaatctttgaattctaatttactgatgccaataggagaagaataaaaaacccttatgtaagtgtgataaatagctcatcagaatgatccaatgttactgaaagtggtcctaactagagtggggtatagcacgttatcttggtggatcagaatattgtagttttgctgtcgtgagtggtcctaatcagaaattttaatgctcgtaacacattatctagctggatcagactgtagtagtcactctgctccaggctctcttacgttgaactgtaattctaaattgcgtttgctaagcgggaacatgtagatccacatatttatttctccctgaaactatgaggatagctttgaatgcctacttgctggggcataaggttttcctccgatgccttcaaatctttgttagcaacccaagtctatttg

SEQ ID NO: 6811 - DNA, 3857 bp, Oryza sativa
ccaacagggacttgggcacgaaggtgaccacgttgtacttggtcgtcgacaccgagttggagcggtacccgtactccgggatgccgccgccgccgttggcgttgacgacgcgcgtgaaccccggcccgccgatcctgctggagctttcgtcgtcgactgccgtcggcctccgcccgcacgcgaaactgtacagcctgctcagcctcatcttgctcctccgccggcccctccgacgaccatcgccgccgccagttgccatcatatatatggatggattttgccaactactcctacttactagtagcgacgagctagatgatgttgagcttcttttcttgccggccggctattccttccttaatactccagtacgagctaggtagcaacccaagaagaagaagaagaagaagccgctgccgcagaggacgaagaaatcgagggaaaaccaggctcaagggcagcctatcctaccctcaggcctcagcagctgcttccaatatgtactactcctactacttctactactactactacaagggagggatggtttgttcctatacatatggccgggcagtgggcttcttctcaatttcttaggaagctccgcccctcccctcttttcaggtttcacgcgggtctctcggtcagcaacggagaccgcaacttcttccccttctcttcttgacaattcacaagaagaagaagatgatgaagatgaggagggagtgggagaggcggtccgtcttttggtcgtacaagtgcagctgcctcttccttcttcccttggtttggatttggagatggagggacggttgacttgcgggttttttcttttacttgtcaattgctcgcctaactagaaaagattcctacttctcatttttaaactaccccaatattttactaggttttaaggaacctgcaattgaggggaactaccaactactccatttttctttaatactcccttcgtagtttattttttttccataatcaaactttattaagtttgactaaatttataaaaagatttagcaacatctaaaaggtcaagttagttttattaaatctaaaattacatatattttgatatatgtttgttttgtgttgaaaatactgctcccttcgtcctataataaagtactaggatgggacatatactaatactacgaatttaaacaatagtcctaggatacgtcctattcggttgtaggttgttgtattctaggacgaagggagtattatattttatataaacttagtcaaacgacttgtaatatggaacatatgaagtatatgaagtatgtaggagtacttacaattcttagaaggaaatgctttagaaaattctagactagtgttcttttctttcattttgctttgggatttacgcacgatcaatgatggtactaaaatggtaaggccatttgaaacgaggatgggggaaaacacagtaatatgaaaagccagtaatagattgttatattcatttgattcatagaggattttgaaacatagtagttctaaaactgtcatttgattaacacaggaaaagcacatgaattttagatacatgataagtgtttattttccttcaaaattgctttagaatagtctatttcacaagaatttaaaaaggaatgggtagaaatcaatcctttgtttcaaaagtctccctagaattatttctcataggataaaatcctctgcaattcctatcatttttcttttatttcaaagaaggtctaaatggtgttcacgaacagtacttgcctcgtgacggtcacaacctgtacaaatggttagatttatcacatcgccgatacaggtgttcgtctcatcgtagatagaaaggagagtaacgatagtacattacgaacccagccatatgaatacatacttagaagtatcttaactgtattatttttctttgtccaggaattcaaagcagaattatcattttctaatgtttatattatattagggtataaatttgaatcacaaaaatatttatattttaagtgtatacaataaattgaaagaagttctacacaaatcgagaagttgactagtggttctctcagaattaccttttctcctctttcaggtacttacctcagaattagagctgcctgatacactcacatggccatgtcggacctagcttaactagtagcctcatttctttcaattctagcataaattttctgatttgctactgtgccttactctcacatgatcttggtaaaaaaatcatgtttactctcccagtctataaatcttcatattaagtaaagaagaaaaagtttcaaaccgtggattgaataaacagagtccaagtatagttacaattaaatatatgaatatttagaataaaatagaatacaattatgcatgtgaataattaaaatttagaataaaatataatgaagccaagcatttttacaacacaaattccaaagtaaaattttcacaaaaatacgaaaattagcaattggattgccatgcaaatttcataaaaattccaaatgatagaatctgggatataatattaggaatattaaaaatagttgatgttaaacatgaataatgggaattgataataaaaagtagaatatatatatgtgtgtgtatattactttgaaacctttaaattaaaattactctactctaaggaaaacattaagcatccgtagtatcgtgctatctattagaattaatgaaaataatgatggagaagagtatttgaaatcctgaaaatattacaaatctatgaagcttggtaataatgaagtgcttatagcgagggattttttttcttgtttgaaaagggttgtagactatcaagaatgtgcaatacaatatgccatcttttgtaagtggaagaatgccattaaagagaacaattagtttgaaggtggtgtatacaataaagttttatcttcaatctatcttattgctaagagaatactaaaaagagccatcacgtttacttaatggacataggaattgccatattaaatcggaatatttaaacgtaaaagttaaagtttgctccatggtctacaacttggaatggaaactatggagttgcaggttaaagtcttggacgaaggagatgtttagctgagaattggaatattcattcattcggaagaagcttgaatttttgaaatcttaagctgttcactagttagttaaataatgaacgtgctaaagcagtccaaattttgacttgagcaccgttataacttttttttttggaaaaagaagttctctctccggtcatgaatatctaaaatttaggataaaacttttgaaattttgacaatattttctcaaatgcttaaactaaaaaaatggtaggcacacatttgcaacaccataaactcgttagatattataagttattttaatataaaatttataaatagcgttatcctatatgtcaaatattgatgactcaaaggagtattgagcagatttattcgtgccgtttttacaatatactcccccgtctctaaatatttgatcgttcgtcttattcaaatagtaattattaattcttttttttatcatttaattcattgttaaatatatttttatgtatacatatagttttatatatttcacaaaagtttatgaataagacgaatgatcaaacatattttaaaaagtcaacggcgttaaatattactacaatatgttatcaagatcaagtatgcggttgaagaaaagaatcacattacaaaactgcagtagtactgtatatcatctttcaaggctctacttaaccccctcgaatattcgcgctctcgaatattagcatttttgaaacccaaagcactcaagaatac

SEQ ID NO: 6812 - DNA, 4799 bp, Oryza sativa
caccaccaccactaccgccacccagaaattcaccatcgcctcctaaaccgccaagccaagcagcgcaatcgcctctgcccccgacaacaaccacgactacgcctccgactgctccagtaccagcagcagcgcctcctcctactgctccctccccttattctgctccgtctcccactcccactcccacccacacccagccccgcccatctccgccgctgctgcctacacctgccactgctgctgaccctgccaaccccaacaaggccaggcaccccagctccaacaaatcctccagccctgctgctcctcgacgcactaactcctcctcctcaccgcccaaccttgccattgctgtcggtgcagtgctcgccatccttgtgcttagcttattaggagctgctatatggtacactaccaagaagaagaagaagcagcgtaggagggataatggctaccgtgctggattcatgtcacccacttctcccttgtcttctcaccacccatcatcaggatcaggtactgcactcctcccatcccttgtactactgccattttttcagttttcacacctacttctattcctcactctacaatgtaaaatgagcacaaacttccttactgttcacacattttcaactgtccttccttatagaggtaccgcagtaccacaaagtaacgctatagaagctctcttattgtgtgattctaacattttcaccatgacgaatttcagcatgtagtcgttactatctttgtcactttttcttcaggtgcctccgcaaatgtaggatcatcgttggacccttctttcaaaacaaactatagcgccggaagtcccaaactgaaagcatgcatgtctgatattagcatgggcaattcccgcttcttcacataccaagaactgtaccagattactgatgctttctcagctcacaacctgctgggggaaggagggtttgggtctgtatacaagggccacttgccagatggaaaacaagtggctgttaagcaattaaaagatggtggtggacaaggggaacgtgaattccaggctgaagtcgagataattagtcgtgtgcatcaccgtcatctggtatctcttgtgggatattgcatttccaataaccaaagggtacttgtctacgactttgtgcctaataacacccttcattatcatcttcacggtatggtttaacctcttgctacattgtacatggccatttcgttcttctgcaagtagaaactgaaacatgtattgaatcaacctgtaatcacaggacaggggaggcctgttctagattggtcggctagggttaaaattgctgcaggtgctgctcgtggaatagcgtatctacatgaagattgtaatgctccttcctatttttgactatcttcacggtcattattccattatttcgacctaccttgtccctccacttatatctccatttttcaggccatccaaggataatccaccgagacatcaagtcctcaaacattttgttggataataacttcgaggcacatgtaattatattcccaaaatgatcccaagtgcatctctacactacatagttaatgtaaatgagtctggccatatctcatggcctacttaatttgctgatttgatcctgtccatgaattctaggtggctgattttggtcttgcgaggttggctttggacgctgtaactcatgtaactacccgtgtaatggggacatttgggttagtgaagtactggcaattttcagaagcagatctgtcgtgatcttacagagataattaataaaattcgtttttccttgcaggtacatggctccagagtatgcatcaagtgggaaattgactgagagatctgatgtgttctcttttggtgttgttctcttagagcttatcactggtagaaaacctgttgatgcatcaaggccattgggtgatgagagccttgttgagtgggtgagttatagctctggactgaaatcttattgcttaaaatggtttacttggtggcatatttttagttctgatactctataatgtccttatcggtgaattttttatctgactattaactggagatctcctagaatattgtttgttcactgggattggcttaagtttctattgtcacgtggcccttctttcctagtattttgatggaatgttgtcactttagaagttaagagggacatttagtttgaatgcgctatttgatatttggagtacccgttggctgatgagcggctcaaacaaatgtggaatactgtaaaataaatcctatgtatatattcagagaagaagatttttatcggagttttttttttgtatatgtatgtacttgtgtcatgtcgtaaaagctagtagctactaccctgaactgcacaatcgctacctgactctggttctcaactactgtatgcaataacaagacatcactaacagctaaatgagctacatatcactcaaatagttattttgttgtccttcaactttgcaaactcttgacatttcttgaatccctattgtttgcaggctagaccattgcttactcaagctattgagacaggtaatttggaagagttggtcgaccccaggcttgagaggaacttcaatgaagctgaaatgttccgtatgattgaagctgcagcagcctgtgttcgatactccgcatcaaggaggcccagaatgagccaggtgcatataatatacaagctacgtttggaatttgtctggaaacatttcatttttttacatgaactgggaacaatgctttgcattccaatctgcgcatacgaatagtgcatttcatttcaattggtactacggttgtggttttcagtctatctagaagcagttatcaagttaaaatcttgatttctttcaggtggtgcgagctcttgatagcttagccgatattgatcttacaaatggcgttcagccagggcagagcgagcttttcaatgtggcgaacacagcagaggttaggatgttccagcggatggtgctgggcaaccacgatgacagctccgacatgagccaatacggttggagcagcagtcgccagtagaggtactctactcatagcctcaagctccaggatcctgtagcgtgcagtagttgctttctttgctcagtattgactagtctattcttcttcactcactaatccgggttgaattgggtatggagtgtccagtgtaatccttactatgttagggctaagcaaagcgaactgaattgattgtttgattgttattcgcagaagaatagggtggcgaattgagtgctcccgtaacgtgtagatcgatcatgtatgtacacatgaactcattcttcttgtttgacaaaattatggtgttggtcaaagcacaaaagcacacacgagatcatttaagcttctagatgttctctttctctgaatttttgatgttgacgccaagaggaggacgacgacgttagggcatcagcaatgtatccttcccaagtagtaaataaggtgggaccaaccaaaagcaggtaattgttattcaagatctcacaatgtataggaggtaataagataggtcccacatgtatataaaaatctaaaagtatacggtagtatggatagagaagaaagattcaatacatagctgagagaatcaatgattttttattccttactagcaggtcatagcgctattgcttggtatttgttgcttactacctccacaatgtttactacctggtattaaggctgtatttattgcttactacctagtttttgagcacattatggatgccctatggtctcatgtggcgtctcaactgaaccacccacaagaaacgaaacgtcgtcgtggtggtggctaacaagttacatcattttagaatggaataatgctgcctgtaagtgtaacaattaacgccgaatgtcttgcctgaccaaaaacaagtgttcctgatttccaggccatcaaatttgactatcacacgagttctttttaggtgatcacatcacaaagaaagagccattggtgaaccaaaatgaaaacaagaaaagaatggaagtatctttattgttcctgaatgaatattaatgtgtgatgatgaaggaacaaaacaagataaaaatggatggtacgtacgtatgcgtccgctccaatgtacttacatgttgtcgtatgagatgagcaagtagggttaatgtacagttacaaggctagtactaggcttcagctagtataaattttgtacacgaaaaagggaaattgatttggatgtggaaaaaaaaatggtgctgttagtgaacagtagctgcttgctagactatactattactaggtagatgtggtttgtgaatgtgaatgtgattgggaaggaggagggaggtggaggtccctggcgtcgcggcgggcggagacgccaaccccggtggacctgacggagaactggcgcagggcgtggccgaactcggggtcgtcggcgttggagccacggtgctgcagccactggatcttgttgtggtagtcggggaagaagcgcgtcttggcggcggagtaggtgaagtaagggaggagcgcggcggcggggacgagcagggtgaccacccagtaggagggcgcggcggccaggccgtcggtgaagagcatgaagtagttggtggagaaggccggggtgatggcgccgtaggcgaggaggaacacgtaccacagcgccacgctgccccagatgcaggcgtgctgcaccagggtgaagtagttggccgtcaccgtcatctgcgcgttcaccgcccacaccacgcacgtgtaggcggtgcc

SEQ ID NO: 6813 - DNA, 576 bp, Oryza sativa
ggctttcggacacgaatgaaaaaactaatttcataattcgcctagaaactgcgagacgaatttattaagcctaattaatccgtcattagcacatatggattactgtagcacttatggctaatcatggactaattaggctcaaaagatttgtctcgcgatttccatgcaaactgtgcaattagtttttttatctatatttaatgctccatgtatgtgtccaaagattcgatgtgatgtttttgggcaaaattttttgggaactaaacaaggcctcaatagaaggccaaagaagtgaacctgagaaataatacttaatttcatatggttgggacttattgttgatgtacaagcattgattcattgttggcatgcattgttaaagaaaaagagcataggatctcatgtattacctttttaacttgccctcggattccacttactgtccgaatagttgcaccctcaaacctagcaacctctaagtcagatgtgaacatgcctttgactagggcagttttcttaaatatcttgcacggtacacctgtgagcttgattttcttcatgattcgggcagtattg

SEQ ID NO: 6814 - DNA, 936 bp, Oryza sativa
gcaggttcccccatggcggactccggcgctcgcaggcagcctagcttcaccaaggtcgaccagctccgccctgggacccatggccacaaccttctcctcaaggtcgtcgactccaagatggtccttcagaggggcggaggccctcagggcaggcacatgcggattgccgagtgcctcgtcggcgatgaaaccggcattattgtcttcaccgcaaggaacgaccagggtactttactttctatatcctcctcctctcttttatctactactcctcttctagactactcctatctttattcattctgtcattgatactcgtcttttgcttatgaaagatacgtaacagtaagtcttaatattcccacaatagccaaccgtgaccagcaccagagataatgcttgtatgattagttccctttgtattcatttctcatcatcttgcttattcataacttgatgctgtaactcatggagattgttccacatatattgatggagggcttctgctaaattttttttttctggttcaccagcaatcctttaacatgataataacttgctactcccaaatctccatctccatctcaacatgaagtctgctcttctgtctaaagtgctaccttgactacaagttttcacccatgatggtagtattaattggtgtcacaaatattttccagtcctttaatggtacttgtgtaacttatgctaaatagatgagaacgatttctttgtataaagatatcggtcataaaactaataagattggttacgtgttctgggacaactcattttcccacacaaggagcatgtattccttggtgaaaattgagcttgtacactggcgagcaagtcatgttgactgtatgttgatttcataattataacatgtactccctccgtcccataatataagggattttgagtttttgcttg

SEQ ID NO: 6815 - DNA, 594 bp, Oryza sativa
taggacaaacaaatggagcaacaatgcggcaccgcagagatcaacaataccaggggcaaacattaaatcggggacaccaaaaggttccaatttgacaaaacaacattgtatagcaaccatccaatcaatgcaatacatcaaatccaaatggtcaactttcttcaagatgcatggtcattggtcagtgcattaaacatctgttggaataccaaaaattttcagtttctgtagaataaatatggtcagtacaccccacatggtcaggaaagcctcttgtgtgtataacactataactggggaacaagagcttctgctgcccctgaaaaattgacaggggaggaagaaaaactggtagtgacacgagcacactaccaagaactgaacagaggttccatatctctgttgaattcagtgcatccatcgtatacatcctcacaatcttagcgagataactgtgtgagcagaatcaaaacaggaagactcctctttccaagaaatacagatctcaagctgcttgatggcattaatggagaattacttctggttcaccaaatcagcaccactgacatacctagcaacgaatgaaatcaaccg

SEQ ID NO: 6816 - DNA, 506 bp, Oryza sativa
gggactgcccctttctatgcccaaattcctcatgatcgtcacgaagagaagtgccgagtcaaagtcaccttgaacagtaatagtgaagatattccctcagtgatgttcgaagccggaggaagaaactacatccatacatgtcaggaggtggcaaggatcgccataggagagctccttgatcgctacagtgatcagttggccgacactgagtatcgctaccatcctcgccaaccacagggaagtgaccgtggcagctaccttgagactgagggaattgagaatgatgctaccacaaggcatttggttgagatgctgtgggctatggatgaaacccgtgcggagactgtgttagcagcccaagatcgtgaagaccggaatcgtggtaagatttgcaagcttgaggacaaagtggatcgtttggagaaggaactagccgcattgaagggagaagcaccaccgcagaaggccaggattcgtcttaccgcaaggaagagagctctatttgt

SEQ ID NO: 6817 - DNA, 522 bp, Oryza sativa
ctcgttgaatgttgctgcagtgccagctttagaaagattacagattttgtaatttgctttttgttgtaaaggcggtgctctgacgtactgcatttgtacagtttttccccttttccttaatatacatcggtcagcattcttcgccgtcccggcgaaaaaaaagattgaagattaattgtcccagaaacaattgaacacagctttattaatcattccttccaaatgcatcaatctgtttttgacttattaaaatcattatacaaatatatatatatatatatatatatatatatatatatatatatatatatatatttatttatttattttgcttgcattgctgatgtataatttcaccacatagctagtaattaagtaatgggagcttaattgcagggagtagggagcggcggtccgcagaggcacttgttgtggaagaaggagtactgatcgaacctcgcggcgccggcgggcagatcggcgcagaggcgggtgtagctgacgttgaagtcctgcaggctg

SEQ ID NO: 6818 - DNA, 562 bp, Oryza sativa
tgggtgcaggttcaggctcgtttgaccctctactgctcgccgccgtcctcggactttgccggctggtggctcgctgcccggcaaactgttgcgaagatcgatcgcaagacgtttgacgccggggtcatcctcgttacatggttgatttggaaagagcgcaacgcacgggttttcgagggaacggcctcgtcggtcacgcagttgtgtgcgaccatgtgtgatgaatgggaaacttggaaatcagcagggctagttacctcgttgaatgttgctgcagtgccagctttagaaagattacagattttgtaatttgctttttgttgtaaaggcggtgctctgacgtactgcatttgtacagtttttccccttttccttaatatacatcggtcagcattcttcgccgtcccggcgaaaaaaaagattgaagattaattgtcccagaaacaattgaacacagctttattaatcattccttccaaatgcatcaatctgtttttgacttattaaaatcattatacaaatatatatatatatatatatatatatatatatatatatatat

SEQ ID NO: 6819 - DNA, 514 bp, Oryza sativa
tttgtgggaacacggtatgtgataatggcaggagagccctgaaacttgccctgcactttggtctccaagatgaagttgtgggaagcagtagcaccactgaaagcacaagaggtaaaaaggattgtcaaagggcaaatattggtgtgagaaagcataagtaactagtaagtgttgttactaacggatcaagtttttccacaatctttgatgtggttccagagataagttgaaaagcctcctgtggccaagagtcgtcgttcaagctaacatcataggcggtcctgtaaaaaatgagagagagagagagagagagtagtaaacaacatgatagaagaatagaagatgaatggttgatggcactggcagtgaagaatatagggcctgtttagatcccaccctaaaattttacaccctatcacatcgaacgtttgaacacctgtatgaagtattaaatataggctaaaaaaataaccaattgcacagattgcgactactttgcgagacgaaatctttt

SEQ ID NO: 6820 - DNA, 617 bp, Oryza sativa
agcatgttcctgatgcacgcagaggaggagatcctgaagctccaggcgcaagagagcatctgcctgtcttgtgtgaaggaggtgactgagtacttccatggtgaattgagcagcggcgacgaagggcacatggcgagagtttttggcagtgtgagggagttccttgccatgctggaccgaatctgtaaagaagctggagaggagatgaagagcagcggctggatgatgggtagagactggaatatggctgccccaatgggaatgacaacgccttgagctgcagcaatgctggcatatttgttatgttacggtcatctcatctctttgttactaataattttgtagcatatatgaatggagattatgtttcctagcgtacaatcaatggcacctataactatatgtatgtaatgtactccatcttcttgtataaagtactactagtagcaagcataccggtatggtatggatcttttctattttatcattccttgggtatgtctattttgatgataatgcttagcggtggtttattggttcttgttcttcatctctagcgggatgaataagctcaaaattagacataatttaatggtgaagttttctataggtaggta

SEQ ID NO: 6821 - DNA, 3075 bp, Oryza sativa
tgtgatgttcttgtagaagaagtagcagatcatcgccgatatcctgctgtaacaccagtgaccatggaccagcagcagccgctccaggaacctgaactgcgcgatggacacgtcgctcgccatcaccgcctgcatcccttccgcgccgctgatcccgaccccgatgtccgcctcctggatcatgcccacgtcgttggcgccgtccccgatcgccaggctcaccttccccgtgctctccttcaccagcctcgtcaccagagccttctgcttcggcgacgaacggcagcagatcaccgacttgcagcccaccgcaaggtccatcaacgcgcccttggcatcctcctccagggcatatgtcagcgacttcccatcgatgatcaaagcaaaggcttcgccaactaccgatccatctatccgcttctttccctcgttgatttgcttcaccacgttttcctttgatgccttcgcaacagccgctttgtcgccaccgcctttctccagggcgatgatatccggttgctccagtgtgatggttatctgcgtcataccttgtctcagtagactgcacgcatacccgatgttgatggcggtttccatcttgtcgcccgtcagcacccatatcttgataccagcttgtgcaagtttgtcgatgcattcaggcacctaacaaattataaaatcatgaatgacaacagctatatatcagcaaaccatgcatgcatgatccatgatgggggaatcgaagatatatagatttttttttttactcagcaaaccacttacccccttctgtagtttatcctcgacagcggtagcaccaagaagaatcaatttcctctcaagcaaatccgcagcctcttcaatcatttcatctctatcagcactgacagagttcttggctgcagtgaacttcctgtcgaaattcgcatattcggcctcatcaagttggcggtatgcgagaacaagtgttctcagaccagcatcagcgtattcatttatgtgatcctgggtcacttctctgtacgcacaatcactacttgatagcctctcgaacatcacactgtatacatatatagtttttgagatcaagtcaatacatggataagaattaggggccgtcatgcaagcatattgagcaaaatacttaggagttccagcagaatatatactgacctgtcagcgcctttactaaagagaaagatcttcccctcctcattcctaactattaccgacatccgcttccgagcactgttgaactcaaggacatgcaagagcttatatgatctgccaaggaaattcaggaaaatattattagttctgaatctaatttcaaagaaaaggaaacaataaaaagctcactctaataagtggagtacctgtcgacttgttttccagacgagggatctaactcatgcagaaaaacaccggtctgtgtcctctggtaaaacgtgaaaccgagctcccgtgcggcaacaacaaaagcagcctcgtcaggtgactctgcttcataagaaatcgtgcctgattcttcgtcaacttcgggtatgcacgtatggcaaacggccaacaacctgaggaacatctgaatcacaccagagtggggttggctaacccagttaccgttcatcacacgctcatccgtgaaattaaatcctttgattgcagcttgagagccttgggtgttgctggccatgtcggcgatcaagggagaaccttttcttttcgccattgctctctccacctcagtgataccacggccatacgcagttccggcaattgagcatttgatgaactccatggaattgcaagtcagagtcccagttttatccgtaaggatcgtgtccacttgacccaactcctcgttcaagttggatgttctagcatgagccggtgtgtcggtctcctcatgatacatatgaatgtcttggttgatgaacagagcctgcagaagcttgacaatctcaatagagatgtacagagagattggtatgaagttcccatatagcatcatggctgtgaagaaatgaagtattgctgatatggctgctttggttggcttgaagtagatggtagagtcgtccggcctaaggtaccatcttttcggcctgccatcttgtaggtcatctctggttgtgatgccaaagaaaaccgatccgatgactgaaatcaggacaagtgcagacaaaagcaagtagatgatccggtccatcttcctttcaatcttacttctcttggatggggctttcatagcattctgcatgacctttgtatcatggcctgtgaagatgaccacaccgtacacatactcggtgttgcgaagctttgagtctctgagaaggatctgctggggtgacagaggatactgttcttcgatttcgatgttgccaacaaaggaatagaggtgtggatttgggtcctcacaccttattacagccctgaagctattgaagctgtcatcctcctgcaagccggatgatgcctctagagattgcttgagcttgagatttgtctccccatccaggttcatggtctcaacatagcaaatggcgtcttcgtagctagatgagaggaggattaggtcagcagggaaaaactcatctttttcaaccttgacaatatcaccaacttggaggttcatccatttggtagaatggaaagcaccgtcctggagcacttttgtctttctgttgtttacctcggtatcctggatgaaacaaacaaacaaacagttggtaagatttttcagtagctagctagttcaacaaatctaaatactcctagtagtgatgaaattgaggatcagttatcatttgcataagtaattgcctattatatggagtagtatggttgatctgtttctgcatgcatatgcccttaaataaaaatgggtaaaattgggcgattgcttgctagcaataatcggctagggaactactagtactactccctagtcctactggagtgaggagtatatactactggaaatactagattagtagctgttgatcgaatggaaattaattaaggaaatgaagggaagaaagtgacctgctgcttcctcctccagtcttcgat

SEQ ID NO: 6822 - DNA, 677 bp, Oryza sativa
aagcacacctcaaaattacaacttgtggtcccattgatagagtagccacttgcttgaagctctcttccaggaaaagcttcacctgtgattcgtagcccttctatggctggtagtgggtcatcatctgcagctgcttattcatgaaaaatatgttttacaataagagccaaagaaatactaagaagaatattcaataaatataatatatataaatatgtaacaccttcagagaaagaagaactaggctcttcaaggacagtaggaagataagggtatggcgggttcgcatcatcaacaccagatgccaaattaggtgagccctccggaccccattgtgcaggaggttcttgtgaaatatgcgtttcagctccctccagattttctgggacatcattcctaacgaggtccttgaatgacggattctgattcttggattcaaagttaaatcggacagcacgagaatcatgttcagttccttgagctactacatccttcttaatttggttgctgtaaaaaaaacagattgggcatggtaagatatctactttgccaatttgactatctgattattcaaaaatatttgatcatcaaagcgcattgctacatttatgtgtaacagaaaaaaaacacaaattacacaatggcaaaccatatcttggcccatggtgggatatgac

SEQ ID NO: 6823 - DNA, 961 bp, Oryza sativa
acgcatgccaacggtgcttcaagttcgtcgcctcttcctgaagaggcgcttgttaatggcagtgacgccggacgtagtgagatcgaagaacaagcagaagccatctagaaacaatttgttttaaattgggacgagatgatgttgagaagctggaatatgtatttattttggatcagtacgggaacgcctactgtggtaacagaagatctcgatttgtggtcgagtttatactacactacgtcaaataacaagtgttgctactagctgtgactgtgagtaataccgatacattacattacattacatacatacacggtgattaaaacaaacaagcagacatttttacttggttatgttatgacaggcagagatggcatatgttaaggaaggataatctttgttccttcttctccgcttgatgtgtcgcttgttaatagcatggcagtcgacgatcatatcagatgtgatcgatgctatggcaaacccagtaaacgaacaagagataaattagaggcagactagtgaggaggtgcatataagcatagatccatacattcatgcaactctagagccatacattaacaagtggagtggttaacatgagatgatgcggagattagcagcagctagctaccttaattagtagatactcctaaggtaggaggagtgagtactccacagtggggaagcagatggagcttagtggcgattggcaggggtagtggcagagagcatcttgtcaactttggccaaaaggcctcgcatctctcccgcaagcgcaagctttgctccatggtcatggctagcggtagcagtagctgtaggcgagcggcccagcagtgaggagatcatcttctggagattgttcctaacatccgtgagtgggagcctgattgttgttgttggagtagaagctgctgctgctgcttctttcttcttcttcttcttggttttactagta

SEQ ID NO: 6824 - DNA, 4179 bp, Oryza sativa
aaggggatctgaaagtgggagccagacttttgctactgtccccatcttggatgctcgcgagaatgtgtgggagttggtggtgtgcgacacgacattgtccctctagttcacttgcttcttccccaacacctccatcaacaacgtcaccctccgcatgcgtactcatcttcatcactaccgcttgagctcaagttttgccgccaccaccgcagcacccccttcccatccccgcggctcctcacactcctgacacgactgggctttcctgcagatagctcatgagctcgaactcgccggctccctcacctacctcctcttctcccccgtcgtggaccactggagccacctcatcactgacctcccaccaccattaccacctcccgtggatgggctcgctggccgccgcccctctccccactggaggagatgggaaagagaggggggaggtggagagatggggaagagaggggacaggttgggaggaagtccactttaaattttaattttctgattggtatgccacgttagtgaaaccagtcatccataataccatgagactgacttggaaggtttttccaaaatgggggggagggggtgaagattgctggtattgcggtttagagataccattaaactcgacgtaaaataagggataataagtggacttatcactgtgagtaatactagtagtaatgagagttgggcttgggccgcccttttctacagtactacgatatatgggcccctgctcacacagtacatagagagacgattatgataggataggagaaacaagttgtacgccacgccgcagccgcacaagacttgatcctcttcttcttcttcttcttcctccaggctccagtggcgatggcgaccatgctctgctccttcacgcccgccaccagggctccgctccttcgcacttcctcctcctcttcctctctcggcttcgccacctcgcaactcgccggcctcagcctcggcctctccgccgcagccaccaccgcgccctccgccgccggtcccaagctccaccccatcctcgcgcgtacgtcatctgcctcctccttcttctctctgtttcgagccatccacccgcagattgacattacagttttatattacaccaccaatgtcatttctgctactattaaagttgttactttatccttcgttttttttttgcgctatccaatactccactgtatatatactactactagaaccagatgacctatttgttagtaattgattgctttaatctctcgaaaatagactagctgtcaatctattaccataaactcagatctttctttgtatttttaagagaatggaagctttattgaatttggtcgttctttgcaccatgtcagtgcacaaccaatagataccacacaacaagaaaaacagaactaactcaacgattaaggacctaatatcggaagactaggttgccgctcatgtgcctgggtaaaaaaaaaaaaccttgaccacatgctccaaatgaagacaagccgaacagacaaaacccctgtaatctggcttcttgagaataatccatgatcggagccaatgtgtgatcaagaaaataacctgcaaagaagaagaaacaattttcctgtcaaaaatcacatcattcctttatagccaaatagcccaacaagtcaactcctagtagaaaaggaggcctagactctttgttttgtcgcaaactccattgtccagacatatgtgacacactcctaggtgaagaaatgttcgatgcaatctggattaaagaccaaactgatcgggctagccgacattcaaaaaataaatgctttatcgtttcttccttgtggtaaaaacaataggtcttattcccttttcaattccgtttagccaggttatcttttgttaacaccacccctcgacataaatacgatagaaacattttcactttgagagggatttttaacttctagatatgtttgttaaaattgggaactcttgtatgtgcaagataatgagttttaaccaagaatcttccatcaggtgttagattcaatttaaagtcatctttctcgtgtgacaacactatattagcaatgcgtggaaagagatgattccacgccactaacttaaggccaataatatccttgcgccaagtgaaatttaacagggttgtttagaatatatttgaaatggttgcttgtttatgtctgacaaccatctctttgtttctctaagacataagcagagcttcttcttcttactagtgtatataagaaagaagggggaaaagaaaaaatataactattctggccatttcaagttatagttttagttttattctaagtcaaccattcataactttaactatcaatttcttatttaaaaagataattgtgacttatcaatttctagaaatttgtaaagtttaacaacatgttaattgtactatatattatgaaggtacttttcatgatgcatatataaacacataaatattatgatattaaatgtttggcttatgataaagttaaggacaagtaatttaaaagggtgagattatactttatcttttgtttgcatgatgccacaaattatagaaactagtagtagtaggaacaagatggcgtgtatggtgatgttgttgtatgatgtgggggtgggtgactcaggccggatatgccccttcacggacaagaagaccaacagggcgaacaaggtgtccttctcaaaccacaagacgaagaagcagcagtttgtgaacctgcagtacaagaagctgtggtgggaggaaggcaagcgcttcgtcaagctgcgtctctccaccaaagccctcaagaccatcgagaagcatggcctcgacgccgtcgccaaaaaggccggcatcgacctcaacaagaaataaatcaaatcatcatcatcatgatgcatacatacatgtattctctcatcaattgccgctgtgctgaatagaccagagctgtatgtagtccattattaaatccattcatctcgatgatgcaatttattgtagagtactacagtatgcattcatcggtggtggtggccggcttcgtttccttaaatttccttttatcccgtgttgctgctgcaagtccggctcgaattgtttgctactagtgtttcatttcggtcgagttcctaattaatactgtatgttggttacgaattataagatggatggatgtaacttgagcagcatcaggtcgtgcagttggcatcttgcgcttttcactttagagtgtcttccagtctaagctgaaattgattaattattttatttcctttttggctattgatatttaataagagcctaaatgaaagaattaacttgtacaaaattgaaaagctgtttgttttgtacaaaaggaactcctacgccaatattgattgttctactgctatggcctgtctggtttgagatagctgaaattgatggattgttttattcccctttttagctattgatatttaataagagcctaaatgaataatgaacccctacaaaattagaaggttgttttttttctctctaaaaatgtagagacgagaaaaaggtgttgagttgtagacgtggagcaacccggcagctccacacacgcgcaacctctgtctgtctcaaggactgccaatccctcgatcccctcttcctcagtcctcactactagtctcactagtcgacgtctcctcccaagtccaaacggtgccattgagatcgaactcgaagagagatactagtagtcgatgagtatggagatatccatggagaagaatttggagaagcggtcgcgcaagaggagcaggtacctctcccctccctacaccttccccttcactacagtcactgtccaagacgacgtgtccgtatccgattccgatcagtcggaggacctcaccaatgtcgccgtggcggacatgctgtcggcgctccacgccgccgcgctcttggacatggatgctgccaatgtccacctgctccgccgcttctttaccctgcacaagaccacctccccttcttcctcctcaacccgtaagcaacttcaatccattatattcattctagtacagtatatactagcatagcataggatatctatctcttcttcttgtactcttttatcttgaatgctgctgcctgagcatcatttattaggggtgcaggaa

SEQ ID NO: 6825 - DNA, 856 bp, Oryza sativa
attgcctcttttgacagaatataaccttcagccttctgttcttgatgctcaatcaattgttagcaatctgaaggtatgtgccatctctcttatgcacacttgataatattatatccttgtttgttcttgattaagccccaagttttcaccaaaaaaatctatattatcttcaatagcgattctctatgatctgaagttttttaaatataaaaaaatgttcaacaaataaaagacaaatatcttctctaacataagatcttttatgaattgtcttaacaacaaacatggaaccactccttgcagacctcttgtcaggtgggataagagcaagctatcctttttctttatttttgttttaatgccaatattgtaatattactgcgcattactgcatatttttgttcttgtggggaataatcgttggaaaggtacacgagtgggtttgatcttgttccttacctagttgaagttgacctttcactaaacacttatttttctttttgtaggtcctgtttaagcatttgcaagagaaactcgctattactgaggtgtgccaattgattaaatgtcattgcttttatatataatagcttgtaagagaagcctgggttgtgagcatacattcacagcctggctagtagtgtgctttttattcttgcacagcttatcgctgatatttttgtatagaaaaatgaagctgcattctttgcaattttggatggtgcaggagaaactgaaagaatcacaataccagcttacaccttggcgagctgaatcttcaaacagtacaaatattcctgtgcaggcgccttctcatcctcctggaaatgcaatagttaccactgtatgactcttt

SEQ ID NO: 6826 - DNA, 4367 bp, Oryza sativa
atttttaatgggtggcttttgggagttgataagaaaataagtaaactaatacttgttggagcttctgccatttgttgggcaatatggctgagtaggaacgatatggtttttgacaaatcaccatcattttcctatatgcaggttattttcagggtaactcattggctccggttttaggcacaactacaaaggtatgatgaagatgaagagtttctgaaggttgcatgccgaaagttggagaccacggttatgcaactatttgctaattatggttggagatttacaaatagacttcaataattgtgatctccttacgttaggctggtttcaataatagtgatcttcggtgtgttctattcatttagatttacactatgttcatgaaaactactatgtaataattggctgtagctcttttgagtaaaagccgggatattatattccattatctaaaaaaaatagatgtatatagcagtaatatgctattctattcaggccaggatctaccatgcatgcatgcattgtttcaaactttatcaattgatctgattggcacatgaaaatctctatatatatacacgtaaatgctagacttccattgttttatcatttgcaatacattgtgaataaaactaaaatcatatttatacgtgcaagcacttcattatattacttccttacaaataatggtgaaaccaaatctacacttttaaaattacggaaatgctagaggacgggatcctatcctctgggcggtatcacctcatacacaacgatgtgctaagtttgagccacaactctcacctccgtcgcagtcgcaccttgctgttactaattcgtcaagccaacgcctcctcgaatctggctcttcgctgatttctccgttggcgtttgccccgattaccactcatgttgatgtgatagatgtgggcacacacaccggcaacagcttcaccttgatgctttgctggacgagacagtcgtacatgaacaccaagagactagaacttgaagcaaccatgagctgatgtcaccggttgtctttttcttccaagcctcccacaggggtagctatgtcaatatgacaccgccatgtcagcgatcacaaacagaatagaagaaaataaggttgcggggagacatctcaaggtgtgtggtgatgatgccaagagaggtcagcgatcagaaacgaaatatgaggaaaggattttgcggggtgacatgttgaggtgtgtggtgatgatgccaaaagaggtcagctagcttctgatagtgttgatgaaaaaatcgaacacactggcctgggagatctgcttaactccagtgcaggtctaaaggttattgagatgcgggcatgccagtcagtttgatcctgcaactgacaagatatgcaaatagtagatcaaaacagccgatcggctgacaagccaatggagtagttccagccgatagccgataatagccgatgccgataccagccgatagcgatagggtttaagcaatcagctatatgtgcaatgtagataatgatataaaggcaatcggctgatgataatataatatagcaatataatccagtagaaaccaatcggctaacaataatataatagaataaatgttgattcgaaggttaaagcacacatcggctggaggtccgatgtcatgaaatccacaagattagattaaacagtgaaacatttgttgtcatcggctagatccaacttatatgtatatgcaatccttatgagccgatgcaacgtcaagataactcaccggctgaaaccccgatgaaacccttattggcagtcaagaagcaggctagagattatggttctaagcacgacttagtagatcaaacttaactgatgcagcactaagtatgaaaagaaacataatgtctagacaatcaagccgttgactgagtttttagggtggtagatgtttaagctaatctaatctagcaacgcgatttagccgataccggcagaaaccctaaaacgagaagcagccgatagagctaaattgatatgctaagactagattaacagagacatatgataaataggtaggcaaatatatcatccaaaccagaacaatccaaaaggtcgaatgtactgatgcagccttgaacgacgccgatgtagatgagaaaattgcctgggccggcggaacattggacttaccccttagccggagatcgaacaccgatgcagcctcgcgtcaagtgccaagtcccgccggacgataaaataaagtagaaaaggtaaaaggtggcgatgcgccgaattgtattgatcgtagcgataaattacatagaccccgggtgtacatatttatacccatgggttgatacaagtccttgtcggacaagaaagaaactttcctaaagataaaaggaaaagataaagtccttataggacactaaacacactttcctaaagataaaaggaaactaacaaactattcctaattaatagataacttgccatgccgcattctctttgaactcggtctcttctagataagcttcctctagtagatcaatttccttaaccgaatatagcaagaatccgataactgacgacttgacaactctcatcggctaatctcaggacttcgaagctgatgctgactctaagccgatgactactccggacttaccaaatttcactgttaacagataggcatgcattgggtgagagtaaagttggaagaggtaatttatgttttgtttgattgtgtgcatgccctctttcttatgatttatatacaactaaaatggatctaggtactagatctgtcacaacctgataccaaatttgatacctgtaagatatcgtattgtagttgtttataaatagtatcctctacaatagcatatcccatgaaaattaaccacctttatcattccaatctaaatactaaaactacccaccatttccatccgacatgattttaatcttagccacatgctccataaagatctattcctcatagaatcagttctgcctattagttttgttttgataaaatactactatacaatgtagataatttatttttttgaaaagaaaagttttttttgggggcttttagcaagagagttggtggatgattaatacagaggtgggataattattttgctattgtataaacgaatgattattcttgcactaaaattgcaatttattgattttatcttttctttaagttgctccaaaaggcgagggaggtattagttgtatttgattgtttgttttcttgaatatttttgagagagtaaattctattactagttaattggctggctgctaaaatggagtaagtcactgaaatggaaccgttgattgaagtatagatggcctggatggaagcaaatttgcctttcatatcgcccaaaaagaaagaaagaaaaagaagaagaaggctgtgtcgtgttgttcgggccgcatcttggcccttccccggccgcgccgccgccccccatcctcaccgtcgtcgctgccgcgcgtcccttcccctcctccgcccgtgtggcgccttcgcaccgccgccgtcggtataattcctctttcccttatcgtagtctgaccaatctctggaatccacaagcttggtggtggtgggggccatggccgacgccgacgagctcggcaggaggctcgccgccgtcgcggtctccgactccgacagcgcaaacaacaacctcttccaggtgatgcgcgccgtggaggacgccgaggccaccatccggcagcaggtatcctatcccattacgatttcatttttcatttttctgccccctccccctccccctcactcactctctctctctctctctctcagctggaggagaacagccgcctcaaggacgagctcatgctcaagacgcgagagcttgacagattcgtaagcggctccccgatctgcccttttcctctccgtctcttcttctccacccgaatctcaccttacaataatatggagtacatccgcatcgcacaactaactaactaactaactagtactgcaacactcgtcggaggtactagtattgatttgcattcatctgctgctctgccagaggtcagaggctaccaagcccacttctcttgccgacaccttttcaacttctccccatgggacctcaacatgcttcggtaccacttcctcgtcgctcaattccaggaccgctctagctgatcagcacaatggactctttcaccacactgaccaaatgctgcacgatgccatcaagctaaagtacctagataccgaccagtctaatggaatgcccaggaaactatctggggagcagagtgcgcccgagagtcgtgtgccgtcgcacctctctggggtgcaggaat

SEQ ID NO: 6827 - DNA, 865 bp, Oryza sativa
caagaatcagatatgtgcgggggaatcaagaatcagaccttgcagctgctgcgacggcggagtggtggtagggtttgggtcaccagtggccatcgaatcgaagcgaagcgaacgtacgtgcgcgccaaccaggagagcttggcttcttcaaccccccaagtccccaacccgtctcgtgctgtcgtggacgtgccaaacacagacactgctcaaccacgtacctctctctcctatatgctgctgcactatatccgatccgaaccgaacctccttctctcactccttccttgcaaaaatgctaagattttcctaccttcaaagaaaatacttctttccttttctcattggataacagagaactggttgtatcttgcatagagatggcaacagaataggtcacggtcagattgggctagacgaataaaaccaacacatctcaacgattgttaatactacctccgtccctaaatatttgacgccgttgacttttttaaacatgttttaccgttcgtcttattcaaaaaattttgttaaatatgtaaaactatatgtatacataaaagtatatttaacaatgaatcaaatgatatgaaaagaattaataattacttaatttttttaaaagacgaatgatcaaacatgtttaaaaaagttaatggcgtcaaacattttgtaacggagggagtataacataaggggaacataacttcggagttggggatctagccgacgtatcaattgggacttgctaggctagtggaatccaaggtgtcctctccgcgtatagatggccatatgacccgacccaggcacggcacggcccgactcaggtcgtgcccgtgccggctcggcccgatagccgtgt

SEQ ID NO: 6828 - DNA, 2358 bp, Oryza sativa
aaataaaggttcaggaccacaccttactccctgaagacctattatcccctcggtgtgcagcagatgtctgcagaaagcataaacattattaagatagtagaaataattaggatagaagatcaaggtccagtaggaggcattcttccagcgttaaccgcacataaccacaacagaagatcccgcaaaaaagggcaacacaaggaagatgacaaaaatgaactaatgacattattattcatttgtacatacacaggagcatgatcgattagtgcagtcttgtttttacagagggtagaacacagttgtaacatagtaacatattgatggcagatcttgaaacttgaaagcaggtcaagttgagctattagaaatgctataaaagtatgttaaacatgagaaatatattatatttgaagatcgagctgtactactttgagaaaatctattcatctgagggttaaaaaaatagcccagtttataaaaatgacctaaagggccgcaccagctaaatacaattgaacagcttgccatgggcttagaaaggtactagtatatgaaaagaaggtatattgctcgacaaatttattggttgatgtgcgatatttggttatgatttaaaggagttcattggctgaaatgtgatactgttaaaggctagataggaaataattatttcttttgagatataaggaagtaatgtgacatgggcaccacaaaacactaaattgtgcctaaaattgatgcccagctaatttcagcaaatcttgatttacagcgtgatcagttgcctacctcaacgtacgatcttgaaaatgatccaggtgtagcttcattatgtgttgacgcaaatgaaggcctccctgctcaaacaagcagctaatggttgggaaaagtagggtaacaccagagacacaccaggcgcgcgcgcacaaagagagagagagagagagagagagagagagcaggaaggaacttgaagttttactgacctgagccaaaatcactgtttggcacaccatacatattagtttgctacaaaaagggaaatgagtcagatattcctgttatcttgatcacgttattggagtggaaaaggaacaatgtacaacacacctgagaggctctccatggagtgttaactggccctaaaagtcgcaaacaatatggtgagactcatagttatcagggttaataattacattcaatcgtaaaatgaagtgatgccaaacaatagaagaaaaataaagaatgctttcggtaataggcaaaggtagcatttatagtctcctgccagtatggttgcagcatacctagggaaagtatgtagtgcaaaccacatatgtagtggaaatctggaaactgccgttggatcgaaaaatagatgtacgagattcgtccatgacaccaaataaaatttctactcatgagtaaatctgcgagtaaaatttttactcgtgatgacatggacaaatctcagacgtctattttcaatccaacagtagtttccgggtttccactacatatgtggtttccaccatatatttttccgcatacctaggctaaccttgcaatgcgattgtatgcaaagaaacaagcacttaactataaaatgatggagaaattaggtactgaccattccttgcagcagaaggggcatgctcttccaatgcccggtactgagaaaacctatcttccctggtaatatttatagaatccctgctatggttcagagactcacataaggatttcaattcttttgcttgggaatctagtgcttgtgttaatgtcacaagtatcttcttttctgtcaacaaacatgcaataatcagaatgagtgatataagaaaatatataaaatatgaagtatgtttagatgaattgggatagccaacaacaaaggggagcactgtgaaaccttcatcctttgaagcaagcaattcttggttagttttggcaatagcagaaacagcagatgcagaagcttttacagcttcagcagtttcctctcgatcttggacttaatttgcctgccctcgttttcatcaccttcagctacgaccttgcggatccaagacttaagcctaggaaggagcaatttctatgcaagacatgcaaatttgatttatggatgaatcagtgagttgaaaagtttcagatatgtggagaggtgagcagaagataccttgacaaacacagcagcactaactccaaaaccaagcaatagccctgcagcgacaatgcacggtaccagctgaacttgggctgtgtggcaacaataatagagccagcaggtgttgctggttgccttggtgcataaggttgcacaacggtagaagagtggttctggttgttggctgc

SEQ ID NO: 6829 - DNA, 641 bp, Oryza sativa
aatgtcaaaaattatggaatcggagggagtagtaatggtggaaggttcattgtctattgaggagaagcattgctcccttttaagtatttttttttattttgatcttcttatgtttttgttgctattgatatggtattagtatctcatgtagtgctcagctcagcttcaactagtattcaattgtgtttctgttaatgaaccctttcaatctatttggtgacagctgcttggcagagtatttaatatcctgcgtgagaataatcctgatcttgctggtgatagacgaagaactgttatgaggcctcctcaagttcttagggaaggcacaaagaagacagtttttgtgaacttcatggatttgtgcaaaacgtatgatctcacttttttaccactccataccatatgctctaggcctgcttttatttcagagaagataaattaccatgagctaactgaaatcatcgtttacacttccagaatgcataggcaacctgaacatgtgatgatgtttttacttgctgagatgggaacaagtggatcccttgatgggcaacaaagattggttataaaagaaagatttgctcctaaaaactttgaagccatacttaggagatatatcagtaagtttccttaatgtcaca

SEQ ID NO: 6830 - DNA, 2252 bp, Oryza sativa
ccctttcaaccaaataaaacgaaccttctactacttacccgccacccatccgctgcaggctcgcttccagcaggaggaccacgtctacaagtccttcttaggcatcctcaacatgtaccgcttgcataacaagtccatccaagatgtttacggggaggtacgtaccttgcctcggcgcttgtgtatacgcctttttgaagaattctgtcttaccggctctctccttttgtcgttaggttgcagcgctcttccgtgactatcccgatttactcgaggagttcaagcatttcttgcctgatacgtcaaccgctccagaaccggtaactgttcctagaggtgtttcaagcagacacgacgacaggggcccactaatgccctcggcaaggaacgcgcagatcattaaggtaaatcttgaaacggacatcttgttacccgtgttaaattgcatatactttagagaatgtttccttatacgttgacaagtttatatgacatcagctttaggataagtactgcagagaacgtaatgcggcgtaatgtaaactaccttgacaagtttatatgacatcacatcatctttaggataagtactgaaacatttaattgacattagctccatgattcggggacatggatatagaatatcagagatccgctgaaacgcactggcatcggacatgaaagctactttctgtactaggatcatttttctgaatctactttttgttagacacaagttctatattttactagctatatttggtcacaaaagaacatctatggtgaaatgttgttttatccatctccagagggagagggcttatccatcaactgtcgatcgtgacttcagtattgatcgccctgatcctgaggatgatccccacagaaggcgtgttgacaagggaagggatggtaaggttgatcgcagtagaaaagattatgaaacggacgtgaaagacgttgaatatgacagcaaagatttggatggaggacaacgtaagcgcaaactagcaaggaagatggatggtgctcttgctgacacacaacaaggtggggttagcacctctacttcaccatacgacgataaggatgcattgaagagtgagtcttaatgtcatcttgtgtgaatatgtgtgcaatatggcatcttcagtgccttgcaggctcctattttccgttaactttaggatccatcttgtgttttcctccatcttagtgtatttcattaatatgtaagtaaagaaatgccttgcctctttgatgtactggattattttcttatttcttattcaaattaaggtgcatacacaaaggagttccgtttttgtgagaaagtaaaggagaagctagagcctgaagcttaccaggagtttttgaaatgccttcacatatacagccaggaaataattacaaggagtgaattgaaaaacttggtaagctggatcgatgtgttttaaaggatgattcccttatctcagggatttataagagcttgctagatctgaattaaagtgataaacctaatgctacatttctgaacaagaatagccttgctgcttttcaggtcaacgacatactgcagcactatccagatcttatgaatggatttaatgacttcctggaacagtgcgaaaatataggtaggtggcatatatagattcatttgtcacctttactttgttgggcacactttcttgatttcatgtttgaatatgttgcatttttgattcctaaagaattcctttactctgtagatgcctttctggagggagtcttcagtaaaagtaagcaacggttaatttaggaagttagaatttcatttctcatgctatttgtagagcctgtttattattagattatgattattattattttgaaatgaagggaaaacatcacaaatagttaaaatagtagaaaaaggatctgcactcaattctaaggaaggcgctacccacaaagctactacattctctagcaaagacaagtataacctatgcaagccaatatcagaacttgacctctcaaattgtcagcggtgtactccaagttaccgacttctgcctaaaaatgtaagctgatttaactctgcagtttgtgatgatttagtccataacatctgttgtttttctttcagtacccaatgcctcctgcaagttgcagaactgaccttggagcctcagttctcaatgatctctgggtgtctgtgacctcaggaagtgaggattattcgtttaagcacatgcggaagaatc

SEQ ID NO: 6831 - DNA, 6362 bp, Oryza sativa
ccaattacataattgaatgaagaccaagcgtgccagattgtacatgaggccaatgttttgtttttatatatgcacagcagtaaaaggccaaagttaggccctgcttagtttcaggggtgaaaagttttggcgtatcaccttaaatatatggacacacatttgaagtattaaatgtagtataacaaaacaaaatacatatttctcctgtaaactgcgagatgaatttattaagcctaattaatccgtcattagcaaatgtttattgtagcaccacattgtcaaatcatggcgtaattacgcttaaaagattcgtctcgcaatttacacaatctatagttctttttatatatttaatactttatatatgtgtgcaaacatttgatgtgacatgatgaaatgtttttttatgggaattaaacagggccttacattagtactcctgtttgctaagaagtgtacgtaccagacggaccgttttagatctttgattttgtctcaatctattactccctccgtttcaccctccgtttcaggctataatatgttttgattttagtcaaaagttaaactattcaaatttaactaagtttatgcacaaatatagtaatatttataatatcaaattagtttcattaaatcaataattggatatatttttataactaatttggggtgagttgaaaatattattattggtttttataaatttagacaaacttaaaataatttgactctaaccaaaacctttaacctaaccaaagtctttaacctaaaacggagaaggaagtagggtggagtaagtcttatctctaacttgctcttaagaaaaaggtgacacgtacgagtcgtccataaaacacgatggttggacttggaatagtataataataatgccagccatgcatgcataagcgctgacgaaacctcaattaggccacgttcgaatctcattgagacgaagatttttctagattttcgttagcatatatttcaaaccattagatagtatgtttcgtacaaaatttatatatatatatatgagttgctttaaaatattaaacaaatttatattttaagtttaaaataattaaaacttaattaattattatatgttatttttttccttgcacaaacttaggcctagtcctccgttcttttcttctctggcacatgttcttaaaaaagctgaaagatctctgccacatatcgttagaaaaactgaaaaatgcagtatgatgagatcaatttcgcgatctatctatctggcgcagtagcatcgacatctatctacgttttgcacttctgatgaaaaagtcaatgcatgtatgcattgagacgagttaggtgcagggctgcaggccgggttgctcaagtggcattaattaacaccagccaggcagccacctttgattgaatattcgaatttgactttgaccattaacgaatcatatgcaattagtaacttccatacaaaactttctctattctaaaaactgtcaaagtaattttggctcatgtgccggttttccgattgatttcaggaatctattgtcacacctagaaattctcgaaccagaatttctaagctgaatgtgcattaaatccctgtccaggaccagccaggatacacaaacgacaattgttgacatacagacccacgtcttacaaaaatataaaagattacaaatgcaacggaaaagataaaagcgagctaaaccgggaagcttgacttcagcagcgggcgactccactccacaggcaaaccttgacggcagcgacgaaaccaacctctctgagacggctccaactgagaagaacttcaactctggtgtgggggaaaagagagcaagactgagtactacccactgtactcagcaagtcataccggaagaggaggtatgatgcaggatataaccaaaggaagctaggggttcttttgcataaagcaggcatttcaaagcagtagttgaaagcagtaaaacagctctagtaattaatcaatattaaccaatcactgtccaacgctacaccatgttgcaacaggcccaaccaaccacctgaactacaccagttcattaagctaaactaggggtgagactaatcacggtgaatttggttgatcgcccataaccgcgggcacggctattcgaatagttttactctggccagaggtgtacaactgtacccacaagacaccattccacacatgtcgccatgccccgaagtatcaccatgatactgcaaagggggaaatcgtgacaagaccctccacataactctcccctaaccatccacaccacgctaaggtttcacccccacccctcaaaaggtagtgggcggtcccctcttgcgccgcggtgaatccggcagctggacaaccgaacacctcggccgacccaactccatcacgcccaccctcgccaccggtgcctcggaaagggtcaagctatacttcagatcaagcagttacccactcccgcttgtggtaagcacagtaagtctcccagggtttcccgtgaaccggtccttaactgccatgggtgcgaccagcaaaaccatgcacccacagcccaccattcagtgcattttaattagctaacaccattgcggtggcaccaatccaaaactatgctaatagacaaagtctatgtaataaggtgatccctttttgtgtactagttgagctaagcatggctaagcatttcctaaaccaacatctaattatattgatacccaggttatcaatggcatgtggtaaacaataaaaggctgagtaataggacccatcccatatgacattgtaaaagaatgcaacatttaatagaaatgcgggacatttgtaaattgggtacaatttgatcaattgtaatgcatgacttgccttgctctcgcactgatgagaccacatcaacgtcttcgagaaaccgcggatcgacgaaacagtcgaaacctacgcgacaaacaaagcacacaagcaaaacatgcatttttcttgatttactgagacttgaatggacttaaacggagctcggatgaattacttatgaattttagaagataaactgtgtttttattaataaagaaaaagtccttaattaattattgcgcaataatacccagggctaacgtcatccaggggggcggcgccgacaggcggggcccacgggtcagcggctcaaaggggagaggaagggggcgccggcatgtgggccccacgggcagtggctcaaggtggccggtctaccgtggaccgggaccacgcgggtggtccaccgccggtccacgggaccgacggtccggatcggccgggaggccgatcggacggcacggcggcggctaggcacggctcggctcggcttcaaaaccagccggccggccatggcaaccggcggcgacgcgcacggtcgccggcgacggcaatcggcggcgcgggaagcgacggcggacggggtacaggacagcggcgtcgaccgaaggcaacggcgagcgtgtggagagaggcggcgcaaacgagagagaggggaagagggaggagggggatcctcaccggcgagtatggcggccggagcggaggatgaaggtggcggcgacgacccggcgatgaggaggggcggacgggcggcggcggcacctacggagggagttgagaaggattaggagtagagagagtgaccacggcggccaccattgttggccggagacgaaggagaatggatagctcaccggcgtgcgaggagaaccgggctccggtggggtttagtggaaactgagcagcggccgaggtggctcacgcggcggcaatgctaatggcggcggcggcttggcgtggcggcggctctagcggctgcggcgcgcgaccggaggtggcggcaagcggcagcgctagtggcgagcggcgcggcggcggtaggaggcacgggagagcgcggcgaaaaggggaaaagggagagggagatgcggggaaattttataggggctcgagaggggcggacatggccgggaaaccccccgatttggccgccgacgtggggggagagagagagagagtgggggggattcaaatcgaatctcgcccatttgcgggcgcgcgcgcgggcgggaatggcagggagggcggcgacgtggggactcggagcgggggcgcggcgtggagcgaagaaggcggcggcgcggacggtttcggcggtggttgccgtcgtggggcgagcggctggaggaaggggacgacctgacaggtgggccccacctgtcagcgtcccggagagaggggaaaggggaacgggccggcccaaaggaaggaggccgagcgcgggagggagtgggtcgacggcccaatagagaaaaaagaaggaaaagaaaaagaaaaagaggaaaggatttttcctgggatttaaaattgcactttggtgatttttaattggttaaaattatttccaaggctctgaaaattccactaaaaatcttgttaatgcattggagcatggggaactcaagaaaaattccaccacgctatttccgattattaattgcatttattaattagggatttagctctaggttaattaagataatttcttcgggcaatttatttaaccaatttttaaagcaagaaaaggggggaaacttcagggtgtgacatctatccatattttatttgacagtagcaaaatttatgagatacttaggccctgtttagattctaacttttttcttcaaactttcaacttttccgtcacattgaactttcctacacaccttttctgtcatatcgtttcaatttcttcaaacttccaattttaacgtggaactaaacacagctttactatgttccatattcatcattatataagcttttcattaagataaaggaagccttaacttcctcacatttcatttaatgtaagtacgaggtgaagaaaaatcaagaaacatgtagacttttaactccccatacacaagaaataataagagttttactaccctcttttgatatgagtaactagatcctgatcaaatgatatgtattgataagttgattgtggagaactcaacgttgatgattcaaaaggttccggccagaacgattgatcccctctcaatcactacaacactgctctattggttatcaatcgtaccgaaatgcggttgacatcgtcaagtaggttatctcctgcaagcgaatcgagagcacaagcaagagagtagaaaaaacaatatgaatatatggcaaatattgaagccatataccaaactaagcagcgaaattgcaatagcagaataatctaagcaaagccctcctaattcattaatttttaaataaataggttctagggtcgaccaaggacccctagacgcgtacataatagatttcaacacgatacatgggccgatgacccaaaagatagtgacaacccacctggacaaattctagacaccaacttgttttgacgatttttgttgacttggaaggaatttctacgtaagatcaggtccattggaaggtagtctaattagctttccatgtatgcatagaacgtcgaaaactaagtccgaatgagatctggacaatgattttaatgcatactactcctagatctcgaggtgggcttgaacttgatttgaattggatctccatctcctagcctctttccaagtacttcttgattctcccactttcatatacaaaagagtgatggtctcatcaaatttttaattttttatatgataatcaatatggaacagaggaactaggcggagctagaatgaaatgaagaagaatgccacttgcttaatttactctattttaaatcacgtttaagcagatgcgggtgcctaaatttatattgtgggggcaccacctcccattctctacctccgccctagagaggaagtaatatggtttagctaaatttatctcgatagacttttgttcctattacagtcgatttttcagccactctccatttttttcctttcactacaaaaatgcccacgcgttgcaacggataaaagcatttttggatcgcatacattatactctttgctttgggctaaaagctcatttattccttccttttcagtcccagcctagcccgttaccttcctctgattagtctatctctctttgacctagcccacaagtggagctgtaggcccaattcgcatagccgactgccgtcatcaatttctagaagactcgcatagctgattgctgtcttcaatatctggaagacgtctcatgtcactataatgctagaaccgatcctcccatcaaatctgatcggatttttctcgatctcaccagattgagggcttttgataccctcgatctgctctttccgtttttatcaaataggagcaaa

SEQ ID NO: 6832 - DNA, 738 bp, Oryza sativa
agtgctgcatcagttaagtctaatctactaagtcgtgtttagaaccataatctctagcctgcttttggattgccaataagggtttcatcggggtttcagccgatgagttatctggacgttgcatcggcttacaaggattacatacatattggatttaggcgattgcaacaaaaattttactgtttaatctaatcttgtggatttaatgacattagacctctagtcgatgtatgctttaaccatcggatcagtacttatcctgtcatattatgattagccgattggttatattattgttatatcatattatcatcagccgattgcctttatattggtatttacatcaagtgtcagaatatacattggacatatggccgatagctcaaaaccctcttgctatcggttggtatcggcatcggctggaattactccatcggcttgatagccgatcggcttattgatccgctgtttgtatatcttgtcagttgtaggatcaaactgattggcacgcccgcatctcaccaagatttggacctgcacaggagctaagcagatctcctaggctagtgtgtgtttttcgcgtcagcagggaccttctccatttccttgaccaagtcgtatagcgaggacaccagcgtggtctcgtcgccatgcgaagggatcttgaccttggcgcaaagctcctccacaaccttgtagaggctggtttagttcttgcggagggcctcccggatggac

SEQ ID NO: 6833 - DNA, 529 bp, Oryza sativa
taaataagacaatgaaaaattccgtaaattcccaaataccaatcagtagataaagtcagagaaggtgaaaaaaaatatgtattaaaggatccttacatgtccatcagcatccaacaagatgttctcaggcttcagatctctgtgcataattccattggcatggagatgggctacagcaaacaccatttcagcagtgtaaatgcgtgcaagctcctccctgacaaacaaaaggttgcttaattaaatgttcatgcaaagcgataggaataaacataaaataatgtaatgaaataacctaaccaaaccctgttggtaaagctgaaaaaaaagatggccccatttatgaagtccacacaaggtaaagtcggtattttgtctgccaagtaaatactgggtttaaaatttgggacaagactgaaaaatataacatgcatgatagcttgccaacaaagaacccccagagatgataaatgcttccctgaaaggagtacctcagctgtacaacaaaaggatgatcaactttagtcag

SEQ ID NO: 6834 - DNA, 636 bp, Oryza sativa
tcaaccatgaaccgaattatcaacaaattatagcaaaatgtcttaaattagtgtggcatcacatacacagattttaatgttagcaaatgccacagattataaaatgtaatcactgcctggagagacatataaaccatattggaagttggaagactaaaagttattgaagctatatatcacaccaacgtacagcagagtagagaaacaaagttttttttttctctcgaacacgcaggagagttgcatatcattatattaagataaaagagttaaaaaggactcatgcatgcccataacgggaacaaaggctataagaactttccaaagaaacaacaaaaaactacaccatgacttagcttcatctctaacatcctgcatgacggaattgaaattagctgaaacctctccaaagacacatccacctatgtttccaaatcaaccaagccaccaacacaactaatgagttaaaacccttgcgatgttgcttagccactttctgcaaagcttaaagccaccacatggtgaaaacagtgtcatcgggaccttatctaaggtgctgcaagccaaccaaggacaaaactgagaaccatacacttcttgtgaacacacataaagtgagcaagtgctgcacattct

SEQ ID NO: 6835 - DNA, 6853 bp, Oryza sativa
atctcatcttatgcgatggtagatatgcaattttcttggaagttgagaagccgaaaagtgtttttgtagcattcaaattaaaaaagagcaacccccataccgtaaaccgctcgtgcgccttccgccgccgccgcgcgcgccgtttcccccgccccccccacccacccaccccacacgccccgccggagctgtgccaaacggggcctttgtctcctctgctccttgcgccgccaagacgagtcgtggctgaacagaacactagaataggggaggggcggcgatctccatctggcgaggagagcagagcaggggaggggatcttggtgagcatccacatcctctttctgattcatctctctcccatcgggactacttttttctggaatttgcttgcgttcgttcgttaaccctagcttctcttctagatctggatattgtcaagaatcagctttcccttgcggatggcattgaagtttctagcttctcaaagttccaagaccttggtgctaattcattagatactgtcagtcaactggataatatgtgttctcttttgaagtttttaatagccaaattcaactatttccgataaggtccaagttaacactcatttatgaatcttttcagagttacctgatactgctacataatgtactgctgtttacagggttcaaagttggtgttgagaagcacagcacagaggtcattgtgaaaaaaaaaatctggaagcctgcttataaattctggaatccaaggatactcgctactaaagacaactcaggtatttcttcaacttgcttctgtgattctcaggccatcggttacatgagtgctacagcatgtttatggtgaactttttgtcgtctctggttgagtttgcatggttttgtatggactactgttgtaatgcaccgtagtgacctagttgcaatgtaccagtataacatggaatgctgtggctgtttgtgttgaagctgagtgcctatctcttttccagattagatgctgtgaaaatgggttggttgggtggcgtcctcatattttggtgctcagattgacttttcttgtttgtgggtattatgtttgggatactggccaagggaaatggacagaaatatgctagctttagtggacagggcctgtcatcgtatttgtttattctattgttaccttaagtccttaacatatatgttcttctgttaaaaaatgctagcctctgattatgccttcagccctccatggccttgaagtgcctgttgtcctgttggattctgtacatttcttgtggtgtagtctggcagcatttcttttgtaatcaactcagatgcagagcctggcagcctgcacggcagcatatatatgcttctgcctctaaagaataaaactaacgcttaaacctggttaggcagtatgcttcttttcatactgtctttgttttatgctgtgtgcttcttttcttattcagtttggcagtgatcattgaactgtgtcgtttctgtacttaagcaccctcccttgccgccgtccgctaccatggctgaaatcgaaactatctccagcctcgccgacgccgacgatgtcctggaaaacagggggatcaatcaggttgaagggatcaatcaggttcaatttcgtctagacgagcagatatccctcgtagctgcaacagaagtcaaggtgaggacccgtcctggaaggctcggattcaggttgttaaatcctgaactcatggattgcaagttccaaacaaaggtcaagctggacgaggcctacgagcggatgttcacagagtgtatgattgagtgtgaccaagagctcgtccctctcgaggcccacatcgccgagctgaagagactgttgctgctgcccaacaacgagattgaagatatcggacccgatattatgcagaggggtcgaggattgcagcaggtgctgtatctgcatccaccggtataactctcttttcatgctctccccctcttttctaaatcgtttttcagtttgtgttttttttttcagttctctctttttctgaatattatttttttcccagtttcctttgtatcctgagtacgagtatcatcctcctccgcaaccgcaaataccgtaccaaccagcatatgccactgctaaagaaagagagaatgcaagatctcgagaccgccgtgctcagagagcgtggtggcatgccaaccttactcttctggagactaagaaaaagatcttggaagggaaaagaatagacctggagagagggctgaggtctgaaatgaggaaagctttggagagtcaatctgacctgggggccggttataccaactaccattttcgccatagataggtaagcctttgtgtgtttcttcttagatctgttggtcttcaatcttcacttcttagaatcaaatcgaatggatggatggagggatgaactgggtggcggttcttgggcatggcttctgctttcgattgaattgttttttggattagggcctgcggattttaggatgtttatgtatatgatgaattatttgatttgagtgatataaaacactatgaattttaggataaagggtcctgtgttttcaatttgctcagcagtatgatcagtggcttgggaagcgaagctggccatgctgttgtcaggtgtcccttgcagatatctgctgcaggtaatgagacaaaaaattaggtgttcagattaggaacaatgtaggaccgttgaaccagagttgtaatttcagaaaataggcgctcaaacatgatgcatctatacttagttagagcccctgctaaccactattaccgatgctttagataaatgctgctgctattttttttcattgggatctattccgcgactgttttagtaattctactaattgaattgaaatttcccaaaagcaatccttctgttaagcttggttggactgaatagcagttttaccttggccatcagtgctcactttgagttgtcagataatgaatagctcatcactgatttttttttcagaaaaaaggtgctcatatatgcatgcatagatctctagaaaaaacggctggataatgaatagctcatcactttcctgttgatttgatgcaggggaggaataagctggttggatgcatgatcaatgggaaatcatgtttagttttctccctagatcatgatgctttgaactcaagccctgtttggattcagctataacaagttttgttgtgcaagtagtcacgtgatgtaacaagttttgcctcatgttacagattttgtaaggatgcttctctggtagcaatttaatatcatgttacagatttgcatacttcagttgaggtagatgtgagaggcgacgtcttgaattcaaattgtagcaatttttcagttgaggtagatgtgagaggcgacgtcttgaactaaagcagcctggtttgagcacctgcaaacaaaaccacacctccggttgtcgatcaatcagcttctagatttgccaaaattaatatatgaaaatcttgcaatggtcgagcacgtttaatacacgtctaataaaaccattttctatatacagacttagaacatattgtttttctcaattttatcaaaattatctaattgattgttgtggtttgtcagatacacattaaaacaaaaccctgctgaaattatctgaacttcgcattttaactccacctgctgaatcacggtaaaacaaaaacatttttttctctgaaccttgatgttcatcgccaaagttgggttaggcagtatccaacacatgggcctaaattatccctttaggcaatatacatacatatatacatatgaggtagtgtaagacaaaaacattttttctctgaaccttgatgtttatcgccaaagttgggttaggcagtatcaaacatatgggcctaaattgtccctttaggcaatatacatacatatgaggtagtgtaagagataaaggaatttggagagcaacaatatttacagtgctctgctgtctaaacaaatcgttccctgcttcaattatcttgagacatgtggtctatactccgtccatttcaataatcttgagacatgttgtctataatcagtccattacaatgctctccagtctaaacaggtgaaatggattgaagccataactcctactacgagtatatgaaataagagtattaacaatgtatatatttcttaccaacaatattgtagatatgcaataccagcatgacggcgtaggcagcgccgttgtaggacacgacgtcgacggagcactcaaagtagaccggggccaccggcgtcggctccggcgcgccacccaccccgacgccgccgtgagcagagagagaagagcggggaggacaccggcgccggctccgacaccgccacccgacctaacgtcgccgccagggaagggagaaaaaggggtagagggcagtgggcgccggctccgatgccgccgcgaggggaaggagaagaggggaggggtgcacgcgacgtcccgtgcaagggcggcggacaatgaaggagaagatggtgccgcacccgttggcctccgccgctccgtcgctagcgcctatggtggtcatcctcctccgtcgcgccgtcttctccaatcgccagatccgacggcggcgttagatctagccgcgggcgtagccaccgcgccagatcgggaggggagggccgccgctgccacctccctcccccctcccgacagagccgccgctcgtccaccctccaagccgcctccgccctccacctccgctggatttgggaggagggaggggagccgccgctggatccacccttcgcgtagccatagcctagagccgctgccgccacaggccttcggtcgaatccgcgccgagagatgagaggtgggatgggaaggggggtttagtgtaggacgttttgcagaaaaccccctatggcttttacgtttacaacgctacctctggaagcggaatttttgtatttttcatggaatacaagaggttatacgtaataaatacaacgtgatgtcaggtatatgtgatattatgtgtaaacacgagttttttgcaagacccccacaacgcccaaaatttcgtttgaccggttacagcttacgagcagtcaacgtgtaaagcaacgagatagccaaaaaaaattcgaaaaacggagaaaaaaggaatggttaggctggtaattggctgatgatatgtaaataaggaatggttaggctggtaattggcttatgatatgtaaatcactttgttgcaacgcactaacattatttctagtaatttaaaagaaaaattgttttaaatatcagtgtggattgtagagtgaactttggagataatagggtttcgcggcccggacaaaggaggcagtagggtgcccgaggcggcagacatacggatcgggagcaaaaccacatactacgtcaacacaggaaaacttttataaagcgcggcaccggtgacatttgcagcagctgcaacacagcatagatatgacatgatattataccatgggctgtcaagaccagcttcttagcacatctcacaagtgcaaggcaatgctcaatctcacaagtgcaacatcatgaacatgcgcgtatcagatagcacccaagaaaaataggataacatgcaaaactatattaacaggagtgacaagttagtgtagccagtacaattaacctgaataaatgcattctcatgatacatatgtacacaattttaggccattaagagaactcacggttgccacacacttcagcatttaccagagtatcccatctattattccaaaggtacagttgtctgaaattttggaatattaaggttcacatggcagttttcgaagcacgtcagcatctcggatttgatacagcggctgcaaaccagaaacatcacaaatatcgttttaaattaacagcagtcatgcctgtagagacattgcattcagtaaacgtggatgtagatgctcagattcaagggtctttttcttttattgttggcaaaaatcaagatgcatggtgtgcagtggtgactgatgctagttaagtttcaagatgctcacgtttgatgggagcaaactaagtgcaacctacatatagagtatagatgagacagcggcgtgtataactgatcaaaagcagcatataagtaactttaccagatatgatgactgactacaatataaagatgcatgtgaaggttactaaacatgaagctcataatgacaatctaataaagctaaaagattaccagaatttcgccgcttaaccctagggccttgatagaaatctatggaatcgctgtacttttacagcataagctttcacaaaatccgccttttcaggtatggttccactagatgaaactctcctctttcttatatgaaataagaaatcttcagtatcaaggacataggaaacctgcaaataagatattgagcattacaaaatacaacattaaaatggtcaaaatggtatcatgatcaatcaaaagggttctgctagatacaatgttaacttgcaatggggcacaaaattctcgctaaaattatgagtacctttgaggatttgcaggatatcttgcattcaagaccattagtaaccatgaaagcatcaatggccttcaaagaagcttgagagtcatcgtttcccccacgcttccgtttattcctgggaaatgatgtccaacaatgaaaatagccgtggaaagtaaaattgagactccaacataagatcaggaaagtacctcccaaggaagatatcgtcatacaatttagtattagaaatacttgacagatactcattatatagataagacgaaaaatttggatcaattgacactgcagttactt

SEQ ID NO: 6836 - DNA, 3417 bp, Oryza sativa
aactgagctacccgttcgtccaaggacgtagaacgtgtacccgcaccagcgatctcggccaacacctcccgagtaccagcctcaagaaggcgccaggcctccgccagcatttcctcctctgacaagggagcagcgggcggcgacaagatcggagatgtcacgaggacggtggacggagcgggcgttgcggcggtcgcaggcgacacgctggtcgcaatatggtcctcgctttgtgccgaggacgctggagagggcctgccaataaaaacacaaggagtcactgtcgaacacaatataaaatcggaattccgagaacgatagcttgagatttcacttattggtcctggccttcttcagcaacttgggagcaagggggagatcgctagtgccctaaataaaaaggtaaataagggctatgttctcgtcataaaacaagatatcttcggagtaaagagtactcaccttggggaatgagaactggtgcctgggggcagtgtcacccactttctcatagtgaccatgtgttgctgccactcggccccaatccgaccactgtcgttgtctcctgagagactttctccttcaaggaggcggcggcctggtgatcagcgagtggcccgatggcatccaccagggcagtgccagcacgagatgaagtcacttcgcttcccaaacctagagaagacaagttgacagaatcgaattaggcacttacgttgataatggcggacttctcggcgtccgcgaactcgtaaaaggtgttggacggctcaccgacaccggacgccggacttatcaacacttaccccacgcgttgggacaccgtcttgtcgctgagatctgcgaaaggagacaggaccatttcaagataatgaatactacgacatcaaaagaagaacatacacggtgacgcgagaacgagtaccccacgtcgagatctacgtcacgtcggcctcccccctgtagtcaaaggcagggtgagcgtgggcttggagcggttgaatccgccgggcaatgaagtcttgagcgatttcatacccagtcagaccccgttctcgcaggctgctgatggtgttgacaaattcttggagggagggagtcagaggaggcttggaggtccaatcctgagaacgctcaggcttgtcctctaggacaatcaaaacagggccgatatcttttatttcaagaaagaaccattttgacctccattagctccagggtgaagggcactagaaggggatgtaaaccgccttcatcccatctcagagacggaatctacagcatccttagattatgttggactccatccaccagagctcatagtagtatcggaagagatcaaggaatggcacgaccccaacataggcttagcaaagatgagcaaaaatgctcagaaaagcgatggagttggggttaaggtgcaaaagtgaaaggccgtagaagttcaagatcaggaggagaaattcagatggtggaggcaagaaaccacaccgaataaaattctctacaactaccatccgacctaagacgggttggggattagtacctccttcctcctgctccaggtgttcacggccggggagtgctccttccacctacaacttcttcatccctgcggtgtcggtgttggacgccccgagatccatcgccatcgtaggaccgccggagaggaagaagaaagctagggtttttcaggaagattggagaatccgagagtccgggcgcaaagagagttggaaaggctttttggcaaacggacttgaaatggatcaaaaactaccttatataagtgcactacttgacggtttatttttcgagggaaggagagatattgccaccgaaaatttctgaagcccgttactgacagattgattagacatcaaattaaattcacttatggacggttgaacttcctccaatgttatcgagaactcaagccaaaggactaacgaacccaccatagtttacgaagccgaaggactcaagccgaagccaccgggagatctcgtcgatcaatctcgacaaggatctcgccggtatcgtcggatttatctgttccctttgtactctgtggctttccatatcaatcccatataaactagactagtaatattaccttacgaggggcctgaaccagtaaaatccttgtctttttgtctgctttgatgtcatatgacgtagatcctcgtaccaacgtaccccaataccctatttatcctgtctacgagtatccctcatcgacaagtatatcacgggaatatcgggtaatggataactcatctttaattgtgctaaagaaaaaaaagtaaattacagattgtactatgtattcttaaaagttttcatattatgtcatcctttaaccattcttttcatttacaaaacaactaactttacatttcaatttggaccaccctattccatccatctccaagtctgatgactcagcaaccactctgcacaataactctctctctctctctctccattttcttttcccctttgatagttggggaaccgctagatccagcaagaaggagcccggatctagcgtcctcgctcttcttcatcgggtcgactcctacctccctaagtccctacaagcccgacaccaccgacatcaatggcgaccataacaatagtgtgcactacgagaggggaggagaaaaaaagggtggctcatggagaaagagcggtggtggcggtacgtggagtgacaattagtggttgctggtggtatgagaagtttgtagtcgacacaatcgctaaccgagtttgttattttttgatatgtgggtcaccggccattataaagaaatagatagttttgaagtaataaaaatattgagataaaggtgagagtactcgtctatgatacgtgggttcttatatgtctatgacatatggtccagggggaaattcttaattaccaatagtactccgagtatcatccccttcccttggcggcgtaaaagaaaatcccccgtctctttggcctcgtttgttagggctccaaactccaactcctagctctaaattcctactccagtgggagctaactcctcgggaaagagaaaattgcatatctaccatcgcataagatgggattcgctcaaataccattacttaaatgggcttcactgaaataccatcctcgaccaaggtgtctttgctcaaataccatcctgggcgaaaatgccccttagctcttcttcttcctccctccctccctccaatcgctaaattggtcgccggcggtccgtcgctcatgtcgtcattggccggcgagtcaaagcagggtggcggcgtgcgacggcggccgaccgagacgacacaagcgaggcggcgcgcgatggcggccgatgagtcggggcgtctcctccccccctctctctctctctctcttgtcgggatggc

SEQ ID NO: 6837 - DNA, 1152 bp, Oryza sativa
caggcgaaagcaagaagatttgaaactgttgtgcatgatatttaaccaagacattagaagattggccactcaggtatgtgtccagaccaaaataattgacagggacctgaaatatagtgaattccatgcattgacttgaattatgcattctatttaatttgactaggttatcagagtgaaatggtcactgcatgctagggaggagataatttttgagctgctgaagtatctaggaggcagcaccacaaaatcattacttgaagcgataaagaaagacgcaagacaaatgattgaagagcaggaggcagttcgtggccggctcttcaccatccaagatgtgatgcagagcaccctccgtgcttggtcacaggtatgagctataaaatgaccttctgaatccttgtgcattctaaatgaacatcaaatccttatatcctactactgaacagacaatatgacactatgaatctagttatttagttagtgatagctgaagtgtcatgtgtgaaaactaaaaactctgttggtgtgctactcaggagaagagccttcgcattacgcataacctgacaattttcggtgggtgtggcttggttctgtccatcatcgccggattgttcggaatcaatgttgatgggataccaggagctgagaacactccctacgctttcgcgctattctccgcgctgcttttcttggtaggactcctgctgatcatcgtggggatagtctatttcggactgcagaagccgatcagcgatgagcaggtccaggtgaggaagttagagctccaggaactggtctcgatgttccagcacgaagccgagacacacgccagggtgaaagaaggggtcttgaggactgacttgcctcccagagctgccgatctcatatgtgatgataatggtgattcacgtctccttgtttgtgactgttgaagttgaaatagccaataggtctagctgctttgggtcttcagttttttttccctgtttttagcttcatttccgttttgcatggtcgagcacgatctgggctctctcgccttcccggatcttgcgcagttaagccggactctcgtcgcgcgcttatgtaggagtccactacattttcagttgtaattcccttattagtagtccaatgaaataatca

SEQ ID NO: 6838 - DNA, 1467 bp, Oryza sativa
cgattctgttccgaacaacaacctaacatctcttgaaactctggacctttcacttaataatttcaacaagaggattgcacccaattggttttgggatttaactagtcttaaacttctagatatctcagatagcggtttctatggaccatttccaaacgagataggcaatatgacctctattgtggatattgatttatcaggcaataatcttgtgggaatgataccatttaacctgaagaacctatgtaacttggagaaatttaatgttgctggaaccaacatcaatgggaatataacggaaatattcaatagattgcctagatgctcatggaataagttacaagtgttgtttctaccggactgcaacttgactggaagcctaccaacaacactagaacccttgagcaatttgagcatgcttgagcttggtaataacaatatcacaggtcccatcccactttggataggagagctcagtaatctaacaatgttgggcctcagctccaacaatctagatggggtcatacatgaaggccatttatcaggcctagaaagtctagatttgttgatcttgtctgataataaccacatagccatcaaggtgaattctacctgggttcctcctttcaagcaaataacagatattgaacttcggtcctgtcagttagggcctaaattcccaacatggctcaggtatctaacagatgtatacaatcttgatatctcaaacacaagcatatcagacaaggttcctgactggttttggaaagcagcgtcatcagtaacacatttaaatatgagaaacaatcagattgcaggtgcccttccatctacattggaatacatgagaacgatcgtaatggatctcagttctaataagtttagtggtccaatacccaagcttcctgtcagtctaaccagcttagacttctcaaagaacaatttatccgggcctctaccatcagacataggagcgtcagctctagtatcacttgttctgtatggcaactccctttctggttcaattccatcttatttgtgcaagatgcagtctctggaactgttggatatatcaagaaacaagataactgggccaatttctgattgtgcaatcgattcaagctcagcaaactacacatgtacgaatattatcaatataagcttaagaaaaaataacctctcaggacaatttccttcgttctttaagaactgcaaaaaccttgtttttctggatcttgctgaaaatcaattctctgggacactgcctgcatggattggggaaaaattaccttctttggtattcttacggctgcgttctaatagctttagtggtcatattccaattgaacttaccagtctggcgggtcttcaatatttagaccttgcacataacaacttttcaggatgcataccgaattctttggcgaaatttcataggatgacactcgaacaagataaagaagacag

SEQ ID NO: 6839 - DNA, 1457 bp, Oryza sativa
ttgttcactattgaccatatactctggttatggttttgcagagggcaggcagaaaaagagttcaaggttgaagttgagtctattggtcatgttaggcacaagaatctggtgcgacttctaggttactgcattgagggaagctacaggtaaatctgtgttttgttagttagcctttatattttcagttgatcgttcatggatctgcaggaaattgtatatttttcttgcagtgactgctacaatatgtcctcttgctgttacacagccttcaatgtcacaagtcaattacaacttaagaaagaaacaaaatgttcaagtctggcagctcgacatggtcatatttaatctattcagcaaaatatattaactgataatgataccaagtactggtataatggttagaataatctgtctttttagatggtttatgtacttaattatgcaaagcactatagaactcgaaaaatatgcaaagggcccacttcaaagcctagaagtgtctttaactgttatcctactctagtatctgcatatcgtgtttccatagatatgctttggttctaaattttctgattctgaaccatttgctgcaatcctgaaatcttaagttagcatccaggtaataagaaacctccacaacgtcagcttggtctgctgttaactttggtacgcaatatttatccatggacctgatatattgctagagttctagaaatggagaacatttaagaggatctacccgccttagtaaaaatgggtgttcggaatgtacactcaccccaccagctaactgaactagaagtttctgatattgatagattgtctgctttcttaatcaaacacaatcatatactgtataaatgtattactacagaggcatattcatagaactatagaagtccattaacctatatcaaactaagcttttccgtgaatctgttaggtttacagcaaaacatcattaggcttctcacgttgcaggatgcttgtctatgaatacatcaacaatgggaacttagaccagtggttacatggcgcaaggagtcaacatggtgttcttacatgggaagcccgcatgaaaattatccttgacattgcaaaagcgtaagaaatgaactatcagtgattctgatttctccctttgtatatgagaccaagcataaaatttgtaaacggaatgctgtgcagactggcatatttgcatgaggggatagagccaaaagttatccaccgtgatatcaaatcaagtaatatccttattgataaagatttcacaggaaaactttctgattttggattatctaagctcttacgtgctgggaaaagccacattactacccgagttatgggaacctttgggtaagctactaagctctcgttttaagttgtaattttcctgattgagttgcaggggctgtataaaatactgatcaacatgaaattcatgtttaactatc

SEQ ID NO: 6840 - DNA, 1667 bp, Oryza sativa
catatgtatgtgcaactcagtgataattttgaattttctgatgttcaaaatttgctttacacattttaacatcttgaaaaatgctttttaaatacttaatgtactctgtcctttccaggtttatttgctaccaaaagtttgccctggcaatggattattcttttattcttgtacttacctgagctatattaatcggagttttttttttatttgtaggttcaagaaaagaaggtcaaaaaggtatctgagatgaatttgagcccttcaaatgcatctgcaaatggtagacctgctggcagtaatgctagtggttcgagcgcatatctcccaaatggtggcatttcaaaacctgttggactcaattcgcttcgcctgcctgtggtggtagtaccgaacttaaaattttcattaccacaagaaaatctattcgaaattggtctcagacagtattattgagctaattcctgccatttctgttgtgcctagcatgcatcttcaactattcagttgtttttattgcctcatatgtatttcctgtgtttattgtaactttatttctttgatttgttatatttacttaactttgtatgacaggttacaagccaagaaacaagtctttctgcaagttgccgaagagtctttacgcatgcacatgactaccatataaactctatttcaaataacaggtcttctacattattaatttttttatttagttgtataatagatattatttgaacttgttgctattgaatatgaccacgaccattagctccaaatgagtgttgctagaaaagggccttcttaagggcaaaagcttatttggtttcaccttgcacatgataactgcatctagcatatttgtaaccaaccaagccacctagcttcacagtttctgcatatatgataaatttgcatcccacaatatgccaaatttatttgctctttgacataccagaataaagttctcaatatccttttagggactctttgtttgataatctcaatgtaaaacataccttaatgtgccttaactagtacggaaatcagggtagcgaaagcctaacagattcatatctactacctctgtagtaatattgtatagttttgggaagttcatctgaaccctgtagcccaagatcactatagtcaattcattctccacaggagatttttgatgcttgtgccgtatttgtgtgcgcgctgaaaatttgtcatctgtagtaatatcgtctgtgattgagctgtatgccatcagctatagataatttaatacaccacctcctactttccatgtgtgtttgctatatattttgctgatgtgcatctcatatacattcgattagatgtaatgtaccctttcgagttttatgtagtgacatattgttgcctgctcttttttttttcgacagtgatggtgagactttcatatcagcagatgatttgcggataaatctttggaatttggaaattagcaaccaaagttttaacattattgatgttaaacctacaaacatggaggacctgactggtataactttcaaatcttcaaactcttagctatgctgactagtgagtattaacatatacagccttttctcacacaatgggaaaaaaatgcagtcctatatagctacagtaagcaaaattatgtgactgatgttcaa

SEQ ID NO: 6841 - DNA, 1923 bp, Oryza sativa
agacatattctcagtcgtgattacatgacactgaaggtctgtaccagtttacctgttgacatccctttactttttattgatcttagtcatcaagaagcattgattatgttggatattacttggctacatcatgcttcagttatccctagacaggataaccagattagcagggctacctttagatgatcatctacatatctgcactgcattgcatatactgcctcagatgtttcatacttcatttttcactattatggtctctatattcattgtaactgctatggtttacattctgggaagctggtgatttatactattttctgtagccatagaggtgttatttttctgcagctgttacttcgatgtttttgtgttcatataaattttttccttttgttccagctttgggatattaacatgaactctggtccagttgcaacattccaggttcatgagtatttaaggcccaaggtaattctgtacatgttaagatgaataatccatacttctttgaggatcatgaacaataaactatttcactggagtaactctgattcatgtattgcttcctgaaactgcagctatgtgatttatatgaaaatgattccatttttgataagtttgagtgctgtcaaagcggagatggattgcgagtagcaactggttcttacaggtgttgcttttgctcatctcagttatggtactgctcggtctccttcatgtgaactaattgttagttgatgtatgctctttcagcaacatttttcgtgtgtttggttgtggcactggtagcaatgaggcaacgacacttgaagcaactcgaaaccctactaggtaatccttctcctatatgaataatggaagctaactttatactgtacacatctgctgtttatttctgcctgtaaaactaactataatagtgttcatctgatgcgcctctaccagtcccatttgctccaatgaagtggagtatttcaaattcagctattggcactaaccatcttttccactcttatttgtctaatgtgtaaccaggaggcaacttcagaatcccacaaggcctgctagatctctaagcactctgacaagagttgttagacgaggttaccttcatgatgtgtagcatgtttaactttgtagaagctcgtcatttcaactactaattttgaatccttatgcaggtgctgaaagcaccggaatagaggccaatggaaattcctacgatctgagcacaaagttgctccatctcgcatggcacccatccgaaaatttaattgcttgtgccgctgcgaacagcttgtacatgtactatgcataaacaaggaggggataagaagagcgacagtatttttggtagctgctcccggtgagaagtgttttaacccctggtgcagcagagcagggagttgctggtagtggtgttttttttgggccggtcacatgctgttcttttgagtgccatatagagctgtccagagtccaagaggaagtgactcgatcattcccgggaagcagcttgattctgattattttttttcgaggggaaaggcctgtctttcccttataggttcatttagatttaaaagataagatttctagttcgacatttggaaggaacaagaactgttgggaatctgtggttagatgataaggggatgatcttccgttgtattcatgttgaaattatggtcttgtaacttcaggacagaggcactgaagcttttgataattttgtttttacaaaagtgatatttctttcctatgtgccgtagcttttctttcctaccgaatgcctgggtagcagtccgtcgttatgcgacgtaatgcaaaatggatgagcatcaaaaccagatgcagacatgtgccatcttttctgctctcccgacttgtctaagccctttatttgcttatgatttgtat

SEQ ID NO: 6842 - DNA, 3066 bp, Oryza sativa
gccctcctcgcccccgtcgtctccgagctctaccactccgccaagccccggagggaggccgaggccctggtcgaggccgtcctcagctacatcagcatctgcagcagccgcgccgcccccgccgccggcgatggcgccggcgccggcgccgacgccgggagcctgctaccggccttcggcgagctggtgaaggtgtggagcgtgcgccactcgagggacaggtgcccgttccaggtgctcttccctcttgtcggggaggacgccaggcgggagctcatgagggaaggtgcagcgtcgccttcctcgccggggcggtggttgccgaggcgttcctgctcaggctctgcctcaaggtgcagggcgcggcaggcgcgtcacgcgccgagctgcagaaggagctcaggatctgggcagtgagctccatctcggtcttccagaaccagcaattcttcggtaagacttgatatgatgctacctgtgtttgtatcatggtttctcttaggattcaggtgcagtgacccgattgtgatgaccgttgtgctgatggatttcgcaggggttctgctgaacatgctcgtgaatcctccgctacctgtttattcactactggtacgtgtttcatgcttaatgattgatttgagggatatagttagtgtatgactaggctagcaacataggggtagtatgcactagcctcttaatgcatttcggcatcatgaacattgtatttccacagtattgtcattccaatatgtatcacaagaagcctaggatttgaaattaacttaataagctcatgccttgaattaacaagcgggtgtaagctcaggtttatcattatctgttgtgtgtttagttaattagcacaaattacctttgtgaaataagaactctgcaacttgttcctttgtacttcaattgtgcttggactcaggagtctgtgttaacttgcggaaattaaagaggagaacagtattaggaatattatgtttcccaatgctggtgttactgtaccattattgctgtcgatgtatcctcaaggaggctgaattgggatggagttctatctcatctttgggatgagcaaacaggttgaagtctgaactgtggatattcttacacccttttattcaattgataatatgatattcactaggaatgactatgctgtgttgtgagaagctagcaaacttgatgttgcctgaacaaatattattcgttatactgtttacttgtaaggaaatgctgatcatggccatattatttactccctaattaattaagttcaccaatataatcatcatatattgttgcgaaactaatttattttgtatatcgcacttgttcttatgtgttccttgagtagatgactacttgatcagtttccttcatttactctggtaatatttcatttagaagagtgagctgttagttattagccatcaaatgtgggttgtgacgatgccattgctgggattttgtgccatcttattgatgctgcatattggtttcttatgcataattcagagtgctgatgatgaaatcttggtgagagatgtcctttatgatgctctgattttggtggattattctttcattaacaaaggagcaggagttgatcaagctgatagctcccttttgcccctttatgtgtcaagattgcttatcactcatgatgccatcaatgacgccaggtgataaagtgtttgtgtaaccggaacttagctgatgttagaaatttctcctcattccatttccttctgacaggagcaaaggtgatcaaggaagggcgatgtctttcatgaatgccttcttcacttcaaacatccccacttattttgccaagtgcgctactagtcaagttggcttcaaccaactcagcaaaccagctgctatcacacctcaagctcttctcagtatgtattgatatagcatgattcacttgattttcagtagagtgggttgatgtttttatagagtaactaatgaaatccctatatgtttgctttttgacagagtggcttgtagatctggaagataagggcttcaaagtatttggagagaatgtttccaggattagggagaggctgatgtatgacgaggtcaagaatggttaccagagcaggatgactcactcagatgctgaccttttcttcattgacaagcagagcggtggggaggttatggacacaagagctggtgaggatgaagaagctgttgagatggaaacagcagacaatgcttttatggctgctgctcagtctatgaaggcgatggctaatggcatgaggaaaaggaaggattgcggggctgaagacgcaaatgtggtcaagtttgtgaagtacaaggttgaagacagctcagtgaaggattacttcttgtcggcaaataatggtatgagcagtggtagtgaggtagagaatccacagtctgatgatgagatggaagaaactgattgatggatagagaggaaaccatccgctaatgcttacttgggagagtcttttggcgagtctggagttgggacgattgctgttgcttcaggttccccttctgtaggatgtcatgcagcttctgtctggatgatgaatgaagcgggattctaggataataatctgcaacgcagagcccgaccccagccaggcttaccgatatagtagtaactgcttagctaacttagactcgatgcatgatgctacaaactatatatcatgttctcttctatatgcaatagagactttaaaatgtagatctactttaaagacttctgtaagagaagagtaccttttatgttatcccacggaacatcttttaagttagtgaaatcttagcatttgtgtagctgttacgattagtgtttctacattgcaacattggcatgttctgtgtagagttgctattttctgtgacgatcatggtgaagacgtgaaatatcggtggattgttcggtaggacgctcgggtgaaaattgaggtgttgcatcacaagttacgtttagatgttgtagagtagttgcttgtgccgtttagatgggaatcatgtgatccctttaaagcataaaatgtg

SEQ ID NO: 6843 - DNA, 2184 bp, Oryza sativa
cctccgactccgagccgaggagctccggtcctacgccgcggcactccagggctgcgccgccagccgcgcgctccgccgcgggaaggccctccacgcgcgcctgctccggtccgggccgcgcccggacgcgttcctgcacgactcgctgctcaacatgtactgcaagtgcggccgcctcgcggacgcacgcagcgtgttcgacgggatgccgcaccgggacgtcgtcgcctggacggccatggtctccgctatcaccgcggcgggagatgccggtgctgccctccggctgttcgccgagatgagcgaggaaggggtcgtccccaacgggttcgcgctcgccgcggcgctgaaggcctgcacggtgggctcggacctggggtttacgcctcaggtgcacgctcaggcggtgaagctggaaggtttgcttgatccatacgtctcttcttccttggtcgaggcttacgtgagctgtggcgaggtggatgttgctgagagagccttgttggactcgccggtgagaagcgatgtgtcatggaatgctctgctcaatgagtatgctcgggatggtgactacgccaaggtcatgcttgtttttgataagctggtggaatctggtgatgagataagcaagtatactttacctactgttctcaagtgctgcatggagctcggtcttgcgaaatctggtcaggctgtgcatggtttggtgatcaagagagggctggaaacagatagagtgttgaacaattgccttattgagatgtattcaaagtgtctgtcggctgaagatgcctatgaggtctttgccaggatagatgaaccagatgtggtgcattgcagtttgatgatctcttgtttcgatcggcatgacatggctccagaagcattcgatattttcatgcagatgtcagacatgggagtcaaacctaatcaatatacatttgtcggcttagccatcgttgcatcaagaactggtgatgtgaacctatgtcgcagcattcatgcacacattgtgaagagtggattttctaggacaaaaggagtgtgtgatgccattgtaggtatgtatgtgaaaactggtgctgttcaagatgcgattctcgcctttgatcttatgcaggggcctgacatagcttcttggaacacacttctctctggattttatagtggaaacaactgcgagcatggtttgaggattttcaaggagttgatttgtgaaggtgttttagcaaataaatatacttatgtaggaattttgaggtgttgcactagcttgatggacttgaggtttggttgtcaagttcatgcatgtgttcttaaaagtgggtttcaaggagattatgatgtttcaaaaatgcttcttgacatgtatgtgcaagctgggtgctttacaaatgcacgcttggtatttgaccgactgaaagaaagagatgtgttctcatggacagttgttatgtcaacatatgctaaaactgatgaaggtgagaaggcaatagaatgcttccgctcaatgttgcgagaaaacaaaaggcctaatgatgccacattagctacctcgctaagtgtttgttctgatttggcgtgcttgggcagtggcctccagctgcattcatataccatcaaatcaggatggaacagttcagttgtttccagtgctttagttgacatgtatgtgaagtgcgggaacttagcagatgctgagatgctatttgacgagtcagacacacatgacttagttgaatggaatacaatcatctgtggttatgctcaacatggtcatgggtataaggcattggaagccttccaagagatgatagatgaggggaatgtacctgatgagataacatttgtgggtgtcctctcagcttgtagccatgcaggattacttgatgagggaaggaggtacttcaaattgctgagtagtgtgtatggaattactcctacactggaacactatgcttgcatggttgatattctggccaaggctggaaaactagctgaggctgaatctcttattaatgagatgccattgaccccagatgcatccttatggaagaccattcttggagcatgtaggatgcatggaaacattgagattgctgagcgagcagcagaaaaattgtttgagtcacaaccagatgatatatcttcttgcatattgttgtctaacatttatgcggattt

SEQ ID NO: 6844 - DNA, 3979 bp, Oryza sativa
tcctgcaccccgatcgtggagtaaagaaggaaccagggtgcagctggattgaaatcaatgggaagttacatgttttcctgtcacaagatgggtgcgctaaatactaaaatttgagtggtgtatttcacccatcttggtcctgcaatctgaaatgtcaatgcagtcacaggccaaaaaccggttccaggtattatctagttctgatgaatcttttttaagagaattatcattgtacatgatgcgtgttcagtatccaatctacataactctgctaattggtgaactgttttatctgatttaaacaggctaatcttagggtaaactatactgctggaaacgtagatttgtctgaagacttatatagttgcccacttaactggcagtaactcagtaagtctcaatccatatagttcaatctcatgctatccttcactttcagcaaatctatctgttaaatcattgcatcctttttattacagcacatatcaggataaatgcagactgaggagagttccttagtcgaggcatatggaaatggtaaggcaatattgcctgccattgtgagtaaagaattggttacagattaatgtggcacacgaagagcctgtcctacttcagtggatactggattgctcatatcacatttatattcaaattgggatggttgtgcaggtgggtgatcaacttgttgaccaacttaagtaaggtctgttcgagttcctcgccattattccatggatgaacctcggccttgagaagctgtttgttgctgctgatgagattccagagggggtatttctcctttggcatgacatagtccccttcccctagcttaagggaggggcaataatctcctctgccatcaccaatgtagatgaaatgccttttaccattggccgtcgcctgaatcctctcaattatcttgccctgcacatgataaagctacactttagcgggggaccatgcatgctttccattattcatatccctcttcatctgaataaatgcactaagattttagcgcaaagaaactttaatacttataattgttgaacaatgcaatattcttatttgttatgtgtaagattcagattgcataatccatcacactctttgctttatccatgatctatctatactgtttcttttggacagatgatgctgtttcttttgtctccatcagccacgtgcatcggggcggacgcgctaaaggctgacatgaaaaatgtgaactgacctgtcaatctgctggtgtcctactgtccataccttgcacatgttctcggggcagaggctgcatccatggggcgagctgtcgtcggggtcgtggaacggcgagatcctcagcctgccgttgccgtcgacgcgcgccgggttcgtgctgatctccgagaagcatccgaggacgccgtggtgctccagcacggtctcgatgaagaaggcgttggcgtcgctcgccaccctcaaatcacacctgcaacaaacaacacaacaggtggaacacaaccaccaccaccaccaaagattatccatggcgccatcagagctttagaggtggatggattgatcattgatggtgcggtaccctaatgccgaggccgtggtgatggcggagaggacgtgggcgtcgaggggggcgctcttgaggcagtcgcggatgtcgtcggccgacctcccctgggcgtgcagctccaccatcatcctgtcctggaagaagccacccatcctcgcaggttcaatctatgcatgttcttgtgttctgtgtgtgtgtgcgcgcgcagggtgatcgtaccatgagggggttccagcgcatggtggggcggaggcggcgaaaggcgtcggaggcgccgagcttggtgatgacccagtcgtcgctgtcccactcgatgatggtcctgtcgaagtcgaacaccaccaccaccccgcctccggcggcggcggcggcggccgtgtcgccgtcaacgccagcggccatctgagctgctccgacggtgaccgggggaaggccggaagggtcaagatggagtcgcggtcgccagacgaacgcacggcggcgcctgactgacgccaacgtttgcaagcaaatttcctttgtgacttctttggtggcgtggcgtccgtgtcggctttatataggcaaggccgcaaggcaccccgcaccccggtggtggttgttgggccggtggcgacttgttagggttctactctacgcgtccaccacaccaccgcaatccgcaatatgacctgtcctgtgccgtgttctccgtttgcccgcgctgccgtctccaggctgacttgcctgcctccctcctccttacacatgtttgctctctgattctgtatcccatggtaccattaattagtagatcgatcgtggtcatcgatttttagtacatctgtttagcgatcatctcttttatatttaatctatataaaagcctacctggaaccgacaggtattgtccgtctatagtaactacacgtcaaccactgctactactgaggattggaactgggaagtgggaatagcctccatggacctattaaattgagcatcaatattctttggaagctctgagtttctcgttgttgctagtgctgtagacattatttttatggtttgaccgataagatgcaaaggtctacctctccgttccaaaaaaaaatcaaactctaggtttaaatcaaaagccagtaaaaataacattcatagacatagtatagacataacaagcaaagaggcaaaaaaaaaaaaaaaaactaaacttaaacttcatgtcacgattacatgatagtagatgtcatgcataaatttgtggtaaacacaatatctaacggaactgttttttttcccttcgaggagacatcccctcgttttgtgcatgtcgttcaaaaaattataaaagttttctaaaaaaaaattatcaggatagatcaatatatgatatatcttctcgcaaacatgcgggttaaaattcgatttatacaattcaaaacaaaaataacaaattttaccgtgatttacacgttctattcatagtcaaatttgttatttttgtttctacttgtataagttgaatttgcatgtttgtgaagtggcatatcacatattgatctaccctactatttttaaaaaaaattttggatgactttttaagtgacatgcagaaatgatgagatatcctcttaagggatgaattgagttttccatatctaacacatacaagcttcttactagcaggggctaagcatctcgaactcgcatagacctcagcagtttatgttactaagagcaagtttaatagtatagccaactactggctccaaatcgtctatagtcaatttagtagtcaattcatacaatagttacctataaatatatactatacactattaatatctggtcccacctatcatacacacattatgtcttgaagcccgtactgcagctgaccacaaatctgtagcccgctgctcatctctcttctttcatctcctccatatgtgtttatagctggcttatagcctgctattgtacttgctctaatgcttcggcacgcttatctccagtccctgcatcacgcggttgatcatgtcgaggccagcctcgagttgcatgaccacgcgcttctccgcgagcagttccggcgtgaaaagccctttccacacttcataccaagccatcgcctcatctagccgaggcctctcgcccattaggtaccgatagttggcgtacatccatttcttgaagaacccttgtatcaaaagtggcaccatgtactttactggcacgatggatgcccacctcataacaagagggaagaagttgttgttttgtagccaagtcattcttaccgagatctcgagatcatggagagccttcctcatgtgaggcagcacatgccgcttgatgtgttcgtcccagctcattggatcgaacacctttttccatggcaacgcaagcctgtagtcgtagtca

SEQ ID NO: 6845 - DNA, 691 bp, Oryza sativa
cgttctctctgtagcgtgtccatggcacggacctcctcggcgtcgacgatggcctctggctctgcttcgccggtgccccgctcgagctcgggctctgtaggcggccccatgtcataattcgagtcgctgtcgtacggtgactcgaattttccaatgcctcctttcccatactttatggtcggcttgatgggatcgataatcccgtggccgtacttgccgaggccggcgccttcctcgtagttcatttgagccatcaacctcgccactatctggttggtcgccaggctcccgggctgcggcggcaacgggggatagtaggaagtgcagtaagcgggtggggaaaacaacgatagacgatggtgatccgtgtcgccggagctcgcccgcacaaagtggatggtgggcacgcatttgcttgcaaccgccgtagtttcctgcacgccactagtctcggtgttggaggaggatgcatgaggagtgccaagatccggcgtttcgcttgtagtactctcgccatggggaagaccaccaccttggtttctcccctcgtcgtcgacggaggccatggaaacaaccgtgttactccccttgtcgcctgttggaccgcctccctgccgccggtgtgaccgcccgccagttagaccgctgactcgcctccggtcaaaccgtcgggatcgaaaaaaacacgtat

SEQ ID NO: 6846 - DNA, 9329 bp, Oryza sativa
gtgagtttgagtgtggtgtgtatgcatgagtgactttgtgtgttcaacttgtacttgaaaaaaaaaatgtaaacttactgtgatatgtttgcgatgttcatttgcgatagttttgattttgatattctgatatttttggtattgtttttatttccaacgttattttgattacatatttgaggggaaaaatatgggaacggaaaaggttaggacaaattttcgaccgtttttatcactagtagcgggtattctctgccaagtgtttctctggctttgatgaaatacaattttggcatgttttgctatgggcacttattttacaaaacttttgagacccaaaccaaatgcaagcagtttttatacctcgatactgtttctcaagacttgagatgtttactaattcaaatcagactggtttatactgaagatgattatcatcactcctgtacactaactcagagaagcggaagcatgtccaagaaaacactgaaaaatgagatggcaaataaaaacaagacttcccttttaaaaaaaggactagccggtggtggtggtcgtggggtggggggatactggtcggtgttggggcagccaattatgataaggtctatgtacaggtggttataagctggactcgcttggtgcaaaaaacacaaggcaatgcagcatgaagagcctgtgtttgctgccagtgaattattgaactagtatctaaatacctcataactcaatgaataagttctactgttctacaaggtagaagatgcactccataatctttttcttccaaggaaaaaaatatatatactctaatggcaactgcactatgccttttttttcttagtaataagattcatttttttctccaatagcattgcaatacagtactacttaccgtttaataatttggatatcaaaattctatttgtaagaagggtagagacctcggcatatggatacgggtcattctatgacagatttgcaggtccagtactggagtttccaaggggaaagtttcataccttgacttgtgcagtaatcatttctcagtacctttgatccatttcgttcatcaattgatagagatataggaagaagtgtcagccaaacattgctgttctagctacagcaaccttggatttggaatttgtagagcggatcagcctctgtaagggaagcccatgacacagactggcgacctggccacaccgacctctgaatcggtggcggctcccgtctcccctaaatcgtgaggttctccagtataaacgagctgcttggggcccgcccagccgcgctgcctcttggatcgatttcccatcgatcgttgctgtgtcgagctccggtcaggcatacgatcgaacacctcgaggggatcatcgtccacctccgcccggcaagccgccacggaaggggcggcccagctgaggaagcaaccgtggtgcttcctgaccccgacctcaccggcaggacgcggcacgcgctagccctgcactgcagcgagcgcgcgaggaaggccggcggcggcgagtcggtccgcagttgccgccggtgcaccgcggccaatcgcatgcgcaggagggccgtgcgcctgtggatgggccataaaacggctagtacaggagcaagtctatttagcctctctctcagctgtttccattgatcgaaaaagtatactttggacaatttcgtttcccccccccccccccactttatctctaatattaattttgtcttctattttttaggattttcgtttttgctcatactttttttttaactgaaagagacgtttacctcttatttggatgatggaagttagttggatggggtttatggcagaaaaaaaatagaaaaataaagagaataaagatttttcgaattagtgatttaactttttacccctggaattctcctctcctcaaacccgagacctagccggcggcgcaggcggcggcggaaagcgggcgtcggccgctcctctcggcgcgagcaggaggcggcggcgaccggccggcggccaagcggcgaggctgctaaacatggcgccaaacacagcgaggctgctgccgttgcacgggccgtcgtgggcgaacacgaagttcatcgccatcatcagcgacagcgcgtccttgccggcggcgacgacgtacatcccctgcgcgcgtccgaccagcctcgaggaggtcaggttgggaccgtcggtgagcgggttgtcgatcaccaccaccgtcccgaaccacgtcgccgaggcgttcgtcgtcggcgcctccgccacctgcgccaccgtggagttgggagcaccgccgcaaacacgaaggaggaggaggcagccattacttagctctgtgttggtcgcatggttctaattaagatagcttaattagctagctgtctgatctattggtttgcctatgatagatgtggtagagggtataaatgtcctatttaacaccgttaactccatccaaaacaggggcaaaagtatttttcggtttaaaaaagtgagggaaaaaacgaaaaccctaaaaagtaggggcaaaatcaatattaaagatcaaagtgggagcaaaaacgaaattgtccctatattttaacatcaaaaatcggtgcattgatttgcaccagttctttttaaaaaatggggaaaacgttatatccggttttatatttaagggacaagaatttcaaaaaaagacaaaaatagacttatttaggtagaagttctatctgtcggtaataccgtgtaccgacaggctttccactgacacatcctctctatcgccagaggccttttccgacggactattgatgttaaaggtggtcttcgccgacagattagttgttgccaattttgggacatggtgtagtggtagtatatatgatccatccaaattcctactttgatccagattccagcacaaaacctaaggtgcgaatgagtggggcagtgtttgctaatgagccagatttcatagccgctcctaaagctttgggcttccaaatgggcgaagtcctccatctgctcacttgtcgccacaacacataggcgttccgctccgcaactctcgtgctgacctatctaccacacaaggtcaaggagctgtcggatgaaattcctcgcagctcatcagctctcacagcattgagacgtttcaacttgttctcgatgaccaggcatttcggtgtatgttggcaaccaaaatatttcctccatttcaaaatgtatgacgtcgttcaatttttcgtataacgtttaaccattcgtcatattcaaaaaaatttatacaagtattatttattttcttgtaacttgttttaccattaaataaaatataattttaacttatacttttacatatttatttttttaataagacgaatggtcaaatatttttaactaaaaatcaacagtgtcatacattttgaaaagaatgtactctctctgtttcaggtcataagacgttttgactttggatcaagtttgtagaaaataataataacattttcaagccaagacaaatttattatgaaaatatattcgattattgatttcataaaactaatttagtattataaatattactatatttgtctataaacttagttaaacttgaaacagtttgactttgaccaaagtcaaaacgtcttataatctaaaacggaggaagtaatatttttgtttctcctttagtcaaagaattgttcagaaaccttaaaggaaattcgcttcccccaccgggtcacacatcccctcatactcgggccttgtttagttccaaattttttcttcaaacttccaactttttcatcacatcaaaactttcctatacacataaactttaaacttttccatcacatcgttccaatttcaaccaaactttcaattttgccgtgaactaaacacaccctcattggaactgattattggataaaaatccaagcaatgacactgatcgatcttcctgttcacatatggaattaacgtgatagggagcctcctgcctgatcccccacgctaaagatacaatggcagcatccatatatccaaaggagtaaaaaggacatctacccaaaaagacaaccgaactgctaccaaatgaagtctttggtcttccgataagcatagaatcatagatgcttcataaccatcccgttcgtgctcttagcctcttacaactcttgtgaaattaggttcaacagccaattagttactccaccaactgaggtcaatatgtctaaactggcgctcctcctccgaggagctgcaatgatcttgtggctactcatctcgcagacaccatctacctgttgtgttcatgcgagatgcgtcaccggcgagcgtgatgcgctgctctccttcaaggcaagccttctggacccttctggcaggctgtcgtcatggcagggtgacgactgctgccagtggaagggagtccggtgcagcaacagaactggcaatatcgttgcgcttaacctccgcaacactaataatttctggtacgatttctatgatgctgatgggttgaacctattgagaggcggtgacttgagcctattgggaggtgaattgagctcctctttgattgctttacatcatctgaggcatctcgatctgagttgcaatttcttcaacggaacgagcatacctgttttcatgggctctttcaagaacttgagatatctcaacctctcctgggcaggtttcggtgggaaaataccttcgcaaattggtaatatttccagcttacaataccttgatgttagctcgaattatttcttccatgaacagaacacgtttttcatgtcttcaactgatctttcttggttgccacgtctcacctttttgaggcatgttgacatgactgacgttgacctcagttccgtgagggattgggttcacatggtgaacatgcttcctgctcttcaagttcttcgtttgtccgagtgtggccttaaccatactgtatctaaactatcccattcaaacctcacaaatcttgaggtccttgatctatcattcaatcaatttagctacacgccactccgacacaactggttttgggatctcactagcctcgaggagctttatctctcagaatatgcatggtttgcacctgcagaacctatccctgatagattgggtaacatgtctgccctacgtgtcttagatctaagttacagttctattgttggtttgtttccgaagaccttagagaatatgtgtaatttgcaagtattgctaatggatggcaacaatattgatgcggacttaagggaattcatggaacggttgccaatgtgctcgttgaattctttggaagagttgaatttagaatacacaaatatgagtggaacattcccaacgttcattcacaaaatgagcaatctcagcgttcttctattgtttggaaacaagttggttggcgagctacctgctggtgtcggagcgctgggtaatttgaaaatattggctcttagcaacaataacttcagaggtctagtgccgcttgaaacagtaagtagtttggatactttgtatcttaacaacaacaagttcaacggttttgtgcctcttgaagttggagcagtaagtaacttgaaaaagttgtttcttgcgtacaatactttcagcggccctgcaccatcatggattggaacactaggtaatttgacaatattggatcttagctacaataacctcagtggtccagtaccgcttgagattggagctgtaaatttgaaaattttgtatcttaacaacaataagttcagcggttttgtgcctcttggaattggagcagtaagtcatttgaaagtgttgtatcttagctacaataatttcagcggccctgcaccatcgtgggttggagcattaggtaatttacaaattttggatctttcccacaatagcttcagtggacctgtaccaccagggattggatcactcagtaatttgacaacattggatcttagctataacaggttccaaggcgtaatctctaaggatcatgttgaacatttatctcgtctgaagtatctggatttgtcagacaacttcttgaaaatagatatacatacaaattcttctccgccattcaaactaagaaacgcagctttccgatcatgtcagctggggccgcgctttccattgtggcttagatggcagactgacattgatgttcttgttcttgaaaatacaaaattggatgatgttattccggattggttctgggtgacattttcccgagcttcattcttgcaagcatcaggaaataagttgcatggctcattaccgccaagtctagaacacatctcagttggtcgcatatatctcggttccaacttgttgacaggtcaagttcctcaactccctataagtatgactcgcttgaatttgtcttcaaactttttgtcagggccattgccatctctcaaagctccactgctggaggagctgttgcttgccaataataatattacaggcagcatcccaccatccatgtgccaattgactggtttgaaacgtttggacctgtcaggaaacaaaataacaggagatcttgaacaaatgcaatgctggaaacagtcagatatgaccaatacaaactctgcagataaatttggttctagtatgctcagtcttgccttgaaccacaatgaactttcaggtatatttcctcaatttcttcaaaatgcctcacaattattgttcctggatctttcacacaacaggttttttggaagtttgccaaagtggttaccagaaagaatgccaaacttgcaaatcttgaggttgcggtcaaatattttccatggccatattcccaagaacattatttaccttggtaaacttcattttctggacatagcacacaacaacatatcaggatccataccagactccttagcaaacttcaaagcaatgactgttatagctcagaatagtgaggactatatttttgaagagagcataccagtaatcacgaaagatcaacagcgtgactacacctttgaaatctacaatcaggtggttaatcttgatttttcatgtaacaagttaacagggcatattccagaagaaatacatttacttattggacttaccaatttaaatttatcaagtaatcagttcagtggaacaatccatgatcaaattggtgatttgaagcagttggaatcccttgacttgtcctacaatgaattatctggtgaaatccccccaagtttgtcagctctaacttctctaagccacttgaacctatcatacaacaatttatcaggcacaataccatcaggatcacagctacaagcactcgatgaccagatttatatatatgttggaaatcctggtctttgtgggcctcctctcttgaagaactgttcaactaatggtacacaacaaagtttctatgaagatagaagccatatgagatctctctacctcgggatgagcataggatttgtgattggtctatggactgtgttttgcaccatgatgatgaagagaacctggatgatggcttactttcggatcattgacaatttatatgataaggcctatgtacaagtggctataagctggagtcgcttgatgcggaaaaaccaagatgcagcgtgaagagcgttgtttccactgcaaatgaattattcaagctactagtttctgaaaaacctagtaactcaaagaataattttaggtgttttactattccaagtggatatttactgttcctactataatatctggtttccgatgaaacctactagcatatttgtctgtaatgtgcttgacattctgttgtcattgtattatatgttgttgttatatgatttattttttaagctggatggattgaagctagtaaagataatatataatataactgccctctgccttttcaaggtacttaccttcctgtctgaacatttgcatgtcataatgctagttgtagggtgtgtccgtacttaccttcttattcataataagaatatgtatatgcctcattttaacagatttgcatgtccacagctgaagttcccaagggatgtttcataccttgaatccttgatttgtcagtaaccctttgtcaaaaatgttctagctaagcttgagctccaacgtgacggactggagattatcttgtctaacataataactgaccatgatgatccagtgtctttggtctctgggtggccacaacggatggatatacgggaagttccatccatgttgatgcaggatggctggatatatggggaaattcctacagaacataggtttagctaccagcaccttggaatctgtggacggatcaacctggaggggaagctcatcgtgacatatcggcgacctggtcacatactcacatcaatccatcatatccctgaataggagtaaacggaaaaatccgcaacctgcccacacggccacaccaacctctgaatcggaggagactccccgaaactgtgagactgagacattgctccagtctccactgaccagcttgggggctcgcactgttgatctggtcgagttcccggcttcccgtcgattcatttgatgcaccgcgccccggtcaggcaaacggtcgagcacctcgaggggatcgacgcccaccgccacccggcactcccccgccgaaagaacgccggccctgcagatgaagcaacagtgcgcggtgcgccttcctgaatccctgacctcgtcggcaggctgtggcacgcgctggcccggcgagtcccgccggcgccgccaccaatcgcctgctctgctgaccgcggtgctaaggccgaactcgcagattcgcgggtgctgggattggatgcggcagcgcagttgatggcgccccgtcggcggcgaggtggatgggccatcgagaggcccatttacgtccagctgacattccggcccacacgctcgcgagtagcccgttcagaagtccggctgctatttggaaaaagtacaccgaagatcccttaacttgtcatcgagttacaaatcgtccccgaaccgcaaaaccggatacaacgcatcccataacttacaaaaccagtgcaaactagatccctcagcggttttaactccagttttgaccgacgtgcagctgactcagcgtgggacccacataggtcccacgtgtcagcctctacttcccctcccatctccacctctcttcctctctctcctcccacgaaagcagctgggtacggttcggctggcgcggcggatggctggtgcggaaaaactgggcggcgccagcgggggaggagctgggcggcggcggtgacaggtgacgcggggacgcgggagaatgggcgacacggtg

SEQ ID NO: 6847 - DNA, 1961 bp, Oryza sativa
cgccgaccacctcgccgaccccgtcaacaacaacgcctgggcctacgccaccaacttcgtccccggcaagtgagcgccgccgccgccgtgctgccatggcgacgcatcgccttcagctaagctagctaggttgacgacgatgcgcgtctctgcaggagagtgtgcgtgtgtgtacgcggtgcagtagatgtacgtacgtgtaccgtatagatgtacgtattcgtgtggaccgcgtggatggatgtacgagtattggagagagggtgagatctgtaccggtagtgtgtatttctgtgcaggttctgaacctgatcaatgaaatatggtgttgtgaattaattataaaattagcttgtttaatcctgcgtgctacttaatgatataataattcttctgataattagtaagagtaatgaagagattgcaagaaaattactcccagaacagtatacgaactgaatcaagtataaaatgatcaaaattaacctgaacatgctttaactgttagtattttgaacgaaaattaattgatagtatgcacacgctacaattttatattcccaaaatgtaagttataagttgacaggttggggtagttaggtgaagtctgaaccttaccactcaaatttaaaagcactggatgcatcatatatgatgatttttacttgaagcaacactgcccatgctaagatttgcttcctaccgaggttacaataatttaggtggatagtgattacactgcattgacaaggaaatttgggtataatttcatctagaactttctattacaactgctaagctagcagtgacagatacgtatagttgaaaaacactttgtgaactttctcagaatatggccaattctgagaaacttagcactgtctggtttcacccaacttgtagtggttggaaagttacagttacatcgacctcaatacccatgtgaattgggaggaaaattacaagttacatcaacctctctgggctcttgtcatgtgaatgtcacatgatcatgagagggatcgttcaaggaagtagtgaagtactacaacaaagttctagctattatcttatatacaaagtctgatgaaaacaccacagcgacgtactccctccatactcgtaaaggaagtcgttatacggtctccaaaacacaactttgacttcttgtttatataaaaatatttattaaaaaatgatatatgtatacttttatgaaagtatttttcaagacaaatctatatatataatttttacaatttcaaactcaacaacttgaaagatattcaagatttatatttttaaggtttgacttaaatattgttgtaaacgacttctttgtgagtatggagggattatgtgataatttggaaagatcaccttgttacgttacctgcctctgaaaagggctctgaaatgtaccattccgtccagtttcttcttcagaactgggcatgctgcgacgaacctgctgcattcgctcctatcttgggctgcatgaatcaaagaaatcagcagtgttaccttgcatggtgagagaacagtttgatggatggatgtgctctgctgacctcattgttttgctcctacagggtgtgcaaagggaaaccaagtggtaaccttgaagggttggctcatcttttagcttcagatgagaagaaacctcccagtttgcacactgaacaaatcaaatgagaaaaacatgaaggacataagttgcagattttttgtggtatgattttaaaagttctaggtttgggccatacttctatttattgttatttttttacaacaagatcaggagatgcgtgcttccatacaatgagtaatccttttgttttcaaagaaaaatcttggctatccttattttatttttattttttaatgtgaacagtaggaaatatacatataggttaaaattaagcttgttacaaataagttaaaaatgtacaaggttcttg

SEQ ID NO: 6848 - DNA, 2173 bp, Oryza sativa
atgggttaaagaaggaagattgctgagcgaaacggcttaatatatatatatatgagctaccacctgaacttcagtaactccaatgacgttaacgtttggtgcagatcccttcacgtgaagtgcagttatcagaaaattttgagcttgccaagcacggagcacaattggaatgtcttcttcgtcacgagctggatcaccaaccgactgccccaacagttcaaatagcaagcctcctgcaactcttacagggacctgaaataagttaaaaaaaagatacgaggtttggagggagagacgtccctccaaatatttttcaagaagaaattgtaagtgtgctggggattgaacacgagaccttagggttgaaaccacatgccccttgccactacactatcaagtgaagaaaatccagacaatattccaagtaacagtaagcttagataaatactgcatctaggtagacacactaattcaggacattccgcaattgtgcatgtagtacatgggagcagggttcactctattggttctggggtttccatcgggggtcaccgaaatcctgaaatttcggaaattttggtccgaaatttccgaaattttgaacaaaatttaattgaatttgaacaaatattatccaaattcatgaaaaaattgaaaaattcaaaaacttcggccgaattaatatcgtatcgggggtcaccgaaatgagtagcccatatgaaatcatcaaagagtttcagtctttcagacattcaagctaagaagtggcagtagagtcacactgaaacattgacactcgtagtctcctacatatctaaatgaacatatatttttagataatggaatatattttatgcctttgcttaacttgctacagccaattattacacaaattggcttacaagcgtttacgcacgaaagagtgtttaattctagatagaacatcaatagactcaaaatctattatataattaaagtaatagaaaaagaagcctccacgttcgctctcatggcctagaaattctgacattaatcggagaaaaagaaaaaaaacagagtccatatagaaatacaatttagaaatagctgaaattcggaattaaaaaataaggaatattagaaaaggtgactagagtccatatagaaatacactttagaaatagttgaaattcagaattaaaaaataaggaatattagaagaggatactagagtccatatagaaatacaattagaaaataactgaaattcggaattaaaaaaataaggaatattagaaaagagactagagtccatatagaaatacaattacgaaataactgaaattcggaattaaaaataagaaatattagaagtagagcatagagtccatatagaaatacaattaagaaaaaaaaagaaatttggaattaaaaaataaggaatattagaagtagagtatagagtccatattggaatttaaaaccaactaaaatccggaataaaaaggagcctccacgttcgctcttatggcctagaaattctcacattaatcggagaaaaagaaaaagcagagtccatatagaaatacaatttagaaatagttgaaattcagaattagaaaataaggaatattagaagagaagactagagtagttattacacatgagtagtttcgtaaagttattgcaaaatttaatattatgttgtcattgtaatatattttaataatataataagaaaacatatatgatattatatgagagaaaatataatgatgctagccgcgcaatctgcacgggccaccatgctagttgaacatatgtagtcataatgatttgcatacaaatagtaccaagacatggtgctttctatcaaaaagccggcctcttttggctttccctctaaaaaatggtaccttaaacatataaaacagtagaaaatggatgaattacccaatctcttgggtagtgcagtgctggatttctttctagctttcggtagaaaatttggagtagaaaaccgcggagaagtatggtaaggtaaagctcacctcgtagagcagatgcttcatcttctcactgatgagcacgctctcgtccctgagcgccacgcagatcgccgggtggagccaccgcgcggcggccagccacgcgtccaccgccgggtgccccgccggcacgtggcaccaccagg

SEQ ID NO: 6849 - DNA, 2818 bp, Oryza sativa
tggactgcagcaaggagcagcacttgctccggcacaagttggccggggtaacgaagccatgggcgccgccgccgccgcgcacgaactcgaaggcgcagacgaggccgtcggtccacaggccgtcggacgacgaccacggcgaggacgcagaggcatccttggcgccgaagccgtgactgagctggtggtggtggtggtgctgcttcctagcgtcgccgccgccgccgccatggcggacgccgtgccagagaggctcgccgttcaccatctctctctagtgaagccgcagcctctggggcggacgacggcggcgacgagatgtttttatttatggggtcgtcgcgtgacggcagcgtctgggggtgggccccccacgttggcgcttttgcgcgtcgtgggccatacgtgtcagtgagagcgagtgagtacgggggttggggcccacgagacacgtggcgttgccacgctgctgctgttgcagcttgttcggtggcgctagaatgcgtggttggtctcgtgccccgtgcccgcgcggtggatttcgaccgttctttttcaaataaatctgtccaatttctccactaccggatttgttccaagattggtgcaggcataatgcgtaaaatatcaggtcttcacgcgtggggtatgaatggatcccgcctcttttagggcagcagcagggcgtcgcacaaaagcaaaaaaacaagtttatccacgtaggagaaaaactcgaaaaaaggagtcaagctcctcactcctcagtgcacgtgcacgcgtaggcgtgacttcaggagcgtaattttttaaggccggtcccgccacgacttttctccattttcaattcccaggcccgtctctctcttcatcttccttactcggctccttcccatctctctctctccctcttcaagcggctgagatttgcaagcgacgccagcgacgagcggtggcctctcccctccggtgccggtggcggcctctcccctctcctctccggtaccagcacggcctcccaacagctcagcgggacggatctagcggcgctggcgacgagcggctgcctctcccctctggcgccgacaacggcctctcccctcatgtgccagcgcggcctccagggagctcagcggggcggatctggcggtgccgacgacgagcgaccgcctctcctctctcccctctaggctccggtgccgcctctcccctctggcggcggcgcgggcatcgacgcttctcccctccctctcccttcttcacctcttctcttgtgggcccaaaagttgtgaaatgacgaagagccgaggctccgaactatgcctaggtggagaggaatctttgagctagctagatgagggagaatgacacctaggtacactgtgaatgactttacaagtgcgcctcatttatcactaagttagaattgtttttatgtttgaaacccaattatatacaatttattaagcgtagttacaatataactggggtgtaaccagaacctacttagttatttagaaatctgttgacaatgataaaggtagactcgggagggcgcggatagccgcgcattagatttgcattgttcgggggttaagacccagcttgtgatttgtgaatcagcgacaacgagcatgacgaaatattgactgctacagagatgcaacaattgagtatgctttcttttttttaaagaaaaaaagcaagtgagcgtgagtaaaaacaacaaaagaaaacgctccatccgtcccaattaaaacccaataataaaacaaatgaagtactatatcactaacttttgtaagataaaattataaataagtaaatgaatagcaaggtgagcataactcagctgattaagttactcgtggcgaaactagcccatccgtattcatatcttgaacttaacacacgtgctcgtatttacgttgcaggaaggctccatggtaactccatcgattttaagatatatggtcccaatcttccggaggtatttatagggttagggtacgtatttgtgccttcataagatgagtgtgctaggtttacatgggtaggccgtatgccgagtgtagcttcatacgggtaagtgagcgcgtattgtgagcacctatgtttgtactttgttttaaaaagtaattaaataaataaacttccgaaggtgtttatactttataagggtagggtgtactgtgtgtgcgccttcataaggataagtgtatgcgtattgtgagcatctatgtttgtattttgttttaaaatataattaaataaataatctgacaggcgaaaaagttgtaaatgattgaactcatacaagtagaatgtaagtggctaacccgtgaacctgtatacccatttataagtcaaaataagcagctttgtattttttttttgcaaataaatggatttcacagttagccatttacaccttaccgatcaaacgtttctgagagacctgatcgacaggtgaggatcttctatcataatatcattactattagtcactggtatccttttattgtctcacacgtactatggtgaggatgtgaacctcctgatcaactaggtgttgtcccgtggcaaacagacagtagttagcctagcaaaaaagtagacagttagtcacgcataaacgggctttttacagaaatatcacatgcaaattgaaagaggccattcaccaacttgtactgttacttgttcgtcgatcatcatacgtaaattcctttgtttacggtcggtccttttcctcacctgaaaacactatttttggccgctacgaaaaccgatgatgatatgcctcatcagccatcaggta

SEQ ID NO: 6850 - DNA, 1856 bp, Oryza sativa
cggcgtcatctattaaaaaacggaggtagtactttttaaatttaaatcacatcaacttatttaaacttatgtttatgtttatgtaagcttatgttgttaaagctattttacacatttatttttacttattgttatcataataaactctcgcaacaacgcgcatggtttaacctagtaaaataaatggtggggtacacttatataagaccgcgactatcctcaagggtaatgaatgtaaaaaatagcgtgtcgtaataaaatcaattttttattttggattttttaatggaaaaataaaattctgattttctaggtctaatgaataaatgatagagcctggttccaattctggcaaaacaaaaggcaacaagcttaacttcttaattggaagaactctatgatctaattagacgttaaaatagattagtatccgatgtagggaaaaggctgcattttctatgagtagacctttgatttttttttagaaatcctaattattcttaaagtgtggggaacacttttaagaatatttataaaatcgggaaatatttttaaaagtgtggggtacaattttatgtatatttctaaaatcaggataaataaacagtcatcatgaaattatcgttgcctgaagaggcatcacttttttaatttaatagagggaaacacctatttcgagacatgtcatatctataggagagctactttttttttttaaaaaaaaaactcatgcattttattaattatagataactaggtacatatcacatgagttatccctagcgggaaatcaattgcaagtaaaagcagttttgcataaaatgtcccttgaagatggccaaattaacataagctcctgaaaattcgcaggaaggactcctaagaaactagaaaaagcaataagtccttctcttctctgtcaggtagcaagctagatccatggctgcaacgctgatgaagaaaccaagagtgactgcagatgaagatactaagtatagttggccacatcgcctgagtcccgacgacctggcccaaggcatgagaatttggcccgacctaggcaccgcccgacccgctagggtcaagcccatgccgacccggtatggcacaatgaaaaaaaaacagttgagggatccaacatagacatactttcagcccatttgaggcaaggcccaaagataagagggatacaaaatagacttaattcaaccatataagacaacccaaagagatgagggagggaaaatatacttattttatagagaagcataatgggttgtcgtgccttcgagccaacccggcatgacccaagtcttattgggccatgcctgggccatgggtgcagcccgtggacaggcaagggccggctcggcgtgtaggtcgggccatgccggctcgactaacctcggcccaagcccggccgttcctaggccgtgccgggtcgggcgaaccatttggccatctatagatacaaggaagcatatccaaaagggacctccgcttggaggttgaggcttacatgacaaaaccatgaaaacttggcttctctctgatgatgcaccatcggtgacgaagaaggcttgcatatttgtggttgcctcgccggagatgaaccaaatggcgatgtaaacttgtcttacttccaattgaagtcgtccctggcaaacccagaaaccactccatggatggatttggttgggaaccatagatgatcaccgggacaagagaaacatgacgctgacaaactcttgcactacacaaaagtaccaaaagaaaagagaaaacaaagaggaaaacactactacgggaagaacccgactacctggactcccctgccccatcactggcgactggag

SEQ ID NO: 6851 - DNA, 1227 bp, Oryza sativa
aacgggtgtaaccggacgaccaagcgggagcaattttccttataaccttgtgcatcataaacaacgaaaaacagagtccctgagtccccatcccctacctaacaagatttcctcgagggtaacaatcgaaaagtacaaaccggtatgcaccgtagattagaatattatagattagtataattagtcccaaccgacgcacctaaaatctgtgcagccaaagataatccaagagacagatgaccgaaagcccaccgaaaccggtaaatcctagcgctaaacccacaacccaacacgcacaagaagcagcgggaaagtgcgaaggacgagcagctctcacccaccaggagagagtcctccgctgctctcctctcctctcctccggctaagtggttggctggtctcagcgacagcgatccctttcggggtactagtagctagtagccgcgacgacggatggtggaacccgtgggtgcaggtggtggcggtagtggctggggcgcggaggggttggcgctgctggcctctgctcctccagctcgcgataagggtcttcgtcgtcgtcgtcgtcctcgcatgaccgctcatggccgcgacattgacgatggccaggtgagtatgattgttgagttagatgtatcttgcgtgatggtgctcattatagctgtttgttcgtgtgcctgtgcatggcacggaagctgtttgtgttaatgcgtcagagggagcaaccgagcaactgtaattgtgatcaagaggtgtttgcctgagaagatgatgctttttaggatttcttagttttgttggttgaatgataacttagctcactgagtgacaggtttttttggatagcttttaccatactctttagataatgcacctgagtgacaattgaaagcgaactatgagtcggcatcagtcctggtctcaaaatgatcctcttttggcaaattgaccgtgatgggttctttgtttccgtttgctttaccatttttgttccttttccttttcttagtttttttaccctgatttggttacttcacttcaattatggtagtagggcatgcagcttcgataatactataatgttaaattgtttggtcagggaaatgaagatgtcaaccggcgaaaacttacaggcggggttattgtctaggacgcctccatttggtctgaggctatgggttgtgcttggcattagcatttgggctgcaattctgtttgtcctaggtt

SEQ ID NO: 6852 - DNA, 1358 bp, Oryza sativa
ccccgcggctggaagtagcagccgccaaccaccgacggcggtgacaccgactgcacggtgaagaaccaccggaacagctgaagagaggggcgcaccccaatgaacatctcgcacaggtgcgcgaagatggccaatgtcatcaccgcattgggggtgaggtgcgccatctggagatcgtagaactccaggacatccatgaagaaagaggaaaatggcgggaccagcccagccattgcgaaggggaggaagaaaatggaccgccccgggtagtctggtgccgggcgcccttcgcccagcatcactatctcccgaccggtggcggactccggcatgaagcggcgcggcagtccggcgtgcctctcgttcacgatgcgggaaggcggtaatacactgccgtcgagcagagcagagccccgtgccatggcggtggaggaagagatgattgagaacgagcgcgtgtggcgaaagtagggcgcagcagagaaagagttagagctcaggcggcgaaggcaagaggaacaatggcgaaaggaaggaagcaaatcctttcctcgatgcttttatacccttgccatcgctgggcctggctcctcgtttctcgcgcccactacctcgctccctcgtatctcgctatctcgctccctcgtttcccgtgcccacgctttcactaatcccattcgcccgcttacggcgcatgaagtggatatgcggttgtggcaatcgaaatggattgtatcgtgcgcgcgttaattacgctcgccgaccgaagcggcgttaccgtatctccgggcgagataaatctgctcacccagattcgcgcgctgctcaagaggtgtggcagtcttgaatagaccgcccattatggacaaccaaagttaccaataccaatgcgcatggattgagaccgttgggtattttgcccaactacggagaccggtcccacctgtcaccaggctttaggggtggcgtcacacctgaccgcttcccttgggaagggaaattgctctggcataacgccgggggctactgtcggtgatatgggaccgggagtatcatgaccagaggcttgaggcagacataatcgcccacgtggcctggcaccttcggggacgtcgggcccgagggtgaggtgtccgccctcctcttgatctcccccgaggggggggtcgggttgcgcttgccccggccccgagggccgaggcaccccgaccccttaaggaagtctgcgccacatatatgggataagtgagcacagctgtgctcacctaacagcatttattgtagtctggtcaagcgtgtcacgctgcatgcaacgcagtacagcgcgttcctttacccggtctgtgaccagtcacaga

SEQ ID NO: 6853 - DNA, 1778 bp, Oryza sativa
ccgatcatgtcgatgtcgccgtggtcacggcgtgcgcgcaccgtggcgacctcttcgctgatacggtgctccaccccctctcccgccgccttcacctgcgccctctccggccggcaccagctgctgtcgcgtcactgctgccgctgctcgcctgccacggcccccgcgccccaagcccctctactcctcctgagcccagagccgccgctccgcagccgcactcgcccgccgcgtcccccgcatcccaagcccctccattcctcccgagcccggagccgccactcgcttgccaccgctcttacctgccaccgccgatgctccgcagccgctgccactccccctctcggccaagaaaaaagcgattgaggagaagattgctgactaggattgttgaccccacatttttttctcacttacatgtgggctccacatatttatttttttctgactaggatgctatgtcagcaaaaccggacaaaaatactgccatgggaccttctttgaacggtttgagtgagtttaggggtacacatttctgattttataattaagggaccttaaaaaatctcgcggttaagttgaggaacctcaggtgaacttattccgccaggaaataaaccaggtttcacccaactactattcctgcttagccgtttcaaaaggaggcctttccatagctgctgcgaacaatatgggaaatggaagtgagttgattcatatctagcgcaagttgctaacactaaccatgaaaaagcagtcagctactctacaatctgtgctgaagcctgacggtgcctttgttcatgagcaaagcacggatcctatcagagatcccgaaagagacgccatagaacggatccgtattgctgctgtacagatgaaaatactacttcctccgtttcacaatgtaagattttctagcattgtcatttagatgttaataaatctagacatatgtatgtgtttaaattcattaacatctatatgtatgtggacaatgctagaaagttttatattatgaaacggagggagtacatttctttccggaggaaaaaaaacaacacgttgccttaccctaaagtatgaagtatgaacacaaatatttcaggccttctggtgataaaaagtgatcgtacgtaacgcttatacaaaagctgtatcgtatctcgccgatgtcccggacggctcacgccgccctgaaccgtcgccgtcgccgcatcgccccatcgggctcctccgatccttgagcaagagcgcatacaaaaacttcaggtggttcaggcgttcagcatcgacaccgacggcgacaaaatggttgctactaataattgatttagggagaaaaaaacaaaataaagaagatgctaaaaacaaacctgccgtgatgatagcgcaacatcatcggcctccagcatgcggacgacgctgcccatcgtgggccgcttgtccgctttggggtcgacgcacttgagggcagccacgagcgcgcgcctcagctgccgtttggttggcttggcctccatcgcagggtctactacctcctcggctcttctgctgctagccatcagcttgatccactccagcaggtgcacctgcaaacagcacgtcttgtgttattgaagggggaaaaaaatgaagcttgaagtatccacgtgtgcatagagaacaacacacagctctgagattcagtcgatgtagaaataaactgttttactgcttttaaatgtgagaactccatattaagaaaataatggcgaccgggcagcaagggtgacaga

SEQ ID NO: 6854 - DNA, 943 bp, Oryza sativa
tcctgcaccccaacggcgtcatacattaaaatatggagggagtagatctgtgtaatataatccaagtttttctcagaacaacattatccaggttcagcgtactctaatcgttgccataatgaactgagagcgcatcgccaagtaagaacagttgtgaagaggaaaaaaatgtcattgggcccatgaccagtttaggatgtttaaagggggaattactagatatattaatactacgactattaaaaccggtacataataactcccttaactgttttcaaggcgattttcactcatgcttgttgaactggagagaacagggtgacaagggggaggagctcggcaacgactacgttatggagacgatgaggagttgaagtggagagaacagggtgacaagggggaggagctcggcaacgactatggcaagggagaccggtgcgagggaataacgccgacgatgcctatgagggagtgacatgaggagtcgaagtggagagaacaggggtgcccgaaccgaggtggagaagggggtggcggcgtagcggactccacgacttacttcctgctctagctactgcttcaagtagtgtcttcgcacgcaacataagtcttttctgcacattttatcctcactcgtgtgcactggaaagaatttcccggtcggtcacccatcccgcaattgcttcaggccaagcatgcttaaccttagagttctttggagatcggcttctgaaaaagaagttgcaattaagctgtcacatcctcacccccttaagagatcgacgtcgtcagtcaaccccaagctaggaatgtctcctcttggccacgtccatatgtccagtgccagcgcatgtaccatgcagtgtgatcactccgagtccacaccagccatgcgcactatgcctgtgcaactgcaacacacgcgcccgtgaaaccgcgagag

SEQ ID NO: 6855 - DNA, 2356 bp, Oryza sativa
ttgtgaaacgaagggaatagtatttaacacagcagtagctataggccctatttaaagagttcaaggttgtgaaaaacaactactcccttcatcccatagggcagtaaacatttcgtacgacaaatctggatatgcgacatgttcaaattcattatattataaacaacaaatttggataagagacattgtcggtgatatgggaccgggagtatcatgaccagaggcttgaggcagacataatcgcccacgtggcctggcaccttcggggacgtcgggcccgagggtgaggtgtccgccctcctcttgatctcccccgaggggggggtcgggttgcgcttgccccggccccgagggccgaggcaccccgaccccttaaggaagtctgcgccacatatatgggataagtgagcacagctgtgctcacctaacagcatttattgtagtctggtcaagcgtgtcacgctgcatgcaacgcagtacagcgcgttcctttacccggtctgtgaccagtcacagaccggtcagatcacgggttaggtggcgactggcggtctgacgcacgccttgccccatcccgtcaagacgaaagcctctaggcactcgtctcaagccggagctagcgtgttatctcttagagatggcacgttagccctggttagatttataccaggcttcatcctaaccattacaggcaaggtgttacacgaagaagggcaaaacatgcacgttgttaaactgacgcgtgggggacaagaatgaccggtctgacactggtcgcatcagcaacgggcagccacgatcccgcgtcatctccgtctccgccgggagtggaggtaggtgtgggctgtcccatcagaagggctcccggatggaaaccgtaccgatctccgcccattaaagagaaaaagaacagtccagtttggaaagagaagggtgcatgtggtatccccttgaagtataaaaggaggaccttgcccatagagaagggggttgattctttccagattcagagcctagaacgagggagaggtgggctcacactttgtaacttgtccatacacaaatccacaaaaacacaggagtagggtattacgcttccgagcggcccgaacctgtatagatcgtccgtgtctcgcgtttcttgctggctgacgatccttccacatacagagagagagagagagcttgggatctcaccctaagcccccggccgaaccggcaaaggggggcctgcgcggtctcccggtgaggagcctcgagctccgtcatctggcgcgccaggtagggggctcagcgtgtttttttctgagctctcatactcttccgtgtgcgccaagcttcccttgttcaacctaatggctgagcaagcaaaggcgcacgacctctctccgagtgtgagcggcgacgacggggagccaaacccacgccgtcgagctcgtactccacctcctccgcgccaaagccctaagcagggggaggcgcttgagagggtcgacaaatccgtggcatcaccagtcgcaggtgatgcaggagaacggcgagatggggagcgtcgcctcctcgtctacggcgacggcagcacgcctcagggtgcgcttcaggctgctggcgcgctcctacgacacccgcctgtcgtccatgacccggagtctccagcccaacgatggctggaagacgtggccaacttggtcatgacggcacagcagcgcctgggtgctggtggacggtccgccaccaccaagacctccggcgccgctaccaccggctccgtgtcgtcaaggcggagggcgcggcgagcggcggcggctgcacgtcattcggctgctactccctcgtcgacaccttcgactcgggaggatcagcatggggagccggatgcccgcctcaacatcgagcgccggcgtaataaccggcgtactccccgcgcaacggagggcgcctcttcgtccagagtgtcacctcgacatggacgtgagaatcagccctccgtgcccccggccggtggtgttggctgtagagcctttgtggcgagtcttcggaatgtccgttggcccccaaggttccggcccaccatcaccgagaagtacgatgggagcgtcaaccccaccgagtttctccaggtctatacgaccgggatcgaggccgctgggggtgacgacagggtcatggcgaacttctttcccatggccctaaaaggacatggccctaaaaggacaggcgcggggttggctaatgaacctgccacccgcgtcggtccactcctgggaagatttgtgccaacagttcaccatgaacttccaaggcacatatccgcgcccaggcgaagaagcgacttgcatgcagtacagcgaggcga

SEQ ID NO: 6856 - DNA, 2491 bp, Oryza sativa
cctgcgccccgaacctggggccaccattgccaccgtcgatggaggagcgtgtgctcacgtctctcgccggagcttcaaggctatgaagcgagagcttctggccatggcccctactcatgaggcgatgcgtcgggcgcggtggtcggaggttgctctcactttcgaccagaccgaccacccaccgtgcattgcccggggagggcaggttgcgatggtggtttcccccaccatctgcaacgtgaagttgggacgtgtcctcgtagatggaggagcggccctcaacatcctttcccccgcggctttcgatgccatcaaggccccggggatggtgctccgaccgtcccagccgattatcggtgtgacgccggggcacacgtggccattaggtcacatcgacctaccggtcaccttcggtggacccgccaacttccgcacggagcgggtgagcttcgatgtggcggacctcagtctgccctacaacgcggtcctagggaggcccgcgttggtgaagttcatggcggcggtccactacgcctacctccagatgaagatgccgggcccgggtggccccatctctgtccatggcgatcttaaagtcgcgctcgcttgcatggagcagcgcgcggaccgcctcgctgctgcgtccaagcccgagggtggtgacgagaggcttggcccttctgcccccaccgccccgaggcagcggatcgtcacatgcgacgaggtcccggtcaaggaggttgccttgggcgacggcccatccaagaccacgcggatcggtggtcttctggatggcaaataggaagacgcgctcgtctccttcctgcgggcaaacgctgacgtcttcgcatggagaccagcggacatgcccggggtccccagggaggtgattgagcaccgtctcgccgtgcggccgggcgcaaggccggtccggcagaaagtgcggcggcaggccccggaacgtcaagccttcatccgcgaggaggtggcgagacttctggaggccggattcatccgtgaagtcatccatccggagtggctggcgaacccggtggtcgttcccaaggcgaacggcaagcttcggatgtgcatcgactacaccgaccttaacaaggcatgtcctaaggatccttaccccctgcctcgcatagatcagattgtcgactccactgcggggtgcgaccttttgtgttttctagatgcatactctggttaccatcagattcgcatggctagggaggatgaggaaaaaactgcgttcattacccccgtaggaacctattgtcatacatcaatgccttttgggttaaagaatgcaggtcctacttttcaacgtactactcgaatttctttgggtagccaaataggacgtaatgttgaggcttatgtcgatgacttggttgtaaaaacgcgcaaccaagagaccttactctcagatctagcggaaacttttgaaaatctccgctccgcccgcataaaactgaaccccgataagtgcgtgtttggtgtgcctgcgggcaagcttctcgggttcttggtctctgcccgaggcattgaggccaaccccgagaagatacgagctatagagcggatgcgcccccccagcaaacttagggatgtgcagtgcgtcactggttgcatggccgccctaagtcgttttatatcgaggttgggagagaaggcgctacccttatttaagctcctcaagcgctcggggccgtttacttggacggaggaagctgaaaatgccctcgcccagctgaaggcgtatctcagctctcctccagttctagtcgccccggagccaaatgagcccctgctactttacttagcggcgaccccccaagtagttagtgcagcgttggttgtggagcgcgatgaggacaatcctcattctgcgtacccccactctgtgccgacttggcccgggagcaggcagggaggagaggcccccgagtcgaacggtggcctaaggcccccgacgaccggagtcggccctctgcccgcttgtcagacggtgctgagtgcccccgaccctcaggaaggccccgaggccactgcgggaaggccgcacctaccaccctttgaccccgaggctaaccctgtgctgattcgacccgggagagagcagggagaagaggcccccgagccgaacggaggcctgaagcccctgacgatcggagctggccctttgcccgcgtgtctgacgacgccaggagcccccgacccccaggacggccccgaggccactgtgggaaggccgcacctgtcatcttcggaccccgaggtcatcagcgcaggagacgagtgtgccccgagaggccacttggacgaagaacgccccggggatacggcccctagcagagaggatcggccccaccgaagggtgcagcggcctgtctactttgttagtgaggccctccgggacgccaagacccgataccctcaggcccagaagatgctttacgctattctgatggcctcgaggaaa

SEQ ID NO: 6857 - DNA, 1210 bp, Oryza sativa
cctctccgaacggagacgttctcagatatttggtccgtctcgactttcgagcgactaacaatatggcagagtacgagggactccttgccggactcagagtggcagtcggactggggatccgccgcctcttggtattaggcgactcccagctagtcgttaaccaggtttgtaaggagtaccggtgctctgacccacagatggacgcctacgtacgccaagtgcggcgtatggagcgccatttcgatggaatagagcttcggcatgtgcccagacgggataacatgatagccgacgaactctcacggctcgcgtcctcgcgagcccagaccccaccgggtgcctttgaagaaaggcttacccagccgtcggcgcgacccgatcccttaggggagacggatgcgcctgaccggcccccgaggcccgtcggagtccaggcctcgggacccgaagggagcgctccaagctcccttagattgattgcttggatctctgagatccaaacatacctcacagataagactctacctgaggaccgcgaagggagtgaacgcgtacaacgcatttccaaacgctatgtgctggtagaagggaccctctatcggcgcgcggctaacggaatcctcctgaagtgcattcctcaggaacaaggcgttgagcttcttgctgacatccatgagggcgagtgcggagcccattccgcctcgcgtaccctggttggcaaggcctttcgtcaaggattttattggccgacagctctcaatgacgcagtcgatctggtccggcgatgcagagcgtgtcagttccacgccaagcaaatccatcagccggcccaggccctgcagatcataccactgtcatggccatttgctgtctgggggcttgatatcctgggaccgttcaaacgggccccgggcgggtttgaatatctgtatgttacgatcgacaagttcactaagtggcccgaggcttatccggttgtcaagatcgataagcactctgctcttaaattcattaagggcatcacggcccgttttggagtgcctaaccgtattattacggataatggcacccaattcactagtgaactcttcggcgactactgcgaagacatgggcatcaagctctgcttcgcctcacctgcccaccccagaagcaatggccaagtggagcgcgccaatgcagaaatcctcaaaggccttaaaaccaagac

SEQ ID NO: 6858 - DNA, 2977 bp, Oryza sativa
ccgcgcgctaccagcagagcttgcggcgctaccatcagcgccacgtccgggcccgatcactctgcgtcgacgacctcgtcctacgccgcgtccaaacgcgtgctggattgagcaaactctcaccaatgtgggagggtccgtatcgagtgatcggcgtcccccggccgggctccgtacggctggccacgggcgacggcactgagctgccaaacccgtggaacatcgaacaccttcgtcgcttctacccctgaggggggggtcgagtgtcaggtttcgggctcgggctaaccccgcacccccctcgggtgtgccgggttagccgggggctaccacacatgcacagttttacttttcttatttcagcatttcaataaaggaagtttcaatttcctaaaggttgtgtctgtgccgtttttccttctgaagaatcttaacttgaaataaggtcactcgtgctcaaccttgccctcgggggctcggttcggtcagctaaaatcgccaaacggggcccagaaccgagccgtgccccggggcgtggtgaactccgggggggaatcggcaaaaacccacaatcgggtcacccatacccctcggtcaccacgttcccggcctggccagtctcgacatgtggatctccccaggcactagccccgacccgagccattcgaggactgggacttgggcacgagcccttatttcaagctaaggcgcaaaaggaccatggcacagatcatcctcatcgtgtatatatagcaaaataaagttaacatagaaattttttatcattttttgattgcagattaagttaatttgtacacaaaagaggcgtgaaggccttagaagaaaggaaaagaaaaagttggagattggcgggggctcgggggctcattccaacgcgcccgggtcgccggccttgtcgccaccgtcgtcctcaccgctggcgtcgccctcctcgtcggagctgggggcgaaagcaagccgaggggccgacccctcgaagccgttgacgatgtggtcggcagcatccccgacccgcgcgcgcgcgtcgtcctcggtcccgggagggaactcctccagcgccatccatggagagaagttggggtcccgggcctggtaactcgccagcacgagttcgaccgctccccgcgcgaggtcccttgaggatgacttaatggtcttctcaagctcctcggggagttgttcgagaacccaggccatcctgtggaggtgcggagcgaggccttccagattggtggggggcaccgtcgtctggcctttccagaggcccgcttgccgaccggcgcgcttcaggcgggagaccgcatcccaaagcatgtcgggcccaatctcgcccgccaagcgaagggcctcggcctccccggtgaaggagtccagcgctcgctgcatatcggcgacggtgtgttcggcagctgcgaggcgggcggctaagtcgctttcgcccgcggccgccccaccgatatgcgccctcgcgtccagctccttttcccgcgccttgaggtcagcagcccgctgctccagtgcggctctctcggtgcggacgcattcaagattgaggcgcgcctgctcctcctgcgccgcctcgcgaagggacaggctgtccgccagccgtctggtcgtggcctcggcctccttgagagctcgccgcgcgttcagcgagtgcatcctcgcggaggcggagcgcggactcctcctcggcgcaggcggcctcatgcgccgccagcgtcgcctctcggagaccagcggcggcctcacggtccgtcaagcccctctccacggcgccggcgtgttcttccagcgccatggcacgggcctcaagggcctcctcgcgccgccgagacgccgcttcagtctccgttacccgccgctctcggacagcggcggagtcaaggaccccttgggcggcgtcgagcttttccttcagctccgcctcccagcttgcgtgctgaaggcggagggtgtcttgcgcctcgatcatcgcggtggtagcaatgagggcggccgctcgctcctcctccacctcacgagcgatctccgtcagcgccgccttccgggcttcaagctccgagacgtgacggcggtgagctttgcggcccacctccaccatggcgtccaccgagcgccgcccctcctcaacgcgtgcccatgcggcctcgagctccgctcgttccgcgcgcagggcctccacttgggcgctgaacccatctagcaccgcggtgtttgcggcggccaaggcctgcagaatgggctcggcgctcagcggggcgacggaagatgaggagaagagccgccttggagagaaggcgatgcggctcggccccccggaggatgcgctgggctcggggatgtcccccgggcccgtttggtcctgggcgtcgcccggtgaggtaggcccaggcgatgcgcccgcggcctcgtcgcgagccgcctcggaggatgtcgcctgagggccgcccgagggagtgggcccaagtgacgcgccagcagcagctgtcgcctcagcctggcgaacccgggcggcctcctcccgggcagcttcttcggcttggcgagcccgggcggcctcctcccgagcagcttcctccgcttggcgaacccgggcggcctcccgagcggcctcttcagcttcccgaaggcgatctgcggcttcacgccggtcagattctcgcctccgctcctctgcggccgctggatcttcggcctcggaccggccggacttggggtggcgggaggaatgcgacgggacattgctgaagcagaagaaaaaaccagaagacgaacaaaatgagtaagaaaaaacttacttttgggagaaagatggttgcaaggagagtgagacgaacctgcgagggggtcggttgaatgaccactttggaggggaaatcagatttccccggcatggttccgtctcccccgtcttgcggagccgtttctttttgcgctccccctcgggctgcga

SEQ ID NO: 6859 - DNA, 669 bp, Oryza sativa
acaccatctaggcacaagctaggtagagctagaaggatggctatgagggccatatatggagatgaaatatctcagtacaaccaattatgggactatggacaagaattgacaacctctaacccagggagctcattctacctgaacctacattctggttgcttccatactttgcatatgtcattcgatgcttgcaagagagggtttatgtctgggtgtagacctatcatttgcattgatggatgccatattaaaacaaaatttggcggccatatcctaactgctgttggtatggacccaaatgactgcatttttcccattgcaattgcggtagttgaagttgagaagctggagttggtttcttgacactctaaaagaagaccttggcattgacaatatatctggacagtgatgactgataggcagaaggtatgacttcgtctgaattttcataatatacataactcacatttcagttcctaactataattatttctaattcgtttccaggggcttgttccaactgtgagaagggagtttgctgatgctgaataaagattctgtgtgaggcatctatatcaaaatttccaagtgttacataaaggggagacactaaagaaccaactttgggctattgcaagatctagtaccgtgcccgagtggaatgccaat

SEQ ID NO: 6860 - DNA, 5880 bp, Oryza sativa
ggtgaccgaggtgctgcacggcgctgcgaggcgagaggtgaagacggagcgacgcggcggcggctaaggcgacggtggcacacggctggagacggcgtatggtggaggtggctcgggatgcacggtggaagggtggttgcggtggtggaatggggaaacggagcggaggccggggtagagcttggcacggcgttgccggcggcgcaagcggcgaggtgcggcgacgactagcgcggcggcagcggccggctgaaggcggtgtgtggcggtagtggctcggcctcgcgatgggaaggtggttccggcggtggaggagggagatggagtggatgccggggtgcggcgaggcgctgtgatgctataggtggcggcggcgcagcgcggcagcgacgggagcggcggtggcgggcggctggagatcgccggcgagcggcggtgaaggggatcggcgtggagagctcggtagagggtgtgggggactcgggaaaacggggaaaaaggaagaggagtccacggggattgattttatagctcaagggggcgaggagagggccggggagcggcggacttcgagggggagtggggcggcgtcatgggggtgtggcggctcggcgtggcgtcgattcccgcggggagagagggggagtggggcgggatgtggtcgcgaggtggaaggggtctcgggtccacgccggttgggacgaggggaggtgcgggatcggcagagggagtgggcggcgtggccgacggttggagctggccggaggttggggatgacaggtggggtccacgggtcccacctgtcggagagagagagagagggagaggccggctggggaggcggaacagacttgagggagggagagagccgagcgggccgagggaggaggccggcccgagagggagagaaagggggcgcgcgggccgcgggagagaaggaagacttgggccgaaaatggcccaaagagaggaagggggattttctttgttttctttttattttaattgattcaatgatccttgtgctattaaaattatttctcgagctccgaaaattcgcgggaaatttcagagagtattttagggcacaaagaatattacaaaatattctcggccaatgatttttaaaggaaatttttaattccctcaataattcacttggataaattgcttaactttttatttaatttctaggaaatgcattattaaatgatttttaatcccgaacgaaaattggggcgttacaaatctaccccccttacaggaatctcgccccgagattctgggatggctagaaagaaagctggtgtaggctgtcggtctgactgatctgacgggtctgcacactgcactgcccctttctatcttgaactgactgattgactgattgatcaaacctgcaccattgaaatggctggattcgacctttctattcctttgctttgccaaaactagaccggctagttctgcttgaactgacccggaccagaactgtggctgctcacgaaacttacttatcttgatctgaactgttgacactggcagtttgataacctgacaattcaccaagctggctagagaagggtgaagttgttcctaagacttgcatctggcatttgtaactcattgatcctacgtccgcttgaacgggtcctggctcgaatgacacgtaattccaggaaacctgcttgacctgtcttttgtctgaactgcaaccgtccctgatgctgcttctcaaagctgagctattgacctagcctcaccggtgtacctcagaattcaatcagataacttgagatcggtgtaactctgctgacaccttgcaactggcttcttcaagtactacccggattgttgcactgggttgaaccttcaactaaaacagcgatgaggtgagccaaaactcatctccgagacctaccccccttacaggaagtagtcttactttcgcctgactgggaacaattggactattgtccttggaaaaaaaaataaccaacacttctctgacttacaaagaccctcactttgaaaactgaaacttcgtcgattcatcaaaatagagcaatgacgacacactttcatcccagcaaaatttggaatttaaccctcagttgctgataggaaattccacataaagaaattctcatttagctcctgatcttactaactcttaactgactttcccatcagtactaactgctggcatgactgtccttcttctgacctgacttcggtgtcgtccacctaaatgggttgtgtagttgatatctcaaaactaaactgaccgactcgcattggaattgacacaacttgaggaactggggtgctgcgagtagagctgttgtcttgatgacgctaacgccttgtcgttgaacaaccttgcaagaactgaccttgtaaaccataaccactataggtagcacttgttgcctctgggattggtggtgacttagctgtgctggtctgctgaagacttggtggcgtactgtctgaggttgcaggtgcttgctcttggaaaacaaactgactttcgctctgatcctgattccggcttgcatctgagcttgtacttgttgttggagacattgtcgttgcatctgctgctttggactctgcggttgcggtatcaacatctgacacatccatcattagatcttggctagccaggatctgaccagagcgaggtgctccgactcagctggtagcttgttgtcttgaactgatccactgactctgactgcaacacactactgctagagttgcttccgctacattcgaccttgcatcgagctttgcatctcctgcatcaatacacccatcttctgatcctggataccaaatgttgatcacgagcaggggttcttctggcatcgggagtacctggtagctttcgactgatccattgatctgtgactttcatacaccgttgttgttgctcttctctctgatactgaccatctgctgccagaacagaagagaggtggaagagaggggttgctaaagataaggtactaaaccacttgcctattgatctgttgtgagtagatttttatggtttaagttgcttaagcaaacaacctagtatggtcgcatccccaccaatgatgcaaaccatacccctgcacacaagcaaacaacacacgatcttgctaacgaaactacccttcagggaaggattgggtttaggtgaacttcgggaaaactcttcttgatcttcgcggaacgacgactctgaactgaccttctcgctctttgctgcacgaagcttgatgcttgacttgacttccgaacagacacgaagctgacagtttgtcctccacggtttaacaactataagaattggagggacaaggaggagaattttgaaaaaccgtttcgcaaagaaaagccgaagggcgaggggagacattttgcaaatagggttttcagaaagcttgtccttagggtttgaccatttggctcaacctacagtcgagttggctctgataccactttgtcacgcccagaaatttagcccaaatttccagactattttgcgtattaaatccctgtccaggaccagccagggtacacaaaacgacaagtaatatacagttccaaacgtaaataaagcgtaaaatacttacagaagaggcacttagtcctcacaccgaaacaaaagcagcagcagcggaaaaaggtgatcctagcggggcttcagctccactccacaggcaaaactcaactggggtctgagccttggtcctctaactccatcttcagctcagaagcgctacacttctgaaaagggggaataatagcaaggctgagtacaaccaccgtactcagcaagccacaccaacgatgcagacgtgcaaggggatacaaggacggtttgtggctatttgcataaaggcggttgtaaaacattttatttaacaaacagtaaaattgttgaataattaaagtaacattaaaatctccactgatcaacgctacaccacgttgaacaggcccaaccaacccacctggactacagtgtattgggtcgatttattaagatgggactaatcacggtgaatctggtcgatcgcccataaccgcgggcacggctatttgaatagttttactctggccagaggtgcacaactgtacccacaagacacaacccaccgacatgtcaccgcgtcatcatgtgcccatgatgcacacgtcaccatgtcgagtgattgtgacgagacccttcgcataaccctcccctaaccatccacaccacgctaaggtttcacccccacccctcaaaaggcagtgggcggtcccctcttgcgccgcggtgaatccggcagctggacaaccggacaccccggccgacccaactccatcacgcccaccctcgccaccggtgcctaggaaagggtcgagctatacttcagatcaagcagttacccactcccgcttgtggcaagcgctgtaagtcttccagggtttcccgtgaaccggtccttaattgccatgggtgcgactcacaaaaccatgcacccacagcccaccattcagtcgcattttagttggataattacgaccataaaacatggccagatgtctcgagcacgcggctcaacaagatactagaatgtctaatactgcaattatcccatcgactgagctagtggtaattaagcatggctaagcatatagttctagctaggtcacataagtaacatgagctagatgatttatcacccaaggttgacaaaggatagatatcaagtaaacatggcacaagcgagcagataggtaaaccctgaccccgtgtaattagcaaaacatgcatatttatttgtaaacggtaaaacatttataaattgggatcaacatgctcaaggggaatgtgtgacttgccttgcttcttcacttggattttctgaactcttttcctcgcgaccgcgatcttccgaaacaacggattctacacgctggcacgcaaaacgaggaaaaactctaataaagaccaagcaaacagtacataaaaagtaaacaaacatgtagagctcaattttagatgaattttgcaagttgaatggctcaatttggagttcgaatgaattagatatgaattttagaaggttttgagccattttaatgaatttctagaattattaccgatttattgcgcaatttaaatcaattatgacgtcatccgacgggggagaggtggcgccggcaagcgggccccacctgtcggtgactcacgggtggcgggcgcaccgtggaccgagtccacgcacgcactggtccgcgggcgcaccacgtggcagacacgtggcggccacgacggacggctagcggaggtggcgccgacgtggcgccacagaggcaccgacgcgggcggcacgggaaggccacgtggacgacccagaccgccccgaaggaggatcgggcggccacgggcgagcgggagccggctcaccggtcgaccggccgggagcgacggcgcacggcccgatggtcgctggcgacgaccacaggcgcgacggcacgcgcgggaggcggcgcaaagagggaaaaaggagaggaaacggagggggtcctcaccgaggagcgccggcgacgggacgaccatggggaggcgaccggcggcggaaaggatggcggcggccggcacgggaggcgacgggaacggcgttccgacgacgcccgaccatggcggagccacggccgagggccggcaagacctggggaaattattggagcggttagggagggaaataggcgaccggagcggcgagaataccacgccggagaggagaggaatggtggggctcaccggcgaccgagagataccacgttccggtgggtttccggcgatgaacaacggtgaccgaggtgctgcacggc

SEQ ID NO: 6861 - DNA, 29939 bp, Oryza sativa
attctcttgctcttttgatccaaacgttagttttatagcttgggtcttgacactaggaattgttttggacaggttgattaggttgctctcgctgttgggtgggtgcattagtgaacatattgttgacaggttgagttttctggtcttttgtttccatgggagtataactaaggatgacgaacttacacatgttcacaccacacaaacacaaacacaagcgaactagtgtgcaccaagtacacagttcaaataataaaaggaacttcccaaacccaggcatgaatgtactcccaataaatatatccttagtattaaatggcttaaaaattcccttttcacagtacagtagctagcgagagtgtgaaccacgtcacgtaaaaaatggaacattccacacctcgacacttttttattagtaacgcccgtgtgggtatttctccaaataaatgtgggtagaacaaacatccctagctagtacccaccattgtgtcatcgacactttcaattcagcctagctaagtcagtaaaaaatagttgcattgaagataaaagcaacattgagatgttttgccatttattagttccctgaaacaaatctttagcatacataaataaagataaaatagtaaatgtgattcaagacagaaggtttatgctgacctcactgtagatacatagtccatatcaaacccaattcaacattttgccctttaatagcatatagaggacataacactaaggattcacatgtgatgtttctcaatgaaaaaaactatatattatctatatttaatcatgtgatcattttttgctctgtacttacaaactttttatgtatgtaaagattgtgtgatcgatattattgctcacaaatacccttttcacactacataagtgagcaagagtgcgaaccatgccacatataaaaatggaacattccaatctcaaaacttttttcattaaaaaaaaagctcgtgtgggtatttattccaaagaaatgtgggtgcaacaaacacatgagtacccaccattgtgtcatcgacactttcaatttagcctagctaactgagtaaaaaatagtggcattgaataaacatttggatggttttgttctcaacataattccagcaattaaccttttcattaaacacacgtatatgtacctttcattaaacatttggatggttgttcccaacatgtacctttatgatagttcttccgatctggagcacatggatactggtgccaaggtacctgctcaaaggacgggcgcatgttggcgatcttgttcacagacatgtaaggactcatgactatgatgggcctcagatgatggcacgctcaagggatggagctttcaggaagttgagctccttcatatggaccatagagagaaccaagcttttcatggtggggctcatgatgtccatggaaaagggcatgtcattggggttgatcaacgagagcagctcaatctcagggcagctgacgagcaaccggtcaaagtcattagcttgagtgtatccctcgcacaggatgagctcccgcaggcttggcaggaagacggctttgctggccctcagggtcaacttttacggtggttggccaaagagcgcgacagtgtggcacaccatggaggtgcaggtgaggatcttgggcgggagggtggcggcacagcgcatgccgctgaggtgcacgatgacaagatcctagacgttgtcattgcgttccaaggcacggatccaatacctgaggctgtcgtggcggttgaagctggtgatggtgagtcggacggagtggaaggggcccgggtgggagtcagtggtgcgcgacaccgtcttcaccaccgcagagtgtgtttttggaagcccctggcaacggggcccactatgggacaaaacagggcatcatcgaggacggaggggcacaaatccctagatccaggcctagggatgggacagcaccattggcggcaggcaggcgggacacaaggtcgcgaggagctcgggtgggagctggctgatgccggttctatcagatgggggagtggtgttggtggaggctggcggcagcggaaggtaggcaaggatttcatgcatgcactcgttgtgctccatatgatcggcggcggccgacagcgagaggagagcggcacactgtgagagggaatagggaaacaacgatgaaggaacaagagagcgaagatgagttgcatcagaaatgagaacaatgctagggttccgtgccgttgagccgacaacgtggtgggccacagtggaagtagggtcagccgtagccctcgcctcatgaggctgcccctgcccctgacttgcgccatgtcaggttgaacaaatcttatagcagtttttctagccttccaaaccatcacccccatggaagcttgaggtcgaggccattgatcgcctcccaaatccatggttgcgatgcgagactgtggatgctttctaaggccctgactcctaatggttctttgacaacaaataatgcggataaatgacgccagggcaaaaaaatgtatgtgaagtatacaatatcagcctagcacaaaggggatttttttaaaatttttctaggatcttggtgatagaatgttctatcttcctgttctctgttctacacatatttttttgttcagtatgtcgcctggtccaaccgtccaagccattttaacatttgtatttatgcacccgttcatgaataattatgtatggtgcattttttattaatacgagatatgattatgtctcagccattttgctatatatatatatatatatataattgggcttattaggataaatggctggttggataggatttttttagcaagggcatgagagcccccatttccattttgtatggttggataggttaggccatattgatgtgttgagttttgaaatcctttatttttgtgcgagtataactaaggatggcaaatggcgagtataactaaggatggcaaacttacacatgttcatagcacacaaacacaaatgtgagcccacaagtgtgcagtctactacttatgtgataaatattggaactatccgaaccttgaaacatttatttattttccattaaacacaaatcttctgctatttccccacaaaaaaaaaaagatctgctgctatttactctaaataaatttaaactgaggtgggtgggaacaaattaacacccttcatcccgcggcactgtggttgataaaataatatcatgggtgtaaatagtgttaataacattttctatccagcctaagtgtgacaaaacagtgaaccttaatgccatagctaaagtgttttgcaattccttgaacattaacacatcaaattcaatttgtcttgcttgaatttgcctgagtcagatcgaacaaaaattcagcgctcttgatatattataatctgaacactggttaatttggcagcctatcgaagatcctcagtctacccagcttgatgactttgagttctgggaggagatcaattcagttgaatgtgtcagatccagcatcaagaaggtagtgttccatgggttctcctggaagaattctgagatagcgttcatcaattccatcgccgaaggaggattggtgctcgggaagatctgtatcttccagagtcgacatggtactgccccagatgatgatgaactgaatgctaagctgagcatggtagcttctctgaacatcggccttggccgtacagagatcatattttcaggtgaagatccaacctggtgctctagggcggcagctgatctttctcgtgctgatcctagtaatggtaatgatctttcatattttcatagcgagatgtttttgccatttaatttcctgaaaaaaatctttaacacaatataaatgggatgcaagggagaaggtttatgctgacctcactacactagcccacataaatcccaattcagcattttgcccgttattgaaagacggagctctagggtctaaaccacaaaatcacatgcacatccatccatgccaatcagtggtggagtcagcactgccgtaaaacctgggcgactagtagcgtttttaaatgaccgactgatttttgtacgtgtcaacggctaacgacaatggagacggtagtggcggagcccaagtagccgaccgacctgccttccgccgctgatgccaacaattctcagagatttttgacatttaattccctgaatactaaagcaataatcagaagtttttgccttttaattagatgaaacaaatcttcaacagaaataaatgaattagatgtaattataaattattgtcaatatatgtagttactgattgtcgatatatgtagactgtgtaatcgtatttcctttttcttgttttgagcccaatggcataaaacgtagactcaagatttcaaggttacaccaaaatcagaaaatatacaaaaacttcatctgatgaacattattgaagatattagctaggtttcatcaataatttttatgctagctaatcaattttgatattgaatcacaaaaggtctggacctagatccatgatggctgattaattaataatttgtggactttaaataataataatttgtggattattattattattattattattattattattattattattattattattattattattattattactattattattattattattattattattatttcatttcaccttctctatgtatgaaagatcccttttctgaatactgagagattttcagatacaagaatgcatgatattaattctgacttaggtgtataatttgttctctctctctctctctctcttgccagagtgaagctttattttaacacaaactctgatagctctgtagttcagttgtaacttttgtaacagtagaataaatttcttgatttgttacactattgtttttacataaataaacatattttgatatatgtgtaacaaaaattaacaaatgcagtctacagataagtgtacaactaaggattataaacttacacatattagttacatcacacaaacactagcgagcgagtgtgcaccaagtatatacacattccaactttccaaacctcaacataattttctcattgagcacacccgtgcttgtgtgtaatccaaataaatgtataattaagatagaattgcttacaaatacccttctcacaccacgcaaacacaagcgccaagcaagtacaccacacacgccaaatataaaatggaattttccagacctctaatttttttttccaaaaaacacactcgtgcaggtatttactctaaataaatgtgtgtgtgtggggggggggaggggggacaaacactcttactacccaccattgtgtcgttgacactttaaattcagcctaagtgagaaataaaaaaaaataaggtggcattgaagcaacaattggatatggtttttgcgaacgtaattccattaattaaacacacgtctatataaacaataaatcaaatatgcaacacaaagggttaaactcagtttggtgggaaacacacatcatccttggcactactgtcattttacatccagcctaagtgacaaaatactgaacatttttaaacaatagttagagggtttttccattaaatcagttagagggttttgccattcaattccctgaagacattaaagaagcagtgaagggatttgctatttaattcacagaacattaaaagcaaccgtgagatattttgccatttattgattccttgaaacaaatctttagcagaaataaatgaagatacaatcataaatacgtgatgacagagagaagatttatgcttacctcattgcagctagtccaccatcaattccacttcatcctttcgccctttaatagcacatataggcacacaaccctaaggattaaccccaaaattcccccaccaccgcactgtgcccgctgccaaatcccatccgtgtcaatcaccatgttctccctcctttcccttgcccacaaactctgccctcgattcatctcccccaacaccgcgagcggcacacctctactaatgatggtcaagaccaaatcactgccctccccaacaatctcctctctgaaatcgtctcccgcctccccatcattgatgccatccgtaccaccacactttcccaaggctggtcaaggatttggcactcggtgccgctcagcctcgatcactcccagatccgacgtgccggggagaacatcctcgatgatctctccaacagcgccatggtcgctagggtctccagcatcctgtcctcccaccctggccccttcaacagtatccatctgacctgcagcagtatggggtctcacaatgacgccctcaagagctggttcaaggcatttgctgacaagcacctcaaggagcttgccttcctcaacctgaactacccaaatgacatcatggtacctactgatctcttctgttgcaagtccctgaagcggctctaccttggtggtgtccagctgcctgcaaacactggcatcatcccttgttcccacacattccatgaactctgggagatctgtttgtatcgatgcatcctgcacgagtgggacattgagaacctgctgacctgcagcccaaaggtggagaagctctcgctggtcaacagtgcttgtggttggccactgcggctgcacatccgcagccacagcctccgatgcatgctgcattgggcctcctcgttggaggagctcgctatggtatccactccatgcctcgagcgcctcatcctttggagggatgatgctttgcactggagtgactgtaagaagatcaagatctgctctatgcctaagctccaggtcatcggatatctcaaccctgcggaccatgttcttcagattcgtgatactgtgatcaaggaatggagctctagatctcctgtttgtgtttctttaattaatttggattattagtatctaaaattaaacttatgtatgagtgtgtgatttatttagtggtgatattactttgcggtttggtttaatttcatatattcataatgtagaatgacatgaaggctagcgctgctacggttgttcctagtgtcgaggtcttggcaatgactatccgttttggtgttcacgaggaagagcggatggtgccttgcttcctcaagtgtttccctagcgtaaaaatattgcatgttaaggtggggatattaattgtgttccccctttgattttgtttagttaatttttacattatttttaatgaggccatccacccactgacttaacttttgttacaatggtttttgtagtctattgcacgtactcagactaccaatgaggttaacttggagttctggaaagatgttggatccatccaatgtgttcggtcaatcatcaagagggtgatatttgatgactttagtggagaggagtgtgaacttgcattcctctctttcattgcacaaaatgcaaatcagctggaagagatttacatcatcccttccaagaaggatctttctgcagggagttctctggggaatgtcataaatcacttcatgtcttcaatattatgggcttctgcatattgcagggtacaagtttgtgccagtgcaaaaaatgcttggaactaccaaatggcatcagatctctctctttatgacccttttggttatatcgtgtcagcaataacgacagcttcttgtccttccctggtacatggttaagctacgagtggtgcctaaatgtgaacattcttctattgtaaaccagatcaggcagttctggtgaattcataataatgtaatagtaagacaatactgcatgttcaagctgtctgttgtctaaaccttataggttgtattcgatccatatgtttcagatgagatgttgttagttttctcaatgaaaaaactatgtattgtccaacatttaatcatgtaataattttttgctctgttttttactgattgtcaatatatatagattgcgtaatcgtaattcctttttacccttttttatgctttgtgcccaaaggcatacgacacatcccttctttctatataattacaaccacgagcagccaccatgcatatttagccatctaatcagaatagtttcaaccatcggatcgatctgcagtaggtgttagatgaaagtcccctccacttccttaccaattaaaatgatgctattaatctttttccaaccatctaaaaattatttaatctggcagtcaactggacactaatgacatcaattttggatcgacattaccattccattcatctttccgttcagttttatatgcatatactaataaaaaaatgtatgcatatacataggaaagcatacatattttgttttccctcacaatgcttgtacttggtgaacagtaatcaacatgccgatcatggaagcatgcaatttgcctatgtttcatattcatacagattcctgcagcaatgctaggggtatcaacaaataagactaaagatttcatgggacacctagatcagaaaaaaaaaatacaacaagttcattcgatgaacattcaaaatgttaattagactttagcagtactttctattagctactcagtttgaatattaaatcttcagaacatttgatctggatccatgaaaatgtagagaatcatggttgattgaaatttggtggattttacatgtaacatatactggttgttttgtttcaccatactaggaaccatctgaaatgcggggaacttttcctattccagcataaagttaagtttttcatgtaaaccacttatgaactcactgcattctaaatagaatgaaggaatttatgccattacaagaaaattattttgtcataacataattgatgtttacatagcttcagcaaaacatcttaatgtatactaattggagtctctcctagcaacccctacattaatctaaaaggtaaacaagctagaagttcccaaattaatagaaaagctagaaattctcacactaatgtaattaaaaaggataaaatcatatacgttcgtctatcaaatcaattaatgagatcttttccacctcataatatattcatctatgaaaataggaaatcataaatatatggttgtattcggtttagactcttaattatagttttttcatgattgaatcatttcaaaatttgaaattaataaatgtagagttgtactcgttctgaagtctcagttattttagacaaaaggcagtcacctgcccagtttttcattgcaagcataagagttcgtacaaagcaaaataaaaggaaagtaaaaacaagttgctggggtttccagctttcaggatcagtacagagagccttccaagacttcacagcagaagtgcctaattttgaaatataaggactatgctgctggcacagcagaacaagccagagagggaaaaatcaagattcagcgtttggagagctgccaagccctcctgtctcgctaatgctggcaagcagagatccccttaatgtatccaggtctcccctcagtttcgcaggtgctaagcgcctccactgtattaagaaggagacaactttgtgaggcaggttaatcacatcagctagcagcttattattaaacacccaatcatttctagcaatccatatggcctagaagtaggcatcaaaaattgtgagccaaacagagttcttcccactcttcttttgcataatctctaggagatcagctctacacacatgcactttgtcccaattaaaagcatctctcaggcaacaccacataaactgtgcaggggcacacatgaacagcaagtggtcaatctcttcttctctaccacacaatttgcagttagcaaccccccccccccccctacttcattttctttagttgagcagctgtttgggtccttcctttcaaagctaaccaaaagaagatttttattttcagagggattgaagccttccaaatatcctgtgggatctagtatctttgacacctccgaagatcatctccctatacagagttttggtagtaaattctcctgtttttgtcaatttccatatcattgtgtctttgttagaagttagctgtatgtctcttagtttctcatgcaaatcattccactcccctacttctctgtttccaattgttcttcttataccaatctcccattccccccagtgttcatttgtttcacagtactgttagggttataacaaatactaaacaacatgggatactgggtttttaaaggaatttcacctaaccacacatcactctagaatctaattgacttcccatttcccagcttataacaactaccaaggaacatccatttcttcacttcatgcaaacccttccaaaattgtgaaccccccctcagcagaagattgaaagaaacctcccccatttctcatatacttcatcctcaacatcctataacaggggtcattagctcctgattccagcttaaaaatacacttacaaagcagagccctattcattatctttgtgttaatgaaaccaagtcctccaaattccttaggtctgcttagagcttcccatttcaacatgtggtatttcctcttcttttccaggccctcccaaaagaacctggctctgaagtctcagttatagttttgaatgatctaataatattctgaaattctgaatcaatcaaaagaaagttatacttgacctgtagtttcaattacaatttttttatgattggtttaattcttctaaaatttgtattaataaaagaccaaatcatactcagttctttatttaataaatccaaatttaagaattaacaaatcataatagttaattaatgaatattaggtcttggttggcctacaacctcaataagttttttccctatattttaatgattctaaattaataaatattgagttgtccttagtgtgaaacttcaattataatataattgtaatttaataatttggaaatctaaattagtaaattccaagaagatattgattgtttaaaatatgtagtgcctgggaatgtacaaattaatggcttgcaaacataattaaaagcatattcctagaattcctttaatttattcaataactaaaatacccaatggatggtccatctatagcaattaatattcttaattcatgtgaagaattaaagaaattagctgatcgattgatcgaactattggtaaccgctattgtcagtacgacaaaaagatgataatggcaagctagggcaaggcgagattaggggagcgaaatttgaacgcctacgtgggagaaaatatctcataattgagagtgatcggaagcggattggcttaaagtaaatgttgatggctcttattgcgcattctctgttgaggcggacattgccattgccatgagagactcagcatggcaagttcttatatcttcttcgtgagtaatctgggatggtgtggcaggagagaaagttgaagctatggcatgccgagaaaggctagctctcgccgcagagtgggttcgcaaacccattaccttgagtcatattgtgtggcaatgacatgtttccttacatcaaatatagttgattggtcatcaatgaagccaaacgtataatataatgtggttgtttccgaaggtgaaggttaggcatatatatattagaagagagtgtaaaagcatagcgcatgagttagcacagtttgccatggattaagcatagtgcacgatgttccctacttatatccatttttatataatggaagttttattgaattcagtacattacattgaggtgataaagttgtcttaaaaaatacttatatccatgatcttataatcctcaaggatgattaattaatataacacccttttttcttgtaaaaaaaagtaatgcatgagatcctactacagagtagagacatgtaaacaatcaggaaaaagtaggggactgaaaacagacctcccacacacacacgaaagagtacacgagggatgtgactgctggctcacatccagtcattggcttagctagctgccaaatgggccccaacaacgtacacacaaccctctcccctctccctagctcatgcgctccaaccttgcaccacaaccacactgcatgcgctccgtccagccgcagctaacaaactgatgagccgtgtagcaatcagcaactggcaaacgggccccacgcagccacgcctcctatatccacgctgcccagcggcgcccacctcgattcccccttctcctccacaccaccgcgcctcactagcctcgtgccctcgtagctgccctcgcgcgccaccaccatgccgtccgccatgaacatgatcaccgccgccttccgccgatacctcggctgcttctccgccggatcaacccaccgccgccgccgcggcgccgctgaacccgtcctcgccggctcacttacacttcccgccgccgccggcggtgacaacgcggccaggcgccttgatgtcgtcgtccccgcccccagccgccctgatggtgtcactgtgagcggcgaagatttcatcggtagccttcctggccatgtccgctccgccatcgtgtcgcgcctcccggtcgcggacgccgccgctcgcaccggcgtgctgtcgtcgtcgcagtggaacgggctctggtcgtcgacgccgctcgtgttccaggactccgacctcatcctcgccgcgaacttcaccagcgtggcccccgtcgccgccaccgtgtcccgcgtcatcgagaaccacccgggccccttccacaccgtcaccctgaccagctacttcccggagtccgagcgggacaccttcgccggctggatccgcgccgtcgccgccaagggcgtccgcgacctcaccctgcacaacatcccctggtcgggcctccacgtgctccccgccgacctcctccagtgctgcgccgccctggagcgcctccgcgtctgcgtctggcggttcccggccacggccggcgtcctccaccccggcggcggcgacggcgacggcgccgcgccgccgtcgttcccgcgcctgagggagctcgtcctcaacaggagcgccatcgaggaggccgacctggagaacgtggtggcgtgcagcccggcgctgcggacgctggtgctcgccttcagccgtggcgcgccggggcgcgtccgcctcgccagcggcagcctccggtgcgtcgtgctgtgccagtcgctggtggacgagctcgccgtcgtcgccgcgccgctgctggagcggatcgtgctgcggtggtgcgcgtcgggcacccaccacggtcacctcatgaggatcaggatcagccgggcctcgtcgatcaaggcgattggttacctcaaaccaacctgtcatggcctgcatattgatgccactgttataaaggtaatctagctagctacttccatttattgattattagttatattttgagtttttatctgtacagatttgtggattagtatacttgggggctttttagatggagtgtttgtacttctgaggcactataggagtagcaaagttcacattattttttgaaacgagtagcatcaaagatagtcatgtttcatattgataaagcatggacaaaatttgcattaatttgtatcggaacctcaatagagcatggttgtacctagcctgtcagataattttgggggaaactttttccccattttaagtgataacttcatattctctcatactacctaatagataattgcatcagaaacataagatactagtcgatcaggaatgagaagcaataggaagttgttgctttgttggttatatttatttaaattttcaccaaaatttctttgttgcattcaaaattatattacagaggggattccaaattaacatatgtcattgccttgttttttttttttctctttgctctctccgatgtttacatctatttactgtagcctgggataacggctagccccgatgaagtggctgttccaagcgtcaagatattgggtttacaagttcgatttggagttgctgcggaagcaacgatggtgtcctgcatgctcagatgttttcctaacgttgaaacgctgcatatcatggtaaggcataaaattcaatttgtcttgcttgaatttgcctcaatcagatcgaacaaaaattcagcgctcttgatatattataatctgaacactggttaatttggcagcctatcgaagatcctcagtctacccagcttgatgactttgagttctgggaggagatcaattcagttgaatgtgtcagatccagcatcaagaaggtagtgttccatgggttctcctggaagaattctgagatagcgttcatcaattccatcgccgaaggaggactggtgctcgagaagatctgtatcttccagagtcgacatggtgctgccccagatgatgatgaactgaatgctaagctgagcatggtagcttctctgaacatcggccttggccgtacagagatcatattttcaggtgaagatccaacctggtgctatagggcggcggctgatctttctcgtgctgatccttttgattgctgccgttgaagatcgatgtctctgtgctttgatcatcttcgtactatatatacattttgtgcttcagaatgtcacacagtctgcaaaggttgctcaaggtagttatatagcgaataaatatgtgacatctggaaattttatcatgtgtgtgtaccagttaaattctatcctgtggtattaataaatggtactggcgaggcagtgtgcaacgctttgtactgctggattgtgttttaatttccttgagcttcttgtttctgttgtactgaatgacaatgattcaatctcatggatttccaaactagcattatatagtactgtttataactttatatagattctttctcttcagttgaaccattaatccttcaaagataaggatttagttagataataaacagatgaatatcttaaatcaaaactgtcatcccctcgatcgtcgatttttaaatggcagaactccagcctttatgttcaaaagtgtgtgtctgtgtgtgtgtgcgattatgttttatcttcttggtagactgcattacatacatatactacatacatggaatgcttacctattatcatgtgataatgttcttgacagattcttcagtccgacggtaatgtacgatgtttctaaaatcacctagtcaaaattaaaataaagcatatatactaatagtctaaaatcacttccttgaactcgtttcagggataattaatccatcaagatacaacttgttgaaatataaaaaccaagatattttttttcagatcctcaaatcaaactaagcttcataaagttcttcaaatcatgccaatatataccaatctgattcagaattggtatagagctgattcagataaaatcatgccaataccagtcaggccttgttgtaagaatctgaatttcaggcctgtgccccttcatctgcaatatcgtttgcatacggtatgcgtacattggttatctcaccttgcagcaatgcattcttctcatatgcagcgatgttatgtcagactaaaaaaaatgactgaattgaaaacaacccgcttttatttggaacatcgtatacgaaattttccagattttgtgtgcaccatactatatagggttaattggatccatgccattataaaattaccggttttgaaaaataccactactatttgtataattggaactatgccactacaacattgcgaaaattgaatccatgccatgctatacacctgatacacgttttgaattttttttctatactgtattttcacgcggaccaaaatacccctcaaattaatccaaccacaatagccaaatcgatccccttatcccgtcgatgcggagctcctagaagcagcagcggcgcggccggcgagcgtgaggttgggtacggcagcaacgtcctgcgcccaaaggcggtactggcggcgggcgtgaggtcgggtctggcggccgcgacctgcagcccagcgccggcgactagctcaacgcgagcttgctcttgacacgaaaagatacagtggcggcggtgacgcgcggtccacggcggcgatgagctgcaagcggccagtgctagcgatggaggagatggacgacagctcgccggctcgggcggttgtggacggtgacccctctatgccggcgagtgatgccgagggcagcgactggcctgccggtgttcgtggacggcgacctggctgctccaccgctcttttcttcttttttcccaattattttcctcttcttttttttcctgtgcaacttttgtacacgagatgcattcaaccattttgtactgtgaatatgaagcggcagcaatttgttgcaacggcgatttcaaatatttgatttaaaactttgttagatctgaagcattaaatcgtggagttgacatgaggaaggatagtgttgttgttcagagcttgagactacacacggttattttagaccatacgaaaatacggtagtcacaaaacaatttaaaatgtgtttcagacgtataacgtggcatagatctgattttggatgtttcatagtggcatggttccaattatacgaatattagtggtattttttaaaactagtaaatttataagggcacagctattgtgcataagataagaataaaccgcaagacaataatgcaaccaattggagtagtagttaatgaccatagcaaatagtttgtcacatataagactaactaaattaagccccaagtttatttgtgaactagattctgtatgaccaatataaacccctagttgttcataaaaaatatttaattttcatgtgactatattgttgcacaaacacttatgttggaaccaaaacagtacctactccctccgtcccataaaaacaaatttagtataggatgtgacatatcctagtactatatatgaatttggatagagcaatcctatccagttttagtatatgtcacaactgtactaggtttgtttcttatgagacggagggagtaactagctatcatagaatttccaactaaatgatcttttctaatataagcttagaggtctgatcagagtaagttgtaccacacatgagatccatgatgcaagcaggatgaccggttgactaatatattgtctatttcacaagaaaaaacttataacctacatctttctgtatatcatccatccccccaccccaccccaccccacccacacataacataccccctgcatacgcacaccaacccctcgtctcgctctctcagtctcgggtaatggttattatgcaggatatgtgtggttgttaaacatctagattaaatgtggttgctaaaaattattacaaccacaaaaatatggtcattatatgccattgaaggttccatcgttaaaagtattaacgacttcgaataaattcatgtcacgaattctttaacgaatcccactttaatggcccctatctattctcagcgatgggcccaactcaattcatgggtattaatctgaatatccaagatttttttaattaaaaaaagggtatatacatatgtaatgtgtatgtctatattttactataaaagataatagtggtggtggtggttctgccaccagcccaccaccactacttagaatgttatagtaattagtccatggtattttataatattatgtaatagcctaatatttatttaaatcaagtgagtaacataatattaaaataagcataggcatttgactagtgtatgaaaaaaacaagaaagagattgtattcaaccgaagaggttgtattcaacacttaatgcatatgctatatattataccgttagtacatgacagatattagacttttggctataaactcttttttgacccattcacattttaaatacacaacttcaaaatccagagcccgccatgtcaattctcattgatctctaacgatctccggtggtgtcttctaatagcttataatgaatcatgactaaatttggatcactaagacaaattattttgtggttttaaactatacatgtctacttacacccacatctacattagtgaaaagaggatcccaagaccccaccaggatgagccacatcatcaaacaaatatgaaccgttggatgcatgatttggatgaagataatcgttggatcaaaagaaagaaaaatcagttaaaaaagcaaaccgtatcatgaggagttctaaacccttcaaacacctcccaaaatatgtgtctaacaaagatatgagattgaaaaaaaaaagagaatgccttaaaaattgattgtataaaaagaatatcaccaatgagtattcaatagtagttgtattgtatcaataataacaagtatcattgtatatatcgtattgtatcaataataacaagtatcattgtatacataaatagctacttaacctaatactatcaattactccactatatcttaaaattaaaaaaaaacatgtggcatggaggacatagtaaattttgtaaagttgatttaaatcatatgattctaagatttgcgataaaaaagcgtatagatacttctaaactatttacatgtggcattgcaacgcgtaacagatgtagctatttacattatcagtacaaatgatgcatttagatactgaatgaagtaatggtcgcggtaatatatgataaattatttgttgttacgatatttttttatcacaaatcaagatatatataaatcctttaatgttgtaactacacttcttaaaaaatatgttcaaaaacgtatctattgttaattgttactaaacatttacgtccattaacacaagcaacatataaacacattgatagatagagatgacagtcgtgtgaacgggcaacttaataggctaggttttaacctgaaaagcattgaagcgtcttcaaattaattaatggccacattcttaataagaaaataataatatagatgaacaataatgtacataacttatatatgaccatttttttattcatccaagtaaaatagtttaattgattcttgcatcccgttgaaaaggtaaattctaatagacatcatgcatggaatattcagtcagcaccagcatttgggtggctagatagcctaattgaatagacatatatatatttaatttacaactaggaatatactgatttaattaaatagtactctgacctgaaggtgcacgtaccattgcatgtatacttatatactactcagtgaaaacaaccgaatataatgggatatatatcatgcatatatagatgtatcatattcagctaattttgagccctagaaaaacattttgccgtttatggccccaagaatttgtgttatatatgaactgaatggctacagttttttttgctggtatgtcaaaaacacaaatatttcacttttctgggatgcatttctgaatatcactagtaattaccgagctgttaaccaattttatgacaaaggtatactgtagcagagaagagttatctgaaagtagatggctcatttcatttgcttttcttgtggtgtcttcaagttgtcacctaatgatactgatttcaatatatagtagataccacctcatacattatattattagagtaattaataggaagcaatgaggacaaaaaaaaatttctagattgtatttaaagacaagacaaataatataagagctatcttgcaaaaaaaaaaaagaccacataaacttattaaggcaatgaagagggggggggggggcagaaggaatgttatagtgatgtttatggtttctactgcacttagcagtaagcacacgctatttttccaacaatctaactatataggttgatgggcacacaagagcgcgtccattgtactccccccgtcctaaaatataagcagttttggttggataggacacatcctagtactatgaatctgacagactgcctgtctaaattcctagtactaggatgcgtcccatctaaccaaaactttttatattttgttacggagagagtatattatatatgccaaacttgggtagcaaatgataatgaaaggtctaaaggtaataatagtgagaaaatacattatattaagtcggcatatgaaattggatttttttttctaataaaaagtttcaaattaacatgcatacaatgggctaatcagatcgagttttgtatggaattgtttcttcaatcatgtagcagcaacgagcaaataaaaattgaatcaagaaagcgagtaactgatttttttttcaagccaactgtaagaatcttcttgtgtgaagaaaacagaaattacttattttaaaatagaaatatggattacacaattaatgcaccccacaaacataagtcctagtctaatgtatattgttcgccagccaaacaaagttaccctcatatttatcaagtgactactactgcagggaaaaaaaatgataacattaattctcaaaacgataatttatttgtaaatctccaaatattattttacattctactcctataatgatgtgccacatcgttcagtatgcatactgcatgataaccttcaaatattactaagttattgcactatttaatttgattatacatatgcatgtcttgactgctcaatcagcagtgcctaggtggaatcaggattaccaataaaaagcggctactttatatatgagacagccaaattaaatttggttccaaactagccaaattaaatcacccgcacatatatatgagacggccggaagcacaacttacatagacattaagtcaggtagtttcgccttgaaatcagtacggtttgccatattttggaatgatttaaaaaaatgaacaaaatttgactgaattaaaaaaaatgaaaaaatcgggtaaaatagtgtcatgccagggggcattaattcccgaaatttcagatcggaattgcaaacactgcttgaaatggaacatgataaaatgctcttaaaatattacaatgctgattaattatttttttaagatgagtatagcacagtataaatgtcttttgatctggttcttgggattacaattaatcggatctttggattatatttctgatgaagaacacttatgtacagaatgccatacctaagcacagcttgtacaaggatcaaaacttgcaatcgttgtaaattttatgataggatgacaatcgcactgcaaacacactttacctgtacttgtatcagctgaatatatctgaaattgaagtgaacatccacttacagaaaactgattggcactttgtagtgcctgagactcagagcagcttgctctgaaagattctgaaaacaaaaaggacatgaattcatattattcatcatatggaaaaccatatgtttgttaagaaatttcacagagcatctgatggtcaatctactaatacttgaattccagacagaaaatttgcatcgataatgttgaaataaatttgcagagcaaaataaagggctcataacatgcctcagagcaaaaaataggaatattgttctaaagtacctgagtacaaatcgtattcatatcaggccatatgtatatatgaagctaattaaataacaaaggagcataacaagcatatgaatagaactgtaatcaccttgcagattagaaaagagaaagaagtgatggtgcagtaaaagtagatcaacattagcacagaagaatcagaaaattaacctgaaaaaatacacaggggaaattaaacatataagagattactggctataatctgaggatgcattattaattcacaaatcaaatacctgcaggtattttatgtccacgttgatctccatcgtcagattaagatcgatatcggataaagggacatatatataactagaagaagaaaattgaagagggaataattggtactagtacactactcagggaaaattgaagtgtagtagctagtgtgtcagtgtgtggaagctaaggccggtggttaccacggcctgtccctggtgtggcctggtcacgtacgatgcctcaaatgcgtgggatggcttccagatcgctgccggattcaggggtaagattgagagcttacagagattccgccagatgggtagccgccgggtgagctagccgaaccgaaccgccgccgccggccggctctcacgctgctgtgtgcgggcgaggcggcgagccaagacgtgcggggaaggtgtggtcgggatcggccgccgttgcctcgcgatcgatcgagacatggcgttggggaagggacaggggcgcggacggggtatggggccggctgggctggtttatctgatttggggcctgatttgtgtgggcgagtttagttcccgacaacttataccccgtttttcacacaaataatacaaacgcaatattttttttttatattcagcttcccaactttatttcacggttggctcagtgatgtcacgagctaccaggcgagttacaaaatgtacttgattataccaaaatgtacttgattatttcttctgccagttttcgtattggcagggggtttcagttcttttcaagatagtggaagctttatcgatcttagacgtaagggcttgttcggtttggaggttattgaatgaggattgagacggaataactctacaccgcaatagtgtgaaataaatcccctccaatccctccctcatggggattaaccgaacaaaactttaatgaacaactattatgagaaacacctccggcctctacaccagaagagtgcacacatccaacaggaatccacgatagcagaaaaaaacttcaagagccctctaaccatagcctaaaacgccacctatatgccgggtagaaaactccatggtcactagcttcaattattgacaagccccagtgatagtactccataaattgatcttttagaagatagcccatgaacggagccaatctaacttaggccctgtttgattcagcttaggattattataatctagcttattaggagtaagctgaaacaaacaagtagattattatagcagattattataatctataagccagattattataatctaataagctgctctagaggagcttttttcagattattgagtggctaaaggcccactacccctacatacttgagaaaaattacccacctatgccatcaaccaaacagatagctgagggcattatagactttatcctttcaaacccaataatccatgcctccaataatccaaacaaacaaacaactcacagcttattctatgtcagcttattataatccagcttatagtaatctggcttaataatctagattataataatcataagctgaaacaaacagggccttatactcattcgtttcacattataagatgttttggtctctgaatttctcattagattcattaatatccgagtaaactgcatattgggatatatttagttagcatttttttactttggtctaggccatacactgtgtcgtaggctctccggaccttccattatattatatttgagagataaagtgaataattcaagtcatcaaacaagcataatgaaacatccgacgcctcgagagaggaatattggagacattgctgggccattagcctgccagtcaacttcagcctgagatgtgcccgtcaaaccactcgaaggcggtgaccagatgtgttacacattcaggagacttgacaaaaatggctaaagatctacaacctctcaaatattcctaactcatactcatgtgaatctagttcccaggatgtgccctagatccacactttcatcttaagcatgattatacatagcaaacacaactaagatgaaagaaacttaagacttacaacatcttaataattacataggccgaccggccaaatagacttattagagaacagcagaagcttgactacccaatcacaagcacaccgactaggggtttaccccattaagttctcatcctagaagaagcaatcggaacccgcatcactcaaagactaagtctaaacctgcaaacaaaaggttatatcaacagcaagagtcagtacattaaacaagttaatgtattggcaagcacaagtcaatcctaccatactacatgtaaggcatatattcaaagaaaggcaatatgtagttcaatttcagcataaagcaagttttgtttcgcaattcttttgtaaaggagttgatgcttcaattaacaaaacaaaattttaagtttcaatattaagttcatcataattccatcgtaatcaatctcttgttgtcatcctttgacaacaaatcataatatatcacctcacacacacaactcaacacatttatcaatttcaaaccaatgtcacatgatcacattttaaaacataaagtctatactcatgacacatcaccaaagcgctcatgaccgtgagcacggctaatcgattagtttaaagaactctgcagagtttgtatagctttacccacatgatatgaactctctagtttgttttgagtttgtaagactccaccacactcttcatgttgaatgtgatctagaggtcataacgaagcctttacacaacttagaacctagccttgcaccagcacgatacgtgttcctccatcctaggcatacttggaatatgcctagaaccgttaagtggcgggcccacgccttaaacttaacgccgtggtggcggacacaacgggaacccacccacgtggcacaataccgttgtattggacagacttagtcacctaaactatcatgtcggggcaaataggaagttcatctgaatcatcgactaattcctcagaattatcgactaactcatacacaccggcctaccagaatgcaaggctagtcctaaatagattaatcagcttaggccatcccatactagcacatgtggatatatgaataactttaaatgggtgacacaagttcggtccttatggacttaggcaaacactccccctatcggtatgcaactagcaccatatgcacaccacttgccgcccaagtataaaatcacattttacacattttagttcgcaaatacccatcatattaattttattccagcaagggttcatgtatcaaaattcacattttaattacagatggaatgagcatttgcatatttctaagcatggctaagcaagtagttgcacatagagcatatataaacccatttgagcacaaagagtgtactctaaccatttctaagggttcaatcagcaagaggatcaattattcaaggtggggtatggagcaaataagtcataactaccttaacccaattttaaataccgatatagtctaagttcacatgcaactttgcaaacaaatattttcattcctcaaatcatgggattcaatgtgttcaaaggatgggaggagaaaacttgccttgatcagagaaatgttagcacctaatccactccttcaccgattatgcaattatctagataaaggacacgatatgcaattaaacaccaaaagagctgaaaatccaaaatgctctaaaatgcatgatttatgcatagtgattaggtactggtctaaaataaatttaggtgaaagaattcctattttatcttattccatttggatttgggagttatgaattttagaagttttatcgatttatagtaatatagtcttaggtagtgttatgaaatacttttgtaaagtgatttttattatattagacttcacagaggtgtagaggtgtgttttctaagactaatacatttggtttcacaatttttggagttataatgattttcttatagattttacaagttacaacgtgttttaggcatatagtgttttatatgtgcatgactctcaagttgtaggttcagaacatgctacttcatgtttaagttgaataaaaggaataatttagttaactaaaacatttttagttcacatgtttatgatctttactactatggttcatattttataaactagagatgctctaatctaaactagcaatatattatattaacctagaaattgttatatgagctaagttcttctaagttttagtggatgaggatggaactatggcttcactggtcaatcaagtttttatttaggtttaattagacctaaagtgtatatatacttatacatgtttatgtattacttaaacaacactatgtgtttaaattcttatttcactaagttaaggttttgatctatgttctctacaaaaggtgccaaatttaattttactatgttgaagataactatttgctggttctatagaaactttgttcatttcatttggactaaaaatgaattttctacaagttttacaaattaatggctgctctatgttagtaaatccttatatgaatatttagagacttttactacacagtaagtatataatcttatttcataacatggaaatacatgttttggtgatcctacagaacttaaatttactcaaattaaagctaaattgggttctacatgaatttctaaagtttagcttatctaaactaatcattctagagataatagttttagaggcatttgatgcaaagtaagtaattacttttatttcacctaatcagagagtgcatgatgatgaatctgtagaatttgattttgtttcaaaatgagttgagatgaattttctatgtattttataagcttgtacatgttttatgtatgacctatcttagataaattttagagacattatttgtgcagtgagtgtcaagttttatatttctaaaatagagttcataactttaagaatctacagcaactggaatcatctcaaaatgagttttatttgattttatatggattttacaagtttgggtgttttcatgttaaacatttaatgttttagttatttttcctttgcattttcagatttttatacacatgggtccactgatcggtggctgaaccaatataccaaaaaaggtccctggctttatatgaactgcatttaggtccgtgggtccacatgtaaacgactgaagttttatagtttgaaccctatgtttctgatcatttacaggacaaagtcctcatcttcaacctccagcagcccgatggactgggagcttggccatggctttggcgagctcgttggcgacgattggtggctcgattgggaatgaggtcaaaagataaaatgaagagaatgctctcacgattccattcctctagttttcttggctaggagacatcggagtagcgccgatggtgagggtgagcggaaggtatacatgagctgttactgcatgttacctagggctttgattttgctagatgcatccatgcatgtgtttcctaagaggttcaggaggctcaccaagctgtaggaagaaatcgctgaagcttggatagcagcggcttcggttggaacggttcgacggcggcgctcctcctcgggtgaacggcgacggctcgaacaggacgacgagctgctaaaggaaggcatgcaagagggttatgaggtcaaggagatggtgtatgcgcgaggaatcgaacaatggctcaccgagtcagcggtaatcgacggcagaggcgattctagatcggcgctggtgaagaaaagatgtgttctccgagtccttcacatctccggctagggttcttgaggcgtattgaagaggaggttgagacgatgacgatggcgcagcggcttgctccgaggtggacgagaatggccggacgacgacgatggttgaagcggcggcgctccggtgcgtgctccagggcgtcgttggcgtggtcacgttccggtggctgtgatgcacaaaacgggaggtggtcaacagagaagtggtttggcattgtgtggagagatggaaacgcgaaagagatagtggtgaccttgactcaaacggagatagcgatggtcgtcacctccatggccggtggtgaggtcgctggtgacggagaggcagaggacctgctcccctcggcttcttcggctctgagtgatgagtgaggaatggcgactcagactggaggagaagagagcaagaaaaggaaagcccgaggtcgtcgacacgttgtggccacgcgtcggctcgctcgatctctccctctctgtgttcttggtcggctgagggtgaggcacagagaaagggcgagctggagaggctgccaagtgggccaggacgaagtgctctaggtggaagtgagaggtgtggggaagattctgggtgaacacggttttagacgaatttttagattattttctcaaccctaactttgtagcttcataacttaatgtgtggaccaaattaattagtgttgattttactggaggtaaatgattacacctagattccattttctttggttgtactcaaaaataatgggtagactgctcacagaaattaaacaaagatgggctattagaaaggtagattgaatttttaggaagcctaaacagaggaggaaaattctagaaaaattatatttaggcatgataaataatctagtatttgaataaattattttccatgttcacttatgtacagttaaatgtacttttggatgaagtatggctttagccaattaaaattttatttgatttcttttagttttctactttgactgattaatttgtggtattaaacttagttattaacttgtaccaatattatagtgaattgcttatgctaaacatagtttacataattttttccataaatttttccatgatttcatcttgcatagattattttaaagaattagaataacatttctttgtatatgtgtccctacttcataattgcacctaatattattatagggattacattaaacttcttttgggctgagaaaaagatattagaatttaatattaagtccacatgttatcacccaagattaactatagttttgcttagtaatttttaacccttttagtttatgctcatgagacctattatgaaaagagagaccaaaatccaaatgcacaatgtatgctccaatgcttgatgacatttctagtctaatgttgggatgaaaaagttttattttgttctcaaattttaatcatgcaatggtttaagttggtcatcacctaagttaaaacggaaatttttggctctcaaaattggagaagttaatctctaactattttgacaagaaactttaagtcctgaaatttcaggtatgtcacagactggtagagaaaccatctttggtcggtcgacccaaatccacaatagtcccggttgcattaaaaaccgggactaaaaatcatttttagtcccggttgataggaggaagatgttaccaaccgggactaaaaattatctttagtcccggttggtaacttcaaccgggactaaagttcatttttagtctcggttgattccatgtcaggccgtgtcagggccctaggatctttagtcccggttagtaacaccaatcgggactaaaaacctatttttagtcccgtttgatgttactatctgggaataaaaatcaaaacacattatataatccctagtaccgatcctcttttcccgtccacacaacaaacttctccctctatctcttttttcctctctaacttcttatctctttccttatctctaactcaagcctctccttccttttttccttcactccacaacgaagaagcgtacgtgcacgagggcgggccggccaagcggcggcgcggggaccgctcagaggcggcaggcgcggcggcgcggggggcggcgcggaagcggctgcgcggcggcgggcggccggtgcggcggcgcggggggccgcgcggaggcggcctgcacggtggcgtggcggcgcggggggccgcgcggaggtggcctgcgcggtggcccggcggcgtggggggccgctcggcggcggtcggcgcagcggcgcggtaggccgcgcggcagcgggtggcggcaccggcgtggcgccagccagcgcggaggggaggcggcagtggccg

SEQ ID NO: 6862 - DNA, 7123 bp, Oryza sativa
tgaggatttaaagattcggagatgttctgtgatatgtgatgatttggatttgggaggggatggtgtgaaatcaatattcaatgttaaaaacaatgaaaaagagaaaaaaaaagaaataatatctttagtcccggttgactaaagatgctcccatctttagtcccggttggtaacaccaaccgggaacctggactaaagatcgatctttagtcccggattcgtacttctggttggaaaaccgggaccataggggggttacgaaccgggattaaaaagcacttctccgccagtgatagctcatgttttcactttgggctagagtttctttccttctcagatcaccacccgactgggcactgcctgcacatcctaccatcgccggcaccgtgaaccctctgctgctgctgccgccggctgctgcaaggtgtgaagagcaacagcaccgctgaaggaagatgaagcaaggagcaaagctgcaggaggcagcaatcggtatagtataggcataggcatatggagcttgaaaggttttttaacatatcgaggcctcacctgctcaccatgggcttcttccttcctcattgtgttgccattgcatccagactacgggatgagaacacacggcctagatatagccgcgttggtgaggtgctaggagcggacaagatagagatcgaaagattggggaggtctaaactgaaacaaaagttattttccctagcccaaagtgaaaatgttggttgcatcatagtccaaagtaaaactttagtaataatacctagcccaagatgcgattcactcttaatatccatataaatttagacacattgtaactggacccactaggaaagaaagggtttttctaggcgacccaaaatctattttcgcgtgcggaaggccggctcgtctgcttaaatggtctatggaaatccgatttttatgtacgagtagcgcacccgcatgcgaaaatccgatttttgtgtgcggattcttatgtcgttcacacatacaaataaaaaaccgaaaaaataaaaaaaaactcaaaaaatcaaaaccctaaggatcccggcgatggatcgggacgtcacggagccggcggctccgctccaggccgattcctcctcctcatcgtcaacgtcggtgccaggtggggacggggattgtcacgcctagaaattctcgaaacagaatttctaagctgaatgtgcattaaatccctgtccaggaccagccagggtacacaaacgacaattgttgacatacagacccacgtcttacaaaaatataaaagattacaaatgcagcggaaaaggttaaagcgagctaaaccgggaagcttgacttcagcaacgggcgactccactccacaggcaaaccttgacggcagcggcgaaaccaacctctctgagacggctccaactgagaagaacttcaactctggtgtgggggaaaagagagcaagactgagtactacccactgtactcagcaagtcataccggaagaggaggtatgatacaggatataaccaaaggaagctaggggttcttttgcataaagcaggcatttcaaagcagtagttgaaagcagtaaaacagctgtagtaattaatcaatattaaccaatcactgtccaacgctacaccacgttgcaacagacccaaccatctacctgaactacaccagttcattaagctaaactaggggtgagactaatcacggtgaatctggttgatcgcccataaccgcgggcacggctattcgaatagttttactctggccagaggtgtacaactgtacccacaagacacgattccacacatgtcgccatgccccgaagtatcaccatgatactgcaaatggggaaatcgtgacaagaccctccacataaccctcccctaaccattcacaccacgctaaggtttcacccccacccctcaaaaggtagtgggcggtcccctcttgcgccgcggtgaatccggcagctggacaaccgaacacctcggccgacccaactccatcacgcccaccctcgccaccggtgcctaggaaagggtcgagctatacttcagatcaagcagttacccactcccgcttgtggaaagcacggtaagtctcccagggtttcccgtgaaccggtccttaactgccatgggtgcgaccagcaaaaccatgcacccacagcccaccattcagtgtattttaattaactaacaccattgcggtggcaccaatctaaagctatgccaatagacaaagtctatgtaataatgtagtccccatttgtgtactagttgaactaagcatggctaagcatttcctaaaccaacatctaatcattttgatacccaagttatcaatggcatagggtaaccaatatgtggctgaggaataggacccatcccacattacattgtaaaagaatgcaacatttaatagaaatgcgggatattggtaaattgggtacaatatgatcaaacgtattgcatgacttgccttgctctcgaactgatgagacctcagcaacgtcttcgagaaactgcggatcgacgaaacggccgaaacctacgcgacaaacaaagcacacaagcaaaacatgctataagactactgaaacaggaaacaaaaccatttttaatggattctttgcatttttcttgatttactgagacttgaatggacttaaacggagctcggatgaattacttatgaattttagaagataaactgtgtttttactaataaagaaaaagtccttaattaattattgcgcaataatacccagggctgacgtcatccaaggggggggcggcgccgacaggtggggcccatgagtcagcggctccaaagggagggaggtggcgcctggcaggtgggccccaccaggcggtggctcaaaggggaggcgagggaggcgccggccgggctcggctcgacctcaaggccgaccggccgaccaaggcgaggcagcggcgaagcacggccaccgacggcggtgaccggcggtgcgggaagcggcggcgacggccgaaaggcggcggcgcatggccggagcagcgacgtggccagcgctcgcgggaagttaaggaaaggagggggggagggaggactcaccggcgacacggcggccggagcggaagacgaaggcggcgacgacgacccgacgagaggaggggcggacgagtggtggcgacacctagaggaggggaggagaggagttagggatggagaaagcgaccgcgacgaccaaaatggctggccggagacggaggggaatggatagctcaccggctcgcgagggagatagggttccggtggggttccggcgacgcgaggcggtggccgagatggcccacacggcggcggagctagcggcggcggcggcttggcgcggcggcggccctagtggcgacggcacgcggccggagatgggcggcggcggcggcgctagcggcgagcggcccgcgaccggtaggaggcacgggagagcgcggcgaaaaggggaaaagggagagggagatgcggggaagctttataggggctcgaaaggggcggacatggccgggaaaccccccaatttggccggcgacgtgggggaaaagagagagaaagtggggggggattcaaatcgaatcccgcccatttgcgggcgcgcgtgcgggccgggagatgcgggggagagagcggcgacgtgggcgcgaggtgcgggcgcggagtggaggcgcgcacgtggagaaggcggcggcgcgggcggtttcggcggcggttgccgtcgtggggcgggcggctggaggaaggggacgacctgacaggtgggccccacctgtcagcgtcccggagagaggggaaggggaacgggccggcccaaaggaaggaggccgagcgcgggagggagtgggccgacggcccaatagagaaaaaaaaaggaaaagaaaaagaaaaggaagaaaggatttttcctgggattaaaaattgcactttggtgatttttaattggttaaaattatttccaaggctctgaaaattccactaaaaatcttgttaatgcattggagcatggggaactcaagaaaaaattccaccacgctatttccgattattaagtgcatttattaactagggatttagctctaggttaattaagataatttcttcgggcaatttatttaaccaatttttaaagcaagaaaagggggaaacttcagggtgtgacagggatggcgccgctcccgagatgcacgccgccagctcctggccaccgctcgccgctcacaatcgaccactgccaaagtcacgtcgagccgatgcccacccgctgcctgccactatccggagtcatgccgcctcccgctgcccaccgaagttgcgccgagccgacgcccgcccactcctggccactgcctcgtcggcggtggagccgagccagccgcctgccgtgcactgcacgctgcccactaggaggggagaagaggaagaaagggaggagacagagagagaacagaggagtgaaaataaaagggaaaggaagagagagaggaggtgataaaaattgaagtgggtgagagggaaaaaggagaggtggggagaaaaagaatatgtgaaggagagtgaatatttttgcgtgcgggccacttaataggcctgcttgtgaaaatatgctcatttttgtgtacagccccttaagaggcccgcctacgaaaatagatttttgcatacgggctttttaagaagtcgtatgcgaaaatgaaggtcgatttttgaagacacaaccaattatggtatgtctgcaatctcaaggcattcccgtattgaaaaatcatttatatagtagtgacctattcgtgaatttattcaaaactcaacagcttataattgtggaacagaatggtattgccttataattttctcccctttgtgtttattttcagcccagtaatatctacctctagtagtctttgatgtgtcccctcaggaagaagatagaatcacattgcataagaaggtatagaggaaaggcaggcattgatatgaacagctctccctgcttgtgtcaaactcctaccattccatccactcagtctcttctccattctctcaagtagaaaatttaacttaggagtaagaatcttctcaggtccaattggcaaacccagatatttcataggaaaaactccaatggggcagttcaacatttttgcaactgtctcagtttcagcaaccttcaatcccacagtggaactctgaaactcttgttatgtggaaaggaaaaaaaagaaattctttgatcagaaacctgtcagccattttgatccttagttatataaaattattgattaatgttgtgttttattacatagaaaatacaggaggaatatctgaggaaaactgatggtaaggtgatcatcaatcatgcagttcagaaagctgcagaaatcaatgacttgaaattgggaggttcattagaaaagtgcagttcaaactgcttaaaaaaaataaaacgggtacaggaacagacatgcatggtttacaaaatccaaaatctagtttatccttggagaaatcttcacatataataccgatattttgtagttgatatctaagttgttgtcatagaaacaagctattgtatatacacaaagccatgttaacatctatcaagaattacataatgtaatgctatccccttaccatttccgccaacctatatatgatttcttagtgcattctatgagttagcattgccaaatagatgatgttgtgcaaatcatgatggagaaatgaattcccagaaaaaactactcctattagaattcaggtgtttagtaagagggcatcgccaaaataattgctctgaggtttgtttctagcattggaccatcctgcacaagtgattcactatcttacctctcctccgcttcattaagaacgattgactttctgtggagcatccagttaattggtcaacatagtaagctacattaagaatggtgaagaatcagattaagcaatggaacaaacggtgccatatggtatttgttactgacacttgacgcatgagatacattatattcatcaattagttaagaagatcaggtaaaagaaatcaacggatgaactgtccccaattttccttcgagattaaaaatcatcaaataatgcatttctagaaaatatattaaaagttaaagcaatttaatcaagtgaattaatgaggaaattaaaattttcttttaaaaataatggctggaaataattgttgtaatattctcgtgctctaaaatactctctgaaatttcctgtgaattttcggagcacaatatctaattgtaatgtcacaaagttcatttcatcaatttaattaaatggaaaacaaattaaaacccctctctcctccttgggcctttttcggcgcatgtcttcctcttctccctccctcagcccgccgcccctcttcctctctcgggctggcctcctcttcccctccttcctcctatcggccgccggcccgttcgctctttcctcaccgtaaagtccacttcacgtccctcctctctcctgagccgccgacaggtgaggcccacctgtcggggtcttcctcgacctccagccggcctccctcccgcgccgtcgcgtgcagcgccgcctcctccgctcgatccggccgttccgttgctccccaaaattgattgcaaaaacggatttctctctgtctccgctaacttaaccccaacaaaccctcatcagattcgtggtttatccatcgaattttttctcctttttatccggtgtacttgggataaaccccagtttttccctcaccgaattcctcaaatgcgatccgatctttcctcctgtgcctataaaaatccttcccccgtgctctcctcgaccttttctcccaatttcccgagctctccgtgccctaaaaccaccccgccaccatcgccatctctccgccgccgtcgccaactccagccgcgttgcgccgcccgacgccgacctgcgccgccatctcctccggctccgcaagtacttgggctacatcggccactggttcctttgcgccgaatcccgccggaagcccctcgtcaccgtgcacccgaggttctcggcctcagtcgcgcct

SEQ ID NO: 6863 - DNA, 29915 bp, Oryza sativa
  unsure (1)..(29915): unsure at all n locations
aaaatgaaccaaccgggactaaagatcaaaaaatacccctaagcttttaaaccgggactaaagatgtttcttagtcctggtttttattggaaccgggactattgtgtaattgggccgatcgaccaaagatggtttctccaccagtgtaaatccagccaccatgaaaaccaaaagcattacattaacataaaaatggagattaacagcagagataaaaccctaaaaatatacagaaaatcatcaatatgcttttgttcaactaactcaaaacaacacagtttatcagccagtagcatcaaaaatcgcccaaaccacaccaaacgaactaattaactccgaatcacaaaatactaccataaaactctaccacaaatcctctcaactaaaccaaagcgggaaacaacaaagctaaccaaaaaaatagatcccccgatctggagccaggagatcccgagacactacggcgagagattagaccagcacaaaatcatgtcgtgaaattaaaaacgaaaacgccatggatctaaaactaaaacgccattgatctaaacccaaaacatcatggaactaaaacaaaaaaatcaccaatcaaatcaagctagctcgggggaacaaaaatcacttccaaaattaaaaaccctaactgcaatgaccgaagaataatagggatgcttgaggagataaggaggcgcacctcgtagcgttggacaaaatcgtcggagaatcactggagaaattgaaatcgccggaaagggataagaggatttgggattatcaatgtggggagagaaaagcgaaacgcaccgttcaaaaacgcaacaacgctatttctgatataactttatctttgatatttttccgcttccgcttctgataaggatgataaaaaaaaaaggaaaaatagaaaagcaatcaggaaacggggccatgcgaagaaagttgcggacggcccaagcccaatacgacagatacgcctagaccagaaaaggcaaggggaaaccacacgtttgggccaagataacgaaaggggaaatcgatcgctcggcttttatcccagagatcgattaggatttttgattcgctcctaccaaatttccttccgccgacggcgcctccaacccacacgcacgcgccacctcctaaccctacctttcttttcttccatatatggatctaatccctctctcgctagttttttaaccttcttccatatatatccatctaatccctctcttgctaagcgctcggaattacccacacgtgttggtgcatgcgcatgcgcgctcggccataacccccggccggcgagagctctcgaccacagctcgtcgtgccgtcgttgtcgtgtgcgtctccacggtatatctatcctgggcgtgcggcggcggtgtaggcagtgcgcgcgtcgcggctgccatcgattacaaattggtcggagaggcgagaaattagctattttcctatagtttcctctctttttttcatgttcttgttattagactggtttccctgtatgttctactatatccttctagacttgtttttttttaatttcctttctcctccaatttggatggggttattattttgtttgctctctcaatctagcagcatgctacccgcgcgttaaagggattaatatgccatcatatttttcatgaacaaatagtcaacatatatttaaattgtaagtttctttctaaattacagatgtaattttagtctatttatttacaatgtaagtctctaaattacataagtaattttaaaatttttacaatgtaatatatttaactttgcaaccggttatggacataataaagaaccgtggacacaaaataggagaaaaaaatgaatttattattaattgtacaagtccgcgaaaaatgagcacagaagagttggagcttgatcaagtgtcctagttagttacgctttcggatagctttgatctgacgcaaaaaaatctgactctaatcagcccacaaatatatatgccagcacatgtttagtaaaactgtattatgtttgttcacatatatgaacgaataggtaatgagtactgtaatagtgggttaattaattagcttgccagcttcaggggtgccaatattagttctctcatggtttccacaaattcccgatgttgttcttgtgcctttttctttggctaaaattaaaagttctagaaaacatcgtgtcatgctagttttgagcagaagtttaaaaaaaaaaagaggttatctttgaccagaatactagatggatatcccaataacttccaatggctctacggtttgagatagttcaatatgcaacttctttccaagggccgctctattatttggaaataattcaacatgaacttcccaagggcactacggttttagataattcatcgaattaataactgcattctgtagtttgatttgcatacatgtaatcctcaagatatctccacgtataactaatcttgcatatcctgcctattcagaattgagatatatctcatctaaactctcaattaataattgacaggtgcacacacaaacacgggattatggcggcggataagagccctatcgacgaggctctcctacatggcaaacacgaagaggctctcctacatggcaaacacgagcacgtggagcagcagctcctccccaccagcggcggctcattctgcatcaccggcgcttccttcgggaggagttgcctcaacctgagcaacgtgatatctggcatcgggatgctctccgtgccgtacgcgttgtcgcagggcgggtggctcagcttggcgctcttcgccatggtcggcgccatctgcttctatactggcaaactcatctatcgctgcatgcgcgccgaccgttgtgtacggagctacccggacatcggctacctcgcctttggccgttacggccggacagctatcggcctcatcatgtatgtcgagctctacctcgtcgccatcagcttcctcatcctcgagggcgacaacctcgacaaactcctccccggcacggtggtgaagatcctggggtaccaagtgcatgggaagcagctgttcatgctcgtggcggctgccgtcatcctcccgacgacgtggctcaagaacctgagcatgcttgcctacgtctcggcggttgggctcgtctcgtcggtggcgctgacggtgtcgctggtctgggccggcgtggccgacaagggcttccatatggcgggcagtagtatcttgaatctcagcgggttgcccaccgccctcagcctctacttcgtctgcttcgctggccatggcgtctttccgaccgtgtactcctcaatgagggccaggaaggattttcctaaggtatagtttttaaaatgtatttatgtgttgtacttggtagtaagtttgctaaaatttgtgataataattaacaatgcaaatttagaattatggttaatgaaattgaaaagtcaattgtggaaataaattagcaacaggtttagtaagaatacaacatattgtttttttattctatgtatgcacggaagacgcacacactcattattattttttagaaatcgtacatcagtatattactaatcatgcacactattagctcatggaagttttcttaaacaattttgatcctttcaccattcttttactgatacttatccatgatctaacgacatatattgtatcaaccgttgcattcaatggtccatattttcatatgatgtagctcaatgatgttgcattttaagttttacctttcacttagagagatttggcaaccaatgataattgatcattggattatcagttccaattatcataatttggtttatgaaaccatgatgatgatgatgatgatgatgatgatgataacgctctattcctctccaattaatgtgcaggttttgctgatctcttcggtgttgtgcagtctcaactacgcagtgacagcagtgttgggatataagatctacggtgaggatgtgcaggcgcaggtgacactaaacttacccacgggaaagctgtacaccaggattgccatcctaacgaccctgatcaccccactggcgaagtacgcgctcgtgatccagcccgtcacgaccgcgatagaggagaagctgtcgacagcggcggcggcggtagcggctgatgccgaaaacaataggctaaccagggtgctcaccagcacaaccgtcgtcttcagcacggtggtgctggcatgcacggtgcccttcttcggctacctcatgtcgttcatcgggtcctcattgaacgtcactgtcgccgtcctgttcccgtgtctgagctacctcaagatctacatgcctcgaggaggagttggccgcttcgaggtggcggcgatcgttgggatactggtcatcggagtgtgtgtcgccgtcattggcacctacacctcccttcaccagattataggcacattttgattgtacatttgtgggtatggtggtaggtttaggtagtaattaaataggtttcaaattcttttttttatttattttcttaaaaaaacaacatatatgttatactgagtgttaagaatcaactgagcggctatatattgcatgtgtactctcctggaatgcatatgtgtattatcactaaggaagtttcagaactttcattgtcttcatgttgactaattattgcagctaaaatttaaattttgaaattacttaagttttaagttattctgaagtttatccatcatagtttatcttcttctacccttagatttaaatcactggtaacatgtataaaagttgggatttgtaacatatatgtctgcaattttttttttggttttatctataaattattatttttggtttgtttcattcaaggcttattagcctaactaaattttgtcgattctgaaagtatggtgaaatatgacgcaaatggccatgcttcttatgagattaattttttaatgaaagatcggtagagtaaattccatttgttttctaatagatgacgccgttaacttttaaataaatgtttgaccattcgttttatccaaaaattttatataaatgtataagataattaaatcatgcttaaagtactttaagtgataaaacaacttaaaaaatatatattataattacataaaatttttgaataatacgaatagtcaaacgtgtgacaaataatcaatggtgtcatctatagaaaaaaacagaggcgatggcggcggctgcgatccagaccggtggatccctcgacgaaggcgaggagaggaggagaagttcaccggtgagctgcgtgccgtcaccggcacgcagctcgatctccatttacttcgccgtcttcccctactgcatgcaaacaatgttgtatcgagggctctgcaccacgatcgaagtggtcctcgagctctgggtactccgattgccttgcctagttggagcttcattaagccatgcatgctcgcgggaaggagctcaagctgatagcccactcgtggagtctgccaccgccaactccaccacacctcgttaattttgccgtcgtcgggcggagcagcttccagagctggcgcccggccctctactaccctcaccgcccgccgccttgctcctcatcggcgcggcccgctcgccttccttttccgtggctcgaaatggagtaacttgtagagccagcgctgctccaacagggagtaggaggctggctgccgctggacttcgagttcggcccacccgtgctgatcccctttcgctcttgccccgtgctccctctcgcagtggccctaccctcttccatattattttctggacgtaatgacatgtaaagcgccatgtagatgtcaagtgagaaaaaaaaacaagtcaaaatgttatgtaggataaaactgttgtttcaaatcaccctaggatttgatttgcactggttttgatagtagaaataggggtgggcagaaaaagaccgaaccgaaaagaccgagaccgagaaatccggtcatcaattcggtcctaggtagtaaaagaccgaattttgttcggtcaactcggttagtctcctcgggtaaccgaatagaccgaattattaaaaaaatgtctaaatacaacatataatccactatgtttaataggattaaattctaattttcacatccctactttttctagacatgcaacctaataagagtctttactcataactgcttatgattgttttttttgttatttttgtgttgaaaatttccattatttctttgcatatataaaaatgttattgtatttcggttaggaccgagaagactgagaccgaatttgtcggtcctgacattttttcgttgaaattcggtcttcacttttcaaagaccgaaattttcggttagaccgaatgcccacccttaagtagaagtatgacatatacttttgtggaggagggatgaaaatgaaactcggcctatagctgaggtatgcaaaatggactttttccttgttcctattaaggccttctttattaggccgaaataccagcccataggtggacatggatggtctcagactatggaccatgtccaaatgaggcctcgtagaaggtaacgaaagctagaggttacagagggccagcagcatcccggcatagccggttggctagcagtcccggtccaaaaccaaactcgggagtccaccaatgctgctaggtctcggtgccggtgggtctctcgtcggacctgggcttcagttgggcaccatgcgagcagcagacaccggcacaccgcgtgagcaactagcgaaacagcagacaccgcgcgagccgtgagcagcaaagctttcgctacgcatcttcgctagctgcagaatgccccccaaaccctttgctagctgcagaacgcccatccttcctcccgcccgcactcgatcgcccgcctacgcaggatgacagaatctttatctccaccacggtccacgctcgtacgccgcgacctgtcttggccggccgcgtgtatgcatgcttgaagagcttgatggacagtggacaattggaaaggttccagtgttagttctcacaaaaaaaaaaaagttccagtgttccaaatgaggtttacgggcgttttttttttttaattacaaagtacaacgtagacactcaaaacacaagcacactcaccgttatgaacgcacgcacgcaaaccataccggccatataagcatctttgaaggttcgtggatattcttaaccaaaacaaaaataattatctttatctttatctttatttttatatctatacctaattaaaagattcgtatttttcctttagtcacattttatttcgtccatatgtccgattccctccctctcagcgcgtgcatgggcggtttacaaaactagggtttctctttcaacatctatacgatatggttttgctttgattcttgggaaaacggaaagaggagaagataaggatcaaaaccctcaatttcggattatctcactggatgtggccagatttcacaaaggagggggattcaagccttctcaggcagatgcggcaatacagacggaggttggagacgcccctgtagtactggcccacgtgacaatgaaaggagtgggggaggctgattagacttggcgacagtgaaggaaagaatgggggaggatgattagacttgtagtgccttgctgggctggatgcgtacttgcgggccgaagcaaaggggaggagaagggagaaaagtgggtcggctaggctacgggctgaggaaggaaacgggctaaaattggcccaagagaaaggagaatttttatttagatttttgtttaaataaatgctgaaatgatgtttgtattattaaaattagccattgagatctgaaaatttcaagaaatttctagatagtgtaattaatcatggagaacttcataaaaattaaattcaggcatatcattttatttccacacttactttacttttcaattaatttaaacacctacctacttaaaaaaatcaagtattccaggaaatgtgtatttaagttaattacataatctaaatctttcttaaattctcctcgattttctcatcttttcttcccgttgtaacgcacgggtattttttatagtacctactaaaaaacgaaatatgtttccaaccaaaatttcgatcgtccgtcaaaataacaaaaaatttgttttttggttacaaggagggaacctgttttctttcgaaaacgctttacttcggacgtccgacccgagcaaaataatcggacgctaccacacgaaagtactcccagagtaggcactacatgcagcgatgggcccacaaaaacaggagaatgccagatgtgcgggcacccgatgtagtgcgcatgcattgggcgctgctaccgcttgggcgcaccacgccgcctgttgtgccacccacgtctctcctacacgcgtcctcgtgctgccacgtgtccccaccacgcggcaccagagaggttggcaccgtcccattgtatgacggtgccaacgactctggcgccccgataagttttttcagggttctatttatgaaataagtttttttaaaaggatcagggaggtcactttggtgttgagtacgtagtatatcactagaaacaacaattttaccgtcgccattcttccaaggttggtgtttacactctgatattcttcatatctcttatatttgctggtattaacataagagtaaagtgcatagacgggtccttaaactcgtagggttgtgtcatctaggccctaaagtctaaaaatgcagattcgggtctcagaacttgtcaaagtgtatcatttagattccaaatcgatatagccctttagtatcctacgtagcgccaatgtggcatgccacatggacgtgacgtgtcattttctttttttttctttcctttttccttttcctttttgttttctgatctcattcttctttttgtttcctttcttctgctcggctcacagagaaaggagaagaaagggaaaaaaaagagaagaaaagaaggaaaaagaaaaagaaaaaattttaaatgggttccatttgtcacatcatgttcgtgtggcatgcgacatcagcgtcatgtaggatctcaaaggggctgtggcgatttgggatttagatgacatactataataatttctgagacttgaatatacattttaagagtttatagacttagatgacacaatattacaaatttaagaaccactcgtgtactttactcttatcataagttagtagtcttcagtcaacggccggtaacctcatagaacagaataaagacagggaacaaactccagattcttcccgtcagctgacaaagcgggaagaattctagttttagtgaagcggtagaagtaactattttcaaccaaagtgtttgagccccaaatcctcgcttttgttgaaaacaaaaacagtggtagatgtaattataacatgtactccctccgttttaaaatgtttgacaccgttgactttttantacatgtttaaccgttcgtcttatttaaaaaaatttataaaatatgtaaaattatatgtgtacatgaaagtatatttaataatgaatnaaatgatatgaaaagaataaataattacttaaattttttgaataagacgaatggtcaaacatgtactaaaaagtcaacggtgtcgaacattttgaaacggagggagtattatcaatatgttttgatttgcctctcaaaataatacgtccgcatctcggcagtgcgcgtccccccttcgcccgtcacagtcggcgcgcgtgacggccttggagccagacgaaaagcaggtcgagaccgctccaccgcgcatatccacgcaacgcaactggtacgtgctgccttgacgcgcccagaaaagcggcacggcttccacatttttcggccaaatattatatccggccgtgtaccggagcacgtgccgagaacacgtcgccgtcgtcacgtctcccgccgtgatctagcgccaaccggggacgaccaatcacgtatagccggagaggtcaatagccgagtaggcgaccactcgtttggtctattggccagttagaatcgctgcaggttttaagcaagggggataaattaagagtcctggacgcgttggcgggacagggacgtgtgtttcgtcttcgagagctcgacttcactcgcaccgtgtccgtgtgttgcgtgtgtatatatagctgggcagccacgctctggtttccatcaaactagaactgaactgagcgagctagctgcttctacaactgtgcaggtagctaattaatctagcaatcctcccgtagattggaataatggcagatcagaaggtgattctcgccgagccgctgcttccggggaaggaagctgacttcgccgacgacgacgacgtggaggcgcagctcacttcgtaccacaccggcgcctccttctccaggacgtgcctcaacctcaccaatgccgtctccggcatcggggtgctgtccatgccgtacgcggtgtcgcagggcgggtggctcagcctgctgctcttcgtcctcgtcggcgccgtgtgctactacaccggcacgctcatcgagcgctgcatgcgcgccgacggctccatcgccagctacccggacatcggccagtacgccttcggcgccaccggcaggagagccgtcgcattcttcatgtacgtcgagctctacctcgtcgccataagcttcctcgtcctcgagggcgacaatctcgacaagctcttccccggcgcaaccatggagattcttggctaccagctccacggcaagcagctattcattgtactcgccgccgccgtcatactgcccactacctggctcaagaatcttggcatgctcgcttacgtgtcagcggccgggctcatcgcctcggtggccttgacggcgtcactgatctgggccggtgtcgccgagaccgggttccaccggaacagcaacacgctcaacctcgccggaatccccacctccctcggtctctacttcgtctgcttcaccggccacgccgtcttcccgacgatatactcctccatgaagaacagcaaacacttctccaaagttctcttgatctcgtcggtgctgtgcagcctcaactacgggctcacggcggtgctgggctacatgatctacggtgacgatgtgcagtcgcaggtgacgctgaacctgccctccggcaagctctacaccaagatcgccatcgtgatgacgctggtgaacccgttggccaagtacgcgctgctcgtggcgccgatcacggcggccgtcgaggagaggctgtctctgacgcggggcagcgcgccggcgagggtggccatcagcaccgccatcctcgccagcacggtggtggtggcgtcgacggtgcccttcttcggctacctcatgtcattcatcggctcgttcctcagcgtcatggcgaccgtgctgttcccttgcctctgctacctcaagatctacaaggccgatggcatccaccgcacggagatggtggccatcgccggaattctgctgctaggagtgttcgtcgccgtcaccggcacgtacacttctttgctgcagattatagccactttctgaggtggttggttgctgttggtctctgatagtagacagtagtacttacagacaatagtgtgaccacagtgtccttaaaataaagggcgcttgaaaaaattttcggagttagtttgtatctaagataaagctgaatcaataatattgacttaggtgaaaaaattgtatatattattggtgccaacaatgtcaatgttgtatttaataaatatcagatatgagacactaatttaggtttatttgtaaaaaaaaaaatgccaagtgactaatttgtttaaggaacaaatccataagagatgttgtcgacaatgtcaagggacaaatttgttaaagtaacaaagccataaggggaggatccactaaaaaaaaaggaatggacagcgatacctgtgttttgctatttgaatgacggccgatgcttccaaaatccaaacctacccacctaggtactacagacctgaagcaacgaagaacgaaggttttttcctctgctatcgagaggtctttcgttgcatgtcattcaaatatttatcaaaaatcttaaaagaacaacaataaattgaaattcaacctattcaagttgaggaaaaataataaattaaaatctaatgttttgttatttttgttttaataacctatatagattaaatttgaaattgcataattgttaaatatgcacgtttgtgaaacgatatataatatattaagctatattttttaacttttcaaaaaaaaagctatttaaatagcatggaaaaaaggaagagcattttactctctaatgggaatagttaactcacatatatagatgctaaatatgcttcacatgcatttggggatagttaactcacatatatagatgcttgattaatcgccagtatgtttactgagaaagagaagaaaaggaactgataagtcaaaggaactgataagtcatcgccccctacaagcccaaacaggcaaaggtgtacgatgtgggtcggagtgacatggtcgtggcttcgccgctttgggtggaggcgtggagcgatgcgggcagtggagcagcatgctttgggccacccgacgcaagaagagaaggctgacgaacatagggtggaataatttgtatgagtagcaaaggaggggcgtggctctgggtgcccggacgagacgctggagcggagctgctctggcactcggctcagcagcggaggagcgagctgtttctaatccggcaacctctctgctagatcacccagctcttcgcctctactctaggcctccgttgtcagattcagtagattccacctctctacctcattccccacctctattccttctacctctattcttccactacttctaatcctacacctggggagccgatcccgatcgtggcacgagttcgatccagaggcggtcaaattttaccgttcctccaacccaaacatccatttcatacttacggttggattttgctggcgcaggggatgcgaaccctatggaataaggtcaccatagggccctcaactgaacagcgagattttctaagatcctttaactagaaaaccagaaatgtgtacctctaaactctctcaaaccattcaccgaaggtcccttggcagtatttttgcctggttttactgacgtggcatcctagtcagaaaaaaaataaaaaattacgtgcggcccacatgtcagctgcacttttttcccttttcttttcttctccttctgtactctcttctctgattctctcttcagcaagcgcggcagccacaagcggagcggcgtgacggggttctcctccgtggagacgacgagcacggccgcggtggcgatggcaggttcccagacccagagccagcggttgccgacgccgacgcggcaagtagcgggcgagcgcggctggagcaggtggaggggcggcggtcagtgggagagcgcagttgcagcggctcaagcggcgggcgagcggcagcaggcggcggtgcgcggccggagcaggtggaagggcggcgttggcggctgtaggcggcggaaagcggcggtctggtcccggggactcgaggagaaggaaacgcgagcaccggggccgaggcgcgtggggagctggtcgcgcaacgcggcgacgtcgtcggggctgaagaggaacctgcggtggtgcacgagctcgtcgcctggacggagcttgtcgctagcctcgtctgatgccggctcgtactcggggtggtcatacgccggacgcggcgggtggcgcgcgtcgaggggctccctcgctcacaccggccagacgctctgcgccttccgcgagctcaccgacggcctgcaagaactgcgtgatccccgccgcgtcgacgaggttgtggcagatctgggtgctgaacacgaagccgccacacctcagtctcgtcacctatgatgcaacacgaaaccgccacacctcagcctcgtcacctacatgcatggcatcatgaacacgtaaatcacgcacaatacaaatggtgcaaaatttgcaaagtttattcaagttttatgacgacgtacgtacctgcacatagagtagtggccggtcggtgacgacggtgaagttgctatccggcagggtcaagagttcgccggcgcaagggatcggcgggcacagcgagtcaccgaactcctccagcgagacatcggcatcggcctcgacgaacgagacgaacgcggaggaggccgatgaggaagtccaccgcgtccttgtgcgccttcgcgtacagcacgcgatgcaagcgcttgtccaccagcagcttcagctatggcccggccccggcgggcttcgcctgcgccgtcatgtcgttcgccgtctgcaagcacgtagtgctcctagcaatcaataatgatgtccacatttttattgacgggagcgatcaaggagcagcggacggtgagctcggcggcgacgtaggcgcagcagcagcatctgggcggcggcgaggagcgcgcggcggagaatgcggcatcggtgtagcagccgctgctccggctgaacgtgctggctccaggtctgggaacctgccgtcacagccacggccgtgctcgtcgcctccacgaaggagaaccccatcacgccgctccgcctgtggctgccgcgctcgctgaagagagaagagagaagagagaagaggagaagaacaaaagagagaaaaaaaaagatgtgcagctgacatgtgggccccacgcaattttttaatttttttttgctgactaggatgccacgtcagcaaaaccgggcaaaaatactgccgagggatctccggtgaacggtttgagagagtttaggggtacatatttctgattttgtagttaagggatctcaaaaaaatctcgctgttaagttgagggacctccggtgaccttattccgaaccctattggacggataacccaatttttgttttgcgcctattgggccgtttgtcttgccgcctggtcgaactactcggcccgctggagagtggagacagtgggcccatgcaccgcgtgttgcgaagacgcggacggcctccgccgccgccggcgaagcgctgccctgccagtgccaggtgccagacgtgactgcgtgagaggccagcgaagagatggatggccaaaccatatgggcggccctacgattcctcgccggccggccggatcgattccgtgtaccgcatgctgcggccccatctccgacttcctcggcgtgccggttggatcgggcgctgcaccggatgctggcaagattgctgtggaggagatcagctcgctgctgtcgcgatcgacagtcgccggaatccattgaccagtagccgactccgcctgggacgacctatactttggcacttttattagcgacgacctacttgcttgtgcaggtaggcacaaatatttgtccagcgatcagttagctttctcataaatcggtgtcgaaacatgaattcggcaataataaaagggggtagcgcacgagacctaaaagtggatggatgcggagacaaaggatttagacaggttcaggccctctcaatgagaggtaataccctactcctgtttggggatttgaatccgccgagtgtgtattgatctgacaatcagattgtgtcatgccccctagagggcctcctgcccaccttatatagggtggggggcaggattacaagatagaaaccttaaccaatacggtatcggtttcctaaatctactttacaatattatcaaaccaggactttaggctgttccgtaatatataaggaaacgtaatacccgagtcatgatctattacatattccatagatataagttatcccctatgactagtcggataaccatgccgtatgggtatggggtacccataatatccacagtagcccctgagaccttcgcagtcgaaaagataatcttctctcgaaccagattactccaaagccgagtgcttcaatcatctttgtcatggtctcccgagtacttttaccaaatctgaagactgtggagggctggaaaataaagtcaggtgcaccgactagatgcacctaataggtgtagcccccgacaatgtggttaattgaataaaccaagcatatagtcaaggaataaataatccaatcaaccgagtggttttgataatcgtaatcaaccaagtgacttgatatcaatatatagcatatgcggtgtgaatcctccaaataacatgatccgagtgatataccaactgctttgtaaaatatgatgagtgatatagcaaaatagctataaagaagcttgtatattgtgaataaagaaatttccaaagtattgggcatacgccatgcgcacactgctttaacagatgtgcttaagtccctagaagacacatggtttcaccacacctggaaatatatggcatatgtggtgtaaaatccgagtaaataaactcataaaggatttaccaaccgcctagaaaatgaccacaatatataatcagcctaagccataatattggtcaataaaaatgcacacttacgtggcgaaaagcaacgatattgtatccaatcaattgcttaaaaacccaaacagcaccatgactatattaaaaagtcagcggggcagctatataaagctttactgtttgacaccttttaagatgcattgtaccaactcctaaaaagttgagtaactgcggtataaaaggattttaaggtattgggcacttgatcacgcgcactttggcctaagcaaaaagtgcctaagtccctaaaagaacgtgacaggccacacctgaaaatatgggctgcagacatattaggcctaggccaaaacatatgccctcgacaccctttaaaggatgacgcatgtaacatgctcccgagtaataaatcttccgggtaatatagaccaagcgtagctcatatgaatagcttctgatctgagtgattatcccttatgggatactccaaaatagatgtaacaattgaatcccgactggcgcaagtattcagttgataacccttacggggaataataaatagtccagtctttgagcatataaaatagacccatgatcatgaattcatgttgcatgtatccggagcaagtccaaattgaagatataatacttgtatttgagctagtaagcccctgagcacgtagtcacaattgttcattgatggtagctgacgcagttggcatagagacaagacaaccaatatagagagaatattgcccaccagaggtggcaaaaatattggtggtagtgaagatagtgataccgatcaaaagtactgaagtcgcatagccatggaggcgaagaaaccagtcggcggcagtcaggtcaaccagcaatgaatatgaaggcgctcagcgataaagttgtgtagttgacgacaacaaacgcaatcgacatgatgaagatgacgatgtcggtgatccagccaatagcagtgtagcaaccaatgataatgacaaagacgctcatcagcatttgcatagtaggtcaaccgtgaaggtgaaataataagtcggcgaaaacataatcatccattagcaacagcagagatgtcagggtcgatgaagcagaggtgctggtgatgatgtcagtgacaataatccatcaaattaatgttatagctgttgtagatgcttcacttggaggagagttgatgttgttgcccaactcgtctaaaccgaaatatttgaagttgttgaagtagaatgtctgctccgaagcaaagatgaagataatgactcctggagttgactcgtgggttgatgaattgatttcttcagcttgacataaaatttgtcaaattttgagccttgtatttgtgtagcccccgactctttgattagttgggaaacaactgaacatagagtcgagaactgtagcctcttgtcgtcgaatagttattgcttgattgaagatatgtgttgaagatgtccaagtagaaatcctgaatattggagagcctcttgttgtagtaaaataacatggcatcgcatgccgagatgtcgaggctcacaaagacgtcgtggttggtgaagtagcaaaacttgcgaagtagcagcaatagagtttgccagtgccgaagataataaagatgaagtcgctctatcatgatgacaaagttgcattgccgtgatgaagtgaacacgagtcgtcggcaacagaagcaaactggtagtgaagacgcgcagttgtgaaaataaaagcactagtcggcgacaacataaccagtcggcgacggaagacgatgatgttcacgctaaaattaaaagtttgatctttatacgatgaactttgggtgcgtttagttcacgctaaaattaaaagtttgattgaaattagaacgatgtaatggaaaagttgaaaatttgtgtatataatgttatgaaaaagctagaagtttgaaaaaaaataatgaactaaaccaggccttttccaaatgggaattgtagataaagactgttcaatcatgatgaagctttacgtaagcggtgacgaagcaagtgcacatgtgccggcgatcacatgtctctttcttataaaggatcagacagcagttccatattggagtatattctccagtaccttcagacaaacgaaaaatcagcaaagtggctggttacccatcctaggctcccagcggtttcttgcaaaacaagatgtaacttcagcgcaaatactctctctctctttaatagatagcatcgttgattttctttaccacaagtttgaccatttattttattcaaacaatttacgtaaattatattattttgttatgagttattttatagcttaaattactttaaccataatttataccttacacatttatataattaaaattggtgaaacgtgtgttcaaaagtcaacgacgtaatctattaaaagacggaagaaatataaatgtagaaatcttgcaggcgaagcaggtaagacattggagggatgaccggatgatcaccaagtcagaaatggcgacttggtaccattcttcctggataattcgagctgaaggcattttgactcggacactacaaattaggtggatctcctcttctgaagatcacacagtttttcaggcttctgaacttgctcagctagccactctgctccaacgcacgcagcttagctcggagtgacaacggaatggctaccatggatgagcagcagccactgcacatcctcttcctcccgttcctcgtgcccggccacctcatcccgatcgccgacatggccgcgctcttcgcggcacgcggcgtcaggtgcaccatcctcaccacccccgtcaatgccgccgtcgtccgccctgccgtggaccgcgccaacgacgacgctctccgtggcgatgccggcggcgcaccggcgatcgacatcgccgtcgtgccattcccggacgtcgggctcccgccgggcgtcgagagcggcacggcgcttgcttccgaggaggaccgtggcaagttcgtccatgccatccagcggctgcgcgagccgttcgaccggttcatggcggagcaccaccccgacgccgtcgtggccgacggcttcttcacttggtccgtggacgccgccgccgagcacggcgtcccgcggctggtgttcctcggcaccggcgtgttcgcgcggtcatgccaggagagcatggtgcgccacaacccggtggaggcctgccccgacgacgaccccgacgccgccgtgtccctgccggggctgccgcaccgcgtcgagatgaggcggagccaaatgatcgacccaaagaaacggccggaccactgggcctacttcaagatgatgaacgacgccgaccagaggagctatggcgaggtgttcaacagcttccacgagctggagacggactacgtcgagcactaccgcacggctctcggccgccgcgcgtggctcgtcgggccggcggcgttcgcgagcaaggacttcgcggcgagaggcgccgccgagctctcgcccgacgcggacggctgcctgcggtggctcgacgcgaagccacacggctccgtggcgtacgtctccttcggcacgctgtccagcttctcgccggcggagatgcgcgagctcgcccgaggcctcgacctctccggcatgaacttcgtgtgggtcatcaacggcgccgcggacgacaccgacgcgtcgggtcagtggatgcccgaaggcttccccgagctgatctcgccgcacggcgatcgcggcctcaccatccgtgggtgggcgccgcagatgctcatcctgaaccaccccgccgtcggcgggttcgtgacgcactgcgggtggaactcgacgctggaggccgtgagcgccggcgtcccaatggtgacctggccgcggtacgccgaccagttcttcaacgagaagctcatcgtggaggttctcaaggtcggggtcagcgtggggtccaaggacttcgcatcgaatctggagaaccaccaggtgatcggcggcgaggtgatcgccggagctgtcaggagggtgatgggtgacggtgaagagggcgccgaggcgatacggaagaaggcagcggagctaggcgttaaggcgaggggcgccctggagaagggcggttcgtcgcacgacgacgttggacggctgatggacgcgttgatggcacgccggacctctgttgacgtatgaggtggcggttgacgtgaggaacgccgtcggatggtgaccggacagcacacgcgttgtaaaattctggttatacatatacatgagtataacgttgagcggcccccgcaattgcgcagctagcattaatttaaaattatctattttttatatatgattttatttaaaattatcatttccgtgattctaataattttatagtttttaaaagctatgccaatcgttaccctttactcctttgtatcctttttatttgcttacttgatctaccactatttatattcatcatctttagaactttaaaaattaggccttatagttttcagagttcattttcttgatggatttcttattcataatttttggaagtatcatcaaacatcgccaattaactactctatggcccgtccgttgctacttctctttattgtcattggattttaaaaatcgtatataattattgcttatgttctttttttactttctataagtctcgccaaatcattagtggctttgccactatacccagcccgcccactgtctcctttccttattgtcattgagattttaaaaatcaaacatgattatcattggggtttatttttactctctataagtcccgtaaaccgtagtgaccatgctgcttaatgacatgcctatcgtcacttctcttaatcattattgggattctgtttggggtttgtttatagtttttagatatcccagcaaccgccagcactctacttctttacagacctgttgcttctccctttttattgtcatttgtcatcgttgtgttctagatggatttttttaataaaaaatgcatatttttcattccaatgatttttattcataaattatattcctacttaaactcttataattatttttctatttttgaaatttattttatttgttattttgaactttaataatctcgtcatgtgttctagatcgtcctccacacttagaccggccgtctctaccttcttgtcgatgccttggacctcaccccctcgacctcgacgcctcttttcctcacacacgacaacaccaacctcattgccacagttggctccctccttattgatcccgttgattctgacaatcctcgatgccctcgccaacctccactctctctaatgctccaagatttggtctaggaaaggagaaagatgataggaaattgccttagtattggggatgatggttgagaactcgatggagggaggaggagaatggcgattagtcctcgggccaatggggcggagtagctgacgaagagaggatgaggacaaatcgactggagagcaaaaggattcagtggggaggagtaatggatctagagataaacaaatctaaaaataacggagaaccgagcgttgctcggttggctagagtcgccaggtgagcgagcagcccgcgcaggttcgatccctgggatcgcaactcatgtttcccatgcactgaggcctattgcctccaatctcatggtgtgtgtaagtgtgcgttctgagttgtacccttctcaaacaaaaattaaaaataacggctagcccttaatttatctcgtggcacagaatcctgtctcgtagtttttctgttttagtttttttcttttcatcttctgaagccatgtcttctccaaacccatttagaacatttgaatcgggttcccaaaagcatactattcttgatatatcgcatttactctgatatatcgcatttactctgcagtgcatgcattattttagctatactagaaaaaatgcccgtgcgttgcaacgggtaattgatattttaattttattattgttatacggtttagctagggaaaaattcactgtgggaattcgcttgaaattttttttcagaaaatcatgagctgcaattaagagtatgtatttcatctcaagttagcatgcgacttttttcaaaagatttcttatacgactctttttatactttcaaaaggaaacaagcttaaaatccaactcaaacatggatattgtcgacgtctgatatcgcggttccggtatttgcatggtatgtggatcgtcggtgttagggtatacgcgagactaaggtaaaagagatggagacagggatttttatacaggttcgcccccctgaattgtcaggtaataaccctgtatcctgttggccggagccagtcgttgttcttattcaccataatcacacaagtataatatttggggtagcctatctaactgttgtcgacatggcggtctgaaggtctgaatcgtagtcgacaacagggtagccttcctcctcgaatccgtgcccggcgagatcagagatagcgctttcgtctctcctgacagtatccggagacaccgtagggtactagccgtgcatatccctgaagtcgatattcggcggcgtgtcttggcgtatgtaggcttctatgtcgattgtgttgggtgttgattctctcgtgtcccctctcctccaaggggggcttgtatttatacccataggtgtccccttgtccaagtagaactagggaaaccaatatggatacaatccgagtagtcattgtcgtttccatgtagaactctggttgtctttccttatccggaactccctcgaggtcagtttccgtataagacatggtatgtggtggttcctgccgagatttagtcaactactattaggtatgtggtatccataaccctgacagtagcccccgacttcaatgcaaatgaacgagttcatattctcaaccgcagactttggaggaactgttatcgagctcacgtgaccgttctcggtgagtttagagataacgttagacttcctttatcagtctcgtgcgggcaccgaaagggtttgtctgagtcaatctctgatgtcaaccgagaaagtacagagcgtacgactatgtttctcgtcttgctgtaatcgagaatttggattgaagtcaagaaattttatctcggcgggtacaccatttctttattccatattccttgtcgagatccaccaaaccgttctcgagtgatcgagaaggcgtagagtctgcgacggagccttgtcaacatttgtcgtactcgccttagtcgatcttggtgtggaaccatagagacatagagtcttcgataatgtcgaatagaattttcctgaactcaatactcataaaagaatattagttagaaatagcccccgagcgaatgctcaaagggtgacatgttataatatgacagactagtaaattgaatgtacagaccagtgttttgtatacgagcgtcttctctcttaccgactccgatcagtcagtttgtagagtcatacactctccctagcccccagccttgtcgtcggagaatcgttctcggatgacaaggctcttggacctttgacctgcctcggttgaacaagcactgatcgtagcccccagccatgaagttggaaaactcaatttccgattacacggcttggttaatacgcacggcgagaactcttacacgaccagatcttacatggtctttcgtctctgaaggatccgacaaggccttatcggctctgggcgtccccagccgaagttccctcaggttcctcggaggccttgtcaagacggcgtaaagggacagtaggataggtttcaaagctaggtgtcatcgtggtaagggatctctgggtaaaacacttggcgatcttgtgtacctgatatcaattttgttcgagaaccaggtagtagttgtaactcaaccactagaagtaaatgtacgagagattgctacgattgactggttgagaaccagtgagtaggtgtctctcgatcattcgaagtcgtggtgtgaggaccgctgcgttatagcagtagtcgtacctcgatcatctgaggttgcggtgcgagagattgctacgtattggttcgaggaccagcgaacgtgtagaattatctctcgaacaccaatggaggttgcggtgcgagagattgctacgtgctggttcgagaaccagcgagcgagtagagttatctctcgaacaccaatggaggttgcggtgcgagagattgctacgtgctggttggagaaccagcgaacgtgtagaattatctctcgaacaccaatggagacgctagagttggtttatgtgcatctcatgtggccagcatgactcacacacccaacttgtagtatatccggatgtccgttcgcaatcatgtcgggtgatcaagccgacggtgttcgcgaggaattatccgttaacaaccttttctcgagtagtccagccatggccggtgctatgagataggtcgtcggtcttcgttgataggttgggcgcgacgactctgcatttgccgagatcgttctcgataatgtggtgtacttgaccacaacctactcgagtgctcaattgttcttgaaaaatattttctagaagacaagacatatagcagataatatcgagtatgtactcaaaaactgcatggatcttctagtattatcaggatataacgagcagatgtaaatatcagggcattatgtaaaccataaacaagcatgattcatacagaagagagcagagcgagcccccagcgtcggtttaacgtcggaaacactcgcgcgatagatattgtatagaaacatgctctaggtaaacataataaattatagatctgacaatgctgtatgatctgaataggtacgataaattccagataaaatattgcgtatctttgtagatacaagccggatgtatctacgaaattagtagatcaatttaaaaaaccaatctaccaattaccttgttgcgtactcgttcgatgtcatgcgatctgacatcttttggtacgccgcgaagcttgaggcttggatgatctcgatagaccaagttgtcgatgacgataattgttccgatcttagtcggaagatttacttggacaggttggatctctccacggccgaagtcatcgagtagcttgttgttggagaatccatctcttaaacccatcttgtctaaatcctgaagcaccaaaatccccctacctggcacgccactgtcgatatctgatgtcgcggttccggtatttgcatggtatgaggatcgtcagtgctagggtatacgcgagactgaggtaaaagagatggagacatgaatttttatacaggtttgggcccctgaattgttaggtaataaccctacatcctgttggccggagccggtcgttgctcttattcaccataatcacacaagtacaatatttggggtagcctatctagctgttgtcgacatggcggtcggaaggtctgactcgtagtcgacaacagggtagccttcctcctcgaattcgtgcccggcgagatcatagatagcgctttcgtctctccagacagtatccggagacaccgtagggtactagccgtgcttatccctgaagtcgatatccggcggggtgtcttggcgtatgtaggcttctatgtcgattgtgttgggtgttgatcctccatggtgggtgttgattctctcgtgtcctctctcctcctaggggggcttgtatttatacccataggtgtccccttgtccaaatagaactagggaaaccaatatggatacaatccgagtagtcattgttgtttccatgtagaactctggttgtctttacttatccggaactccctcgaggtcagtttccgtataagaaatggtatgtggtggatcctaccgagatttagtcaactactattaggtatgtggtatctataaccctgacagttatgtatttccaaaaacgaaagaaattaaaaatcgactcaaatacgaatgacatatcaaaatattagtaaaaatatctttaatttttatattagtagagatttggtacgttgatttgtatctcacttaagctttgtacagcgcctacaaatttgacggcatggcccagcccctactaaacccgaagacattttggagtttggactcgtgtataaacatttctggaaacgccgtcctctcccgaagagcacaaacttttcaggcttctgaacttgctgagctaagtcactctgctatctactctgttccaaaacacacagaagaaaagctcggagtggcatgagcatggcagccattgatgagcagcagccactgcacatcctcttcctcccgttcctcgtgcccggccacctcatcccgatcgccgacatggccgcgctcttcgcggcacgcggcgtcaggtgcaccatcctcaccacccccgtcaacgctgccgttgtccgccctgccgtggaacgtgccaacgaggactctctccgtggcgatgccggcggcgcactggtgccgatcgacatcgccgtcgtgccatttccggacgtcgggctcccgccgggcgtcgagaacggcgcggcgcttacttccgaggacgacgttcgcaggttcttccacgccatccggcggctgcgcgagccgttcgaccggttcatggcggagcaccgccccgacgccgtcgtgtccgacggcttcttcacttggtccgcggacgccgccgccgcgcacggcgtcccgcggctggtgttcctcggcaccagcgtgttcgcgcggttgtgcaacgagatcatggtgcgccacaacccggtgggggcctgccccgacgacgatcccgacgccgtcgtgtccctgccggggcacccgcaccgcgtcgagctgaggcggagccaaatggcagacccgaagaagctgacgatccactgggcattcttacggcgaggtgttcaacagcttccacgagctggagcctgagtgcgtcgagcaccaccgcgcggcgctcggccgccgcgcgtggctcgttgggccggtcgcgctcgcgagcaaggacgtcgccgcgagaggcgccgccgagctctccccggacgtggacggctgcctccggtggctcgacacgaagccggacggctcggtggtgtacgtctccttcggcacggtgtccagcttctccccggcggagacgcgcgagctcgcccgaggcctcgacctctccggcatgaacttcgcgtgggtcatcagcggcgccgacgaaccggaaccggagtggacgcccgaaggcttcgccgagctgatcccgccgcgcggcgaccgcggccgcaccatccgcgggtgggcgccgcaggtgctcgtcctgaaccaccccgccgtcggcgtgttcgtaacgcactgcgggtggaactcgacgctggaggccgtgagcgccggcgtgccgatggtgacatggccgcggtactcggaccagttctacaacgagaggcacgtcgtggaggtgctcggggtgggcgtcggcgtcggggccagggacttcgggtcgaacctggagagccatcaccgggtgatcggcggcgaggtgatcgccggagccataaggagggtgacgggcgacggcgaggagggcgaggcgatactgaggaaggcggcggagctagccgcgaaggcgagggcggcgccggagaagggcgggtcgtcgtacgacgacgtcgggcggctgatggatgaattaatggctcgccggaccttccgttgacgtacgagataatacggagataatgggttggtttggtttatagcctaattaggccatatcaaatttcgtcaataccaaattttggtaagttttggtataactaattttggtaaggcaaaattatgtttagattgaagccaaaatagtctaagttcactattaaaatagcctattttttttagatatgtcaaaatttggcttcaaaccaaatagacactgaacactattaaaattaccaaatattggtaagcctaatttaaacctcaagccaaaccaaaccagcccaatctcttcaacgcgtacgtctgatccgttgggattttttttttctgtttcgcaattataagtcggcgaagtagcctactgttcattaaaggagtggtgaacagtgagagtgataagattctgtagcaaatacagtatcgttcaatatttattcaccgtataagatcactagtacgtacgtttcaagctaactgtacttgctgtgatcggttaacattttctatgcaacaataatggcaatctgactacgatagaagggtttgcacaaaaaaaaagactacggccgtgtttagttgatttggaaaaaaaaaaattgacgagtacggataaacatttaaaatattaaacgtagattaataacaaaacaaattatatattccgtcagtaaaccgcgagacgaatctattaagcctaattaattcgtcgttagcaaatgtttactgtagcaccatattgtcaaatcatagtgtaattaggctcaaaagattcatcttgcaatttacatgcaaagtgtgcaattggtttttttcgtccacatttaatgctccatgtatgtgtccaaatatttgctgtgacgaaaaagtcagaagtttaaagggaactaagactgtgttaagactgtgtttagatctaggggtgaaaatttttagtgtgtcacatcgattatacggacacacatttgaagtattaaacgtagtataataataataacaaaacaaattatagaatccatctataaactacttgacgaatttattaaacctaattaatccgtcactatataaaaccgtgcagtatagatgtgtgattttgctgacgtggtgtcctagtgttgacgtaaaaatcgaacacggcgccctgggagatctgcttagctcctgtgcaagtccaaatatgatgagatgcgggcgtgccagtcagtttgatcctgccactgacaagatatgcaaacagtagatcaaacagccgatcggctgacaagccgatggagtagttccagccgatagccgataatagccgatgccgataccagccgatagcgataggatttaagcgatcggctatatgtccaatgtagataatgatataaaggcagtcggctgatgataatataatatagcaatataatccagtagaaaaccaatcggctaataatatgatatagtagaacaagtattgatccaaaggttaaagcatatatcggctggggatccgatgtcaggaaatccacaagattagattaaacagtgaaacctttgttgtcatcggctaaatccaacttatatgtatatgcgatctttatgagccgatgcaacgtccagatcactccctggctgaaaccccgatgaaacccttattggcaatcaagaagcaggctagagattatggttct

SEQ ID NO: 6864 - DNA, 7819 bp, Oryza sativa
ggtacagtagttcatgagtggtagatatctaagctaatctaatctagcaacacgatttagcagataccggcagaaaccctaaagcgagaagcagccgatagagctaaattgatatgataagactagattaacagagacatatgataaataggtaggtaaatatatcatccaaaccgtagcaatccaagaggtcgaatatactgatgcagccttgaacgacgccgacgtagatgacaaattcaccggggcccgacggaacgtaggacttaccccttcgccagagatcgaactgaactgatgcagccccgcgtcaggtgcccaaattccgccggaagataagtaaaaacctcagggaagagggtggcgatgtgccgagagtagttgtattgatcgtgattgatagattacatagaccccgggtgtatatatttatacccatagggagatacaagtccttgtcggacaagaaagaaactaaaaaggaaaagataacgtccttatcggacactaaacacactttccaaaagataaaaagaaactaataaactatgtctaattaatagataaactgtcatgtcgcatccgtcttgaactcggactcttctagataagcttcctttgattgatccgactccaccatgaacacgacatcgtggcgacttgactcccatcggctgattctagaactttgaagccgatactgactctaagccgatggtaactttgggcttaccaaatttcactgttaacacatgccccccagttttggagtacgagaactcatgctttaaaatttcttgtcttgataactccaaaaccgatcttcctttgcttcgtgcaatcggctttcatgagccgatattgtttgcattagttgagctagactgtcaaactcgtggcaaaagaatctatctccgataggtgctgacaatccttggaatgcaagatctactagctattcattgcttaggttcaaactataacatcggctgcggacattacgaaatctctgaatatattccatagccgattctccttcttgctgctcaactgatattaagtctgaaagcttcaactcgctgactccagcaaagaagtagtcatgaaattacttctcaagatcggcccatcctctgatagaatttgatggtaatgatgaaaaccaagtgaaagccgatccagtcaaagacaatggaaaaaacctaactttcagagcctctttagtcgatgcttcaccacattgcagtaagaatcggctgatgtgttcaagtgtagatgtatcatcttgccctgaaaacatggagaaatctggaatcttgtatcggtgtggaagtggaactctatcgaaccattcaggatatggctgccgatacatatggatccgttccttaggtctaattccaaactgctcctctactaattttgcaattctatcggcccaatcttacttctggccgatactgttgatatagctcatcattgtgacattgatgtgtctgccccctgagccgatgctgttgttgttcttcaatctgctccccgagctggcttttctgaataactaacccatcaactgttactttgatcaaattttgtaatgtatccgccaaaactccagattgattaaacaatgtgcaatgaactgcttcatcaactgtatcttgaagtatttcaactatcggcttgggaaattgagtcttctgagttggcccttctggtgtcatgatgaaacattgaagacaacgcatttgaaaatcagctacaaactgcttcatctgttgcctttgttcctctgttaaattctacactgtgaccatgatcttggcattgacttctacttcagacatgtggatataaaattcgtggtcccactgggcgtgccaaaagcgtattgacgtaaaaatcgaacacgacggcctgggagatctgcttagctcctgtgcaggaccaaatatgatgagatgtgggcatgccagtcagtttgatcctgccactgacaagatatgcaaacagtagatcaaacagccgatcggctgacaagccgatggagtagttccagccgatagccgataatagccgatgccgataccagccgatagcgataggatttaagcgatcggctatatgtccaatgtagataatgatataaaggcagtcggctgatgataatataatatagcaatataatccagtagaaaaccaatcggctaataatatgatatagtagaacaagtattgatccaaaggttaaagcatacatcggctggggatccgatgtcaggaaatccacaagattagattaaacagtgaaacctttgttgtcatcggctaaatccaacttatatgtatatgcgatctttatgagccgatgcaacgtccagataactcactggctgaaaccccgatgaaacccttattggcaatcaagaagcaggctagagattatggttctaagcacgacttagtagatcaaacttaactgatgcagcactaagtatgaaaagaaacataatatctagacaatcaagccgttgactgattttcagggtggtagatatctaagctaatctaatctagtaacacgatttagccgataccggcagaaaccctaaagcgagaagcagccgatagagctaaattgatatggtaagactagattaacagagacatatgataaataggtaggtaaatatatcatccaaaccgtagcaatccaagaggtcgaatatactgatgcagccttgaacgacgccgacgtagatgacaaattcaccagggcccgacggaacgtaggacttaccccttcgccggagatcgaactgaaccgatgcagccccgcgtcaggtgcccaaattccgccggaagataagtaaaaacctcagggaagagggtggcgatgtgccgagagtagttgtattgatcgtgattgatagattacatagaccccgggtgtatatatttatacccatagggagatacaagtccttgtcggactagaaagaaattaaaaaggaaccagtccttgtcggacaagaaagaaactaaaaaggaaaagataaagtccttatcggacactaaacacactttcctaaagataaaaggaaactaacaaactatgtctaattaatagataaactgtcatgtcgcatccgtcttgaactcggactcttctagataagcttcctttgattgatccgactccaccatgaacacgacatcgtggcgacttgactcccatcggctgattctagaactttgaagctgatactgactttgggcttaccaaatttcactgttaacagctagtcagtaaaataaaaaataaaaataatatgtgggtgttaacgaccaaatttggttttctatcaacagtggggcccacatgtaagtgaagtgagaatgaaaaagtggggcatgcctatggggcccatcatcttagaggttttggctgcgtagacctagcgcatcgaggaggagccgtcgtcctcgccgtcagggaagcgggcctgggaggctgccggcggtagagggtggagtggtggcgggcgagcttggcaacaacagcagctcgccgctagcagcagcagtcggccgcctctcccactcccaccctctccacgtgccgcgccagcgggagggggagagaccggggacggtggaggaggaggaggagcgccgaggcgccaacagcagtagccagtcaccactcctctcccccctctccctcctaggcgccagcatgaggacggcaccaccaccgtcatcatcctcaccggatccctcctccgccgcacctagtccctcctctccgctggcgcccaccccaccacggccgctgacaccctccacctgcaagaatgaaccatcatcgattgacgacgacggagaggagggagtggagggaggcacataggagacgaggggagcgccgcaacggcggggatggaggggtcgcccaccacgtggtccaggcgcagccgtgcagggatgcgtcctccggcgtcagaggctgcatcgccgccttcccttccagcattgcgttgccgctgagttggtattggtttcacgcgcacgtggcggtgtgggagatttggggtgatttcacggggggagaggcgagggcgtggtggaggaggagacgaccggggagtgaagcaacgcgccgtgcatgagaaggatcgcatggcagccccgtgcactcgccacggagcccgtcgaatgcacctgcaagactgcaacctagctcactcgccagtagagcctcgtcgtgagcctgtgatgcccacctgtcaccgagaagaagaccaaagcggcggcgacgcatccccaaccctaggacatttaattatctggcacactttaagatgtgccaattaatgatttgccacttactatgggtgcagtgacaaatcttttataaccactcgtaaaagtggcaaatagttaattattcccccaaccccagtgtgggaatgtcgttgcacttcagtacaccccttaatcgttaacgaagtcaacaaacaagaagaataacatgtttgatgacgtgctgctatcgattttgtcatcctgttctgtttctgggtcccacaatttttaaaatttccttttggtaacaactccctccgtctcattatataagggatttagactttttgcatgcactgtttgaccattcgtcttattcaaaaaatttggaattattatttattttatttgtaacttcattatttaaagtattttaagcataattttttgttttttatatttgcacaatgtttttaataagtgtggagattatggataccccatacacacacggcatgtatatccgactgggtatggggtaccatgtataaatagaatatctttaaagggtttcgggttaaattcctaaacttgtatatcaaggaagcacccgagattttagtcggttacgattgtattttatctataactgcttattccgttaggaatataggctgtactttgtaatacggactccttcccctatataaggagtggtccgggtgcctcttggggcacgatttttctcccagatcatacgatcaataatacactcggcggatcaatccccagacaggagtagggtagtacttcttattaagaaggcttgaacctgtataaaattcattgtctctaaacccatctactttttcagcttgatagctacccccatttagtattgccgaaatcttgtttcgacaattggcgtgccaggtaggggtagcgtcaagttcttcgccgactagtgtgatgggtttcgtctctggcatcgacgccttcatcttccctcctgggcaggcgtttcggttcggcagcctcaacttcatcaccaacgacttcagcaagatttgtctccttgactcggatgcgaaccagtcaggaagaggccaagtatctgccccgttcggtatcccgaactcggccgagatctactccaagattttctcaaccgagtcggcttcaaaccactcggacgagatgcaatctactccgacacgacgtgatcaaggcgacggagcatatccctcaatcccgatgaagctccccgatgatttggccgttgttttcaccacaagggcgtcttctccccgtaggcctagacgagatccggcctcggccccgatccgatctagctctagggaagttggtgtcatactccagcctctcgaaacggtttcaacggaagaattggactgctatcttagctcccccggtgtcgattctcgaccgacggagatcctcgagtacgacgacttcggctaccattacgactacagcaacctcgacgacttcgacgaaggctacgaagacaactacacgcctctcttcttcggcattttcatggctgataatgagacggcagaacagcgtcaagctcgagaagcagaagaacagcatacacgacaagaagccgagggccgccgactggaggaggagcgactagcacaggagcaagactggctgcagtgtgagcaacaggagcgcgaatgggccgcaaaggaagctgaggactggcgacagcgcgccttggaagctgggcgacgagcacgagatcttatcggacaacaagacattgaagggacggcggtttttcgcaccccgcagcataacgtggtagccgcaatcacccttctagacactctacttcagcaagatgcgcccaaccacgtcgtcaacatcttaaaccagaccaagaccatgatcaccgcctcggtcccagtaaattcttcaagcgtccgtacgctgactggcagcagagttccacctctttgatctcaagactatcaccaaccaagccttagtattgccagtgcaggatctagtcgcaggagcagatcatgatgaacgatctgtttgttcacctgccgatcgacatagggagcgtcgggccgagcagccccgctctccgcgtcgcaggcgtctcgtcgatcttcacgatactatcaaccagcgtcgtgcgacaagaggccacatcccccaccattcaccagatcgttaagactaagggtatccgccatgaactcttagtcggcaagtttggacgcaagcctcccaagacagtcaaacagatgttcgaaaaagccaatgagtacgccaaagcagaagacgccgttactgcttccaagcagttgggcagcacctggaagccaaagaaagatgcgccgactatagggggaagtggaagtgccaatcacaaggatcgcaagcgtaagccagaggaacttgtggcaactactacgccatcctcccgacagcggtcacgcgtcaacaccttcgacaagatcatgaatgcacaatgcccacatcatccgaactcaaatcacgtagccaaagattgcttcgtctataaacagttcgcagaacaatatgccaagaacacacgcaagccgactgacggagatcaaagcacgtcgaagaagaaggatgatgaagatgataccccgactggttttcaagactctcgtaaggaacttaatcacattttttgtgggcccctggcttacgagtccaagcgaaagcaaaagctgactgaacgagagatcaacgccgcccagcccgacacgcctcaatatcttctgtggtcagagacggctatcaagtttgaccgctcggatcatcccgaccgagtggtccacccggggcggtacctcctggtactagacccagtggttcataacgtcacgctccgacgatccctcattgatggcggcagtgcactcaatatcctcttcgccaagactttggacgatatgcagatccctcggactgagttgaagccaagtagtgcgccctttcacggagtcatccccgggctatcttctactccactcggccagatcactttgccggttaccttcggcactcgagagaactttcgcacagagaacatttgcttcgaagttgcagatttcgagatagcgtaccacgctatactcttacgcccgacgttagccaagtttatggctgtcccacactataccttgtcacgcccagaaatttagcccaaatttccagactattttgcgtattaaatccctgtccaggaccagccagggtacacaaaacgacaagtaatatacagttccaaacgtaaataaagcgtaaaatacttacagaagaggcacttagtcctcacaccgaaacaaaagcagcagcagcggaaaaaggcgatcctagcggggcttcagctccactccacaggcaaaacttaactggggtctgagccttggtcctctaactccatcttcagctcagaagcgctacacttctgaaaagggggaataatagcaag

SEQ ID NO: 6865 - DNA, 1727 bp, Oryza sativa
cagcgtctaacctggataccacgagttaatgttggcactgacagctcgtgcagcgtcggcctattagagacatacgtaagcatgttagtaccaatcggacaaaagaaaaagaaagaattgagcaggagttcgacttaccccgaggaagtagtttcggtcacagtgcgtggggtactcatctgtgacagcggcaacatgcggctatggcacggtaggagtaaaggtctattaatagtgaaatttggtaagccacaaaatcatcatcgaactggagtcagtatcggcttcagaatcctgaatcggctggtgggaattatcaagtcaccaatagattatgctcaaaggaaaaagggtgttcctgttcaaattcggaccgttctttctaaaagagattgcatattttcccagggagaatttaacagattgcagagattgttaatcattaatcatcatggttatgtgcgggatataaaccatttccattatctaaaagaatcattgtggttaggtacagtcagtgagtcgtttcaaacaatattacagtcagtgagccaataggagtgtttgtttgttgaaatttgctccggtccaataaaaagtacctcgaggaactagtacctcacggtactaaatcattttcgatcactggacctaattggacaagatgggtattgctagatccaacgatcggaaacgatttggtatcgtgaggtatcgatactttgaggtactttttttttttggactggagcaaatctcctgtcagtaaaaactctgttcttatttggttttctaacaaagctggatcaatagatataatttccaaaaaaaaaaagaagttgcgtatgtcatgcaaaatattttttttgaaataactaaagctaatttcagatggatcaggtggaacatacttttgcttatgtatatgctcattgtatttttcatttcatctcctaacgttgagtttatgccttgctgtgtcaggtggaggatcttggtaatctgatcaagctatacacagactggcattcttcgcttgattccttattactcctttgatcagtttgtgtgaaaagtcgagaaagtgggtgctagtataaacagatagaagagcaggacgatgcctttcgctcaaatgcaggagaagaaaaccgcgaagaaaagccggatgttacgagaacatacgcattagggcaaccacaatgtgcatgaaaactaaccttaagaaataaagtagtaatttttgttgtacctttgtacattgggagatgagctagggagagaatagtgctatgtgcaaccttaagcttaaggctagccataagaattaaaaaaatatatcatggctttgcaacatgcatgcacactttcaatcttgagtaaatatgtgtctttttactcaatgggtcccaccttaaggtcgagaagctaccatatacattgtagcatgtactatagataaaacaatataagaatgtgggtcccatcttatggctcaattgatctaaaacattgaggatgcccttattgcacgcgacctttatttaggcccttaaagccctgtgtttatttgtgtccaagatttccaccgacttgagctttacttccatataggctgtgtttagttggatccaaagtttggattttggttgaaattagagatgatgtgactgaaaaattatgtgtgtatgacaggttgatgtgatgcaaaagggggctgcaggaat

SEQ ID NO: 6866 - DNA, 4093 bp, Oryza sativa
  unsure (1)..(4093): unsure at all n locations
caaccggccacaatcccagtcggactccacggcactcgatttccttcgtccttcgcggcatcggacacatccgcctcggagccgagcacccgcgtgggccgttccctgctgcttcctgggccgactcggctttgcccaccaaccgaaccgctgctgctgcagcacacgtgcagctactgctcccaaaacagccatcaccacgcattgctcgccacagtacacatacatatatgcatgctacagtacctcgccgtactgtagtatcagatactcctctccattttctttcaactcccgtcgcgagcaccgacgcttgcacacgtaccacgtgaaacccgaccatgtgccatcttgtatccaagttcgtcactcggtatccttaaccgtctagacctcaactcctccctgagtctaatcccgatccccaccgttgaccaaatttgtccttcaagaattctgactctactcaccttctcacatggtatcccgatcgcactagacctctgctcctccctgagcatagtttcggtcctcagtattgaccaaggctaatctcaagtcacctgcacataatcagataaaacaaccgtttctagatacaaatatcacaacctgacccacattagtcacacgcactcacaccaacatccacacatcttttcattgattaaatcatttgtaaagccaattattcatcacaaaatattaatcatcacaatgatttcacagaaaaggccatggaaacaaccgtgttgctcccctcgtcactggatcacgggtttagatcccaccacaaaattttttaccatgtcacattgaacgtttaaacacatgcatgcagtattaaatataggctaaaaaattactaattgcacatattgtgactaatttgcgagacgaatcttttaagcttaattgctccatgatttgataatattgtgctacaataaatatttgctaacgatggattaattaggcttaataaattcgtctcgttttgttattaaacaacatttaatactttaaatgtttatctgtatatccgatgtgatacccagaacaaaaacttttggaaactaaacctggccttaatacgagctaccacctgaacttcagtaactcctatgacgttaacgtttggttcagatcctttcacgtgaagcgcagttataataatggaaatccggcccctcttgtaaattgctaaataatggaaatgcacttatctattttccttataggaatcaatttccttcatattcagttctaaaattttttctagtattctagcacagttagtttgccatgtttagctctcattcttaacaagatagatgccccgcacggttcatcttgtaaactactccctccgtatccgtattttaatgtatgacgccgnngacttttcgagccaacgtttgactattcgttttattcaaaatttttgaaaaaatatgaaaatatttatgtcatgcttaaagaacaatttgacgtcatcaagtcataataaaataaataataattatataaattttttgaataaaacgaatggtcaaacattggacaaaaagttaacggcgtcatatattaaaatatggaggtggtactagttttgttgagatcaatccctcttctttttctccctccgatctctaatccagtagaacgtgtgcactgggacaacagattgtgacaataggttccttgtttctagcaaggaggtaagtaaaagccattgcgtgatggcaacttgggtaaagaactggctgctaattaaccaaagcatggtttgctggttagtaggctacagctgtaatctgtgagtactggcattaccaaatccctctgacgaaagctgtgatagcaacgttaattaaaggcaagaagaagaaaacaaaaacaccggcatgacatgacatcaagccattttaacctgtctcttagatttaaatttaactacggttatacccaaacaagttttatgttgttgcaggccttactgtttttgaccacgtgattagtgtcagttcgaggaaaagataggtcgttatggtagctttattacagccttttggattcataattaaactacccatctttttaccgtacgtgttctcttgatcatgttgggattgtgagtgaagctcgaggtgccagcatgtggatcgcactgcacgattcgatttgacattaacttcttgatgttttctcattaaacaaaactattagtatttccgaagcaccttggaaatttccggaaaacaccagcatcggaattcaagttcaacaccacttcaaatatttccgtaagtacctttggaaatttctgaaaaaagaccagtacttaattttgcttcaactaacagctttggatattttcgaaaaagactagtacttaattttgcttcaactaacagcttcggagatttcccaagtcaattggaaaattctaaaaaccactagtacctaattcagccaaatcaacaaagtcagaaattcccaaaactcgtttggaaacttccgaaaaagaccggtactgatttatgcaagttcacatcattttggatattttcgagaggccttcggaaattttcaaaaaagacccgtaccttttttcgaaggcaaatgcagttcgaaaaaaaattccgaacttgatttttaaaaactccataaaacaccagtacacacaaatataagaaagagaaccacttcaactaaaactcttttgagcacttttctcattcctatatatcaaggcaacatccccttgatagcatgaattttctattgacccaatctaatgaaaatttacaatttactaataattttttgccgttttttatcaaaactccacacataaggatattgcatcgagcatcatctcatggcggactaatattccttcacacattctcaatcgcaaagcattaatcctcgctaatcgatttatcattaaccatcaaaaataaatagggtcagatgcacttttagaacatacattgcaacgtcccatttcttaagaagcctttgtagagcatcaaaaactacgagcaatgtggctttcttataatttaacgaatatttttgtgggaaaaaagattcttcgcatacttagggcctgtttggtttccagtgagtccctgtcatattggatgtttggacactaatttagagtattaaacatacactaattacaaaactcattccatatccttggactaattcgcgagacgaatcttttaagtctaattacgtcatgattttgacaatgtgatgttacaataaactttttctaattatgaattaattaggcttaaaaaattcgtctcgcggattagctctcatttatgaaattagtttttttattagtctatgtttaatactccaaattagcgtccaaacatctgatgtgacatgggttaaaaaattttagccccatctagacacctgcttatactctggactctttcaccacgaaagtaagcaatttttgtaaacaacaaaaaaaactgttgcggatatctaatcatatctgttagccacttcactagtcaaatcacatatccaaagaaagcatacatgcttttccttgataccttgaagaaacggttgattatacatttcacaatgtaatatataattccttttcttttattttggtaaatatcaatatgcctttaaacacgttcatacattataaccttaccggttagtacttcacagatatacatcacacaaataattagtatagcaatcagtacgtagtaggatttcaaagcagggtttatgattccgacagtaatttccgtttcgggcactggcggaatttgaaatttcatgaaatccggtgaaaaaccggtaaattccgaacaaattttataaaccgaaaattgaatataaattccctgagtttgccgataagttctcgaaaaccggtcgattttggcgaaatcccgatcaaaatcatcgaaatctcgatcagtaagtattttcctttttttaattccggtcggttttggcccatgtaaggggctgtttggtacagctccaactcctaaatattactccaggagttgagtctggagtggagttg

SEQ ID NO: 6867 - DNA, 8277 bp, Oryza sativa
catccaccccaccccaccccacccaccgttttcccctctcctcccatccccccgcacccatctcgccgtcctcctcctcctcacctcacctcgccccggatcccccatccacctcgcgacctctcctctcccctccccggcgcttcacccacggtagcaatcactcccccccaaaaccctagcccctccgatccgcccgccgctcgctggcccttccgagtcccggatcggcgcggcggccagatctgctttccccgttcgatctgactcggtttctctcttttccatccgcgtgtgtggtgtggtgttgggtttggttggtgggtgtgggtgtgtgtgtctccaggcgatggcgtcgaggctggcgcagctacggtccaaggcggcgcaggcgtcggagctcgtgtcgaagcacgggtgcgcctactacaaggaggtgatggagaagaacaagcagcacgtggtgcagccacccaccgtggagaagtgccaggagctctccaagcagctcttctacacccgcctcgccaggtgatccccggatttcacccccgctgtgcctgttcatgcggctccatttggtcgctgtttcgtagttggcggtgtgttgcgatctgttggcaattgcgcgccgggggggggggggtgttcaggcttgggtgttccgacgaatgtagcttggcacgatcgaaaattcgccaataattggtgggtatccaaattatcgtgcctccgattactctagtttaacctgaatttggtatggcttgctctgctcatggtctgcaatttgggtagtcagggtgagcctacatagtggttagtagatttcgctagacgatgggttttttttttgttgtctggtagtctggttgtgcacttgtgcttttgttgttgtcatgacctattaggggtttgagagctcccttccatacttgcactttataaatcttaatcatttgagttgaccatttgttcacacgctcctccctttatgaattgtgcttgtgtaacttgttgcatgtataaacttcggagagctcgtaaccatgtgttatgaggctgtttgaatgttttggcctgtgggatgcgtgatgttctccttgaaatacgctacctgctagtacattgttttggtcagacttgctatgctcaataatttggtgaaagaggataggcacagtattaattatggaactacttattaagagtgcatttcatctggtcatgcaggcactgagttctgtaagacccataatctgtcagttttgaaagtttgtaacaaaagaaacctatgcaataagtatgatatacctgaggctcttactgtatattccttgttacctttgtatttttgcttggatccatggttcatgaagacatagaacgatgcattactgttaggcgaaagtgtgagaagtcaaatacaccgagtgaaatgtgaaatctattgtggatgatacataatgacaaaatggaatggtatgtattttgtatgatttaagaaatgaacttatatcaatattgctgtggtaattacattagcagtttgttcagtatgtttgaaattatttcttgtttgtttgtttctgcagaaaaggcattgcagtaaaatctattaccaatttactttatgggatttacctaattactatgaactataatacaaaatctacattagtccattgtctgttctgagaatgttatagaggtacagctctgtcataaatctgtaggataagatgaatgcttttctgggcctcagtcttctattctttttcacttggcaaccagctgtgtttagaataaaaaaagtgacaacaattcaagtgtggatgcaatattaggctttatcacggaaaagttatttcttgaatcccaatccagtggccgcactttagcctgctttattattgtgacgaacattgttttttctgattgctgtataatgatgctaatccttgtttgtgtacatggtttgatgagtggtgttgttcagtgtgggagctgatgacagaacaaactggctaggtcagtgatcactgatcagtctggtttacagaactttgttgtatacatgatgtgcaaccaataacatgcgatttagttagtatcttgtctgcaatgtttcaagtcatgattgataattctggctagcaatcacgtctgttaaattaaggctgagcaatttcttcacgtgttataaattgatgttgaaatgttttgaggttggtcaggagcagctattatttttatttttacacgtttttgcattagaattttgtatgttgtttccattttttttcattagggctcttaatcaaggcactatctccaatactgtagcagatggtgtaccttttgaccatcttctgctgtgatgttagaattagggctcaccaggttgaaactatactggtcaattcaggctggtccaaagagcatgcatgagacaatgagatggacgggacacatcttctgtgatttgccggtgcccatgtctacctatcatgagggaaatgaacggattgacgaactttgggtaaactggatttgtttactcttaactttgaatgattaattaagatgtcatgttagcccttagatgcatatgcatagggaccagtcacgtgcttgttgtggattgttggatggagaagttgcaaggtctgcacttgataggcaaagcaattgtgcatgtatttatgaatgtgtatcaacttgggtggagcattgtgcttttaacctttttttctttttctttttttttggggggtggggtggggggggggtgtctgccatattttcttgaacaagtcaagtcatcgattctgcattgtgaatatgccttcgttactatgcttgtttactttggagctctgatctcaatgacttatatggctgttgttttcttcagtttgccaggccgctatgaggcattttggaaggaatttgatggtgtcaagcaggtatggaagaatagaaaggagctcaaggtagaggaccttggaattgtgacattatttggagttgagctttatgcgtggttctgcgtaggcgagattgttggcagaggattcaccataaccggctataaggtctagaagagttctgattaagacctggtttataaaatacactgttagctgatgcttgtcgaaatgacaaagatacctcctgccttttcacaattttgtttatggaaagtctttctagtgctggatgtcagccaagacgagcacatcgttgcaacactgcttcaataatttgctcgatctctcgattgccattttggtgtcctgtaatgtgaaatactgaaattccatcttgccccacccgtcaaattgtcatttatttgttctcttgaatccatctcaaactgcaagactcaagtttgtcgctcgttcaaaatgcctttctgttgatgttggcatatacatcatgttgtgcagctagaaacgatgaaagcgtcagtactgttctattgctcgttagagtttgctttaaacaatgaatatctaattatcttacttatagaaccggggtcttcctgaataccggcacttttatttccaaatcactagtacttcctcggtaacagccaggctaacaacaacctaacgtagatcaaccgggacaagctctacaggagaacgtggcgacaaagctagcagaaaaatggtaaaaaagaaaagaaaagctgttcctaaggtgagttgggtgggcttcagttgtatagcagcactaggaaagtagtgaagctgctgcttgccagtacgaggatccagcccttgctcgccccgcacatcctctccgccgccgccgcccccttcctggtgaagaggaacagcaccctgtcgcacgccagcttgaacagcgccaggcacgcgaagaagaggctgatggacagcacggccagctccttgttctgcatcgtctcctggatgctcctcatctcctcgacattcgacctgcacccaacacaacaattctcatcaagaatccgtagcgccttctgcgaacaaatggagaatcgcagctggagagacagagagcttgcctcatcgcctcgttgtctctgatgagatcgtccagcttgccggacacggctgacctccactccttgagctcgccgagatccttggcctgatcaacaacaacaaatggcaaagcgaatttggtggattaattttatgatgacaagtttcagctgtcgtcaacaagctacaggaatcaatcaatggtgatggttttgtaccacgttgcccttccactcaacgaggtcgcggacgtcggccttcatcctgtcgagcgccatggtcgtctgggagaggccggtgtggaggtcgggcagcttggcgccgtaccggtggttgagcgccttggtgtagtcctccagcgttgagaggcccagctccagggaccgcatcttctgcatcatgatcttgagcacggcgtcgccgtggaaccgccccgccgcggccggcttcccgtcgccggccaccgtcatcctcgagccgttgttcttggcgcccgcgccgtcgccggcgctgtcgttccggccggcggcgcttcctcctcctcctcccacgccgtccagccttgcgttgacctgcgcggtgtcgttgcggagggtgccgccgtcgccgccctcttcggccttggcggcggcggaggcgtcggtgtcggcgccggagccggagatgatctcctgcagcatctgctcgacggcgtcgatgccgtacacctcgaggtagctgaggatgcagtagaagccggagccgtagtgggtggcgaggcggaggcggaggtagcgcgtccaccgggggtccggcagcacgaagcgctgcgcgtgcttggcgttgtcggcggtgaagcggccgagcagctcccactcctccgccggcgccgggtagctcgggctgccgtacagctcgaagtccttgaagttggaggagtagtgctccaggttggcgaggccgatggtgcgcaccagcgtctcctccgacagctcgacgtcgacgaacttgtcgtcggcggagcacgggttgcgcaggtaccggtccttgtcgccgccgaggatgttggcggcgcccttggcctccctgttgtgggcgagcaccttggcacccttggacgccgccgcgtagttgtactccgcgccgctcggctccagccggtgggccgccggcgtcgcgccgtcggggacgcggccgttctcggccttgccctgcaggatccggctccggaactcgtcgagctcatcgagcgccgccgcctccgctgacgatttgccgccggttgtgttgttgaacggctccaggctccggtggtcagtttcctgctgcggctgatccggcgggtgcaacgatggctggcacgtgggcgcggccgcggaggcgttatactcggtcgggaaaatgtaggcctccagcggcattaccttgcagtagttttcgcgcattccgtcctccacgtcgtcgtagaaatctacaatcaatcaaacgccatgggtgacatgacgacattgatcgatcgatccatgagcatgagaggaggtggatcgtggtgggtacgtacctgaagggtcggtctggctgtggaggaactgggagcgaaggaggaagaggaggcaccagacggaaaagacgacagagagggacacctcgcggaggccgccgtccatggacagcgcatcggtcacggccggcgggtcgcagccgccgtttcctccgccgcctccttctctcctcttcttgctcatgcatacacctgcgcgcgccttcctcctgcttgctgtgccaaagcgctaaccacgtacgccgctgcacgctctcagtacaaaccttgcctctgcctgcctacccgaacgacgtacgcgcggcgcggtggatcgatcggtctcgcggacatgcactacgagtggattcgggagatgagcgaggggtgcgcgagggagattgggacggggagcaggagccagcggtggagcggcaacgtcggagcggagctaggggcgcgtgcggaccgagcacgcgctgcgccgaggcgacttggccggtgcccggtgatgcccacggctgtctcggcgcgtgtgaactgttcaaattatcatggtaagtgccacgtcaatatcacgtgggacgaagacttagtcaaagaaaccacgtaggcgtcacgtcagctaaaacagaacacaatactgtcgagagacatcgtttgcacggttttatcggttgaagaatgcgttgtacctcgttttgcactcaagagactcgcgacaaattgaggaacctaaagtatacttattcctttgggcgaggtggtggcccagtgaaacgtgggccgaggcctaggcccttcttctggtgaaaacgatgagaatatgaaccgtgggctggtagcccagtatatgcctgtatgtgacaggattaagtccactgttactccctcaattcgtatccctcaaccataatacaagtatcttaaccctcaaactattgaaactagtttaaaactttaaattgactcactcgacaatttttgagactaatatagctcgttgacctggactaactagcttagtaagcacgcgtgacccacatatcagtgtcacatatttcttctcctctcctcctcttctctttgttccctcttctttccctcataggcatacagcgatgacactgactagctcgactaggggggacggccatcggcagcttcagcgggccaagagcagagcagaggagaaggcatggtagaaggaaggaaagcggcccttggcatggccttctggccacgtcggggtgccgtcgtcgtcgtcgccctgccgccgccctcctcacgagccgttgcgccacctccttctccggcattggtagcgccgccctccacgatgacgatgcagccccgtgctcgcattctccaattgatctggcgatcgagctctcggagggcctccacatctccgcgcagccccgccgctttgcctccgctttgaactccaccaagctcccttgctcgatctgcctccgacttgagggccttgtcatgcaccgcaacagtgagcggaagagcatgaagaaagatatgtgggcgactttggggaggaggtccttgggctacgggctggtggcggcggcggagatccacgcgaaagggcgatcgatctgcctcagtccccatcaggattggaaatttcggaccgaaatttcggtcatttcgaccccctccgatacgatattatttcgaccaaaatttttaaattttttcatgaattttggtaatatttgttcaaattcaactaaaatttgtccaaaatttcggaagtttcggaccgaaattctgaaatttcgatatttcggtggtggccgatcaaatcggttaaaccttttcggtttaacctggtccccatcacggcggagcgaaacctcgcggagcggcttgtcggtggtgaggcgccagaggcagacggcaacgcgctggggcacagggatggaggcgtgcaccgtgcagtgtggtgtactccttggtgacgacggtggccaggtggtcgcaaagcttgtcaaacactgcgcacggcatgcggaaggctcgccggaagtccgtcgggctcctgcagcatcgccagccaagcgcccgagcaacctctattcgtacatgctctttgccacgtcctctgtcttgctgcatcccgttgtcgccctgaactcaactgctatattatgcacgatgccacctactcacacctaggggtgaaatgggcgggtatttcccgcccgcccacccgacccgaggctcacgggaggaatatgggagaaataatgggatatccgatattatccgagttcgaaacctattttgttagaaaatatggtttaggatacgggaaaacatgtatcgcctgtatgtcccatattataaaatatatatgaaaatgtattataaatgcacctataaacatgataaaagtttgattaatcgctattttacgagctcacatgcaatattatataatttttctcttgatgtatctcttttaatttgttaattaccttattatatttaagagtacattacattgacattgacggtacgcgaacttatgcagtgggtgcaatagtacaaaacttgaaaaactctcgtttcggtacacaaatttgtgtagtgcgtgcgaagcaaggccaatacatacatgacttcattgccaatcttattgagttggcttgtgattaggatgccacatcaacgctacacacgttatgtggggcgtga

SEQ ID NO: 6868 - DNA, 3962 bp, Oryza sativa
ccaattcgtccaccgcaaaaccagatacatcgcatcccccaactaaaggtaaagtagcaatggcggtgggcggccagcgaggagggccgcggcggtctgtaacgacagaggaggtgaggggggagtgtcggggaggagggaggtgaggggggagtgtcggggaggagggaggcgagggagctcgagctcaccatcccctccgcggtacggcaacaacggcgaggagggggccaggagtggcgttggcaacggtgcgggagtcgaaaattgaggagaatcgctgttgagatttaggagaactgccacccatgctttgtggcctcgcgtcacacgcagcacctgctcttgcgccgccgatgccctgctgtggcggcgccaactccttgcccctgccgatgctgacgccctcctctcttcctctcttccccatcttgaggacgacaaccgatgggagaagggcagcacacggcgggtgccggcggccagtgagagaagagtcgagcgatgtgcggcggcggtgtcaagcgggcccttgagcatgcggtcgtcgtcctcgcgcacggagaaggacgcgacgtcgcactcctggtaaaggagcttgtacgacgaaacccatcccctgctcatgcatccctcctcgtcccaacctcccttgggtgtgctgctgctaccctcgctcacgaaggacgcagcgacgtgctcatgcaggggtggagctcgtgcggcgggacccagcccctgtcctcgttgccctcctcgtccccgttccccctatcagcgggagagtagttgcacggcgcatggcaggcgtcacggaggactccaacctaagggtccgctcgacgccgccgtcacgcgccgctaagttctgcttccgccggcatggtgatggggacaagaaggatcgcgggagcaggggatggatcccggcgcacgagttccttctttgtcgggagtgcgccgccgcgtcctttgtgtgtgagggtggcggccgcttgctcaaggcccctctcgtcgtcgcgcgccgcttgactcctttctcactggccgccggcgcccgctgcgtgcttccttctcccgttggctgtcgctctcaagatggggaaaagaggagggtgttgacgggggcacggagttggcgccgctgcaggaggagggcgtcggcggcgcgggagtaggcgctgcatgtgacgcgaggccacaaagcgcgggtggtggttgttcttcatcccgacgatggttctccatcccaatgacaattctcctccatcttcaactctcgcaccgctgccaacgctgctcctggccctctcctcgccgttgccgccttaccgcgaaggggatggcgagcttgagctcgctggctccctcgccttcctcctccccgccactcctgctcacctcctctgccatcacggaccaccacggccctcctcgctggctgcccaccaccactgctaccttaactaagttggggaatgcgatgtatctagttttgcggtccagtgatgaatttcaggctcgacgacaaattgagagacctaaattaaatttattccaatatgcctcggctaactgcaaagtcgcaggcccataaaataggctcaacaagacagcatgtaaccttagattcctttgggctccagcggtctagctgagtagctgccctcagtcccccgaaccacgacgccgcccggacgcccgacgcggcgaccccgaacggccgaagtgtcgacctcgccgcactctgtcaccttgcgggctctcggcgaaaaggcgggagacggaggccagagccctaagttgcgaggtggttagcccctgagccctctttcctccacggaccaagccaccacctggcaagtttcttcttaaatctcccaaccaatcttccatttgttttgttttaaactgagtagtcattgaattagttgtagagctagaaatttgaaaaatgaaaaagaagacaataggtttgaagtcgctaaatcaacccaatgtgtcactgaatcatttgctgtttaggacaagggaaatttggttaaacttgtttagttgtatcctaaaaatttctctaatttagagttgatgtatctcccatttcaactccaccactgatatatgtaaagataaaaggttttcaaaaatgtaaaatctggttgaactttatatcttgtttgttgaaacgaagaaacaccttagttatgaacttatcttccggtgaaaaaacatctcaaattcgtgctaattcttccagtggcaattgcagtgtttaaagagtgttatcttcgctgaatcacgtgaagaataagctatgaaaaagaataggagtgcaatatatgaaattttgaagattgcatacctacctttcttagcgtggctttttgtgcaaattaaggacggtcacatcacttctcgctttcgaaaccatggcacaaagttaaattgtacttttcttcaagtgttatgtaattcattgaaactacgtgagacatctccagaatgaactattagtgctactatgtgtactctaaaacatctcagttttgtttcttttcatatgaaacagttcttttaactcattatattcagctgcaaaatcctttgtccgtcacaattgcccatggactctgctgtcgatggcccgagacaacctccggctagggcgggaagccgcctctgcacacgctgcagcgagcggaaggctgccctcaagcgtcccaaaaccctagagcagttgtgcctctatgcccctcacattttccgtgtagtttgtcctgatgtttcgagacaatccaggtgcaataatttagctctagtagcttaagattaacagacattttttaatgtttttgtgaaagtaggaatactgtgaaatgcaaaaccgtttttgtttggcagttgtagatagtgcttacacatattcttctagatatgtagggaatgcttctacattgtctttgaggatgagatccatcagactattgttgagaataatttgtttaaacctggtgatcgtgtggccattggagcttctggtggtaaaggtatttccacacctgtatatgccatcactaactaatgaaatagcatgtgttctttatgcaactattgactattttctttcttcatgtatagctataatctgcatgcttctttctttattctgctcttgatcttccaacagactcaaatattttcatgtcatgactgctattatgcagattcaaccgtgctcgcatatgtgctatcagagttaaatcatcgtcacaaatattgtcttgatttgttcctcttatctgtggatgaaggaattactggttacagagacgactcactagaaactgttaaaaggaatgaaatacaggttcccctcccctctgccatcaacacaataatgcctgtctgctgcagctttttccttttaatattggttctattttttacagatatttaatcaccaacttttaccatttaaatgcatattcgtcagttgctgatacaaccgacttattgcagtatggcctgccattgaaaataatttcttataaggacctctatggctggacaatggatgatattgtgaaagcaattggcctaaaaaataattgtaccttttgtggtgtttttcgacgtcaggtaattcttacttgcctctttggtgcaattttttactagttataggttaagctttactgccaatccttttttctaggcactggaccgaggtgctgctctcttaaaagttgacaagattgtgactggacataatgctgatgacattgcagaaactgtgttattgaatatattacgtggtgatattgcacggttagtgctgatcattcctttgtccttttttttctgtggttgatgttaaggctgattttctttatatataggttaagtagatgtacctttataactactggcgaagatgggccaatcccaagatgcaagccttt

SEQ ID NO: 6869 - DNA, 1790 bp, Oryza sativa
tgttataccgtaccagatcaaatatcctcaggtctttcttagggtcaagatgatccgcggtataaaagggacccccagggaggagtgaggggtatccaattcaactaccaacacacccaccatagtttgcaaagccggagtacacgaagccaatttgccgggagatctcgtcgaaaccctcgactacgatctcgtcggtattatttgtctcgactactctctttgtaatctgttatcaccatcataaattccataaaaactggactagggctattacctgatcaggggcctgaaccagtataatccttatcttttgtctgcttgatgtcatacttcgtagaccctcgttccaacgtacccggtactcaactcatccggtccgtgagtatcactcgtcgaaagtttctacaaaaatcgtggtagtagctccgaaaacgtgttcatgataatccatatagaatcatttgaatttaagttagggaaacatttgaatcattgtacaattgtgcataggttgaatcatatacacagttgaagatagaatttataaaaatatttacaaaaatataattatgtacttaatttataaggaagacaacgcagtgggacaacaaagggaatttataaatcaaaacaatagaatgccattatttttctattcgggacgtatgcacatgcacaccaatagaatttgcattattatgataagatagttaagaagtcccatggataaacgatacgaatttgtccgtctcgacgaattgagcttgagcttatccaccgaccccttctacgtcattcaatgcgtattgcatttctgtgctcctttaatagttgataatctacttatgttttattagactcagttattttttcaccatgatatgttggattgacattgtcgatctacaaagtgaatccgcacatccttggattgacctaagaaataaataaagttagtcagtaaggtagtaatattatgcaaatgttagcgaaattgaaaaaaatgtaaggcttcgacgtacgacgaagctgttatttacgttggggcagacaaaatatctccttccacatgtttcttctgcaaaggaggtagctatctggcagcgacctctacaaccgtactttgaatgctcggaccatttaggtaaacctaatggattgttctttcagtctaagctagcaaattgtacccggcattcatactccatccatgactggttgaattgtgtggtcgcttctgtcaggttatggataccacatacctaatagtagttgactaaatctcggcaggacccaccacataccatgtcttatacagaaacaaccttcggatataggatgagttccgtataaggaaggatgaatagagttttacatggaaaagacaaggactactcggattgtatccatattagttttcctagttttacttgtacaaggggacacctatgagtataaatacaaaacaccttatgaggagagaggacacggacaacatagacaccacaaagccacaagccaatacaagcatacatacgccaagacaagctgctagatatcgacatcagagataagcctaggaaaaccccatatggtacctacgggaaccaaagagaggaatctagtgctgtctctgatctcgccgggcaagaactcgaggaggaagactaccctgttgtcgactacgggatggtttcatggccgccatgtcgacaatagatagataggctaccccaaacattgtattggtgtgattatggtgaataagagcaatgaccggcttcggc

SEQ ID NO: 6870 - DNA, 914 bp, Oryza sativa
taaagcgaatagcagccgatataagtaaatcgagatactaagactaaattaactaagatatatgatagattaggtgcttacacttacaagatcaaagtgtcgaagccctagccccgccgatgcaagccgccatgataagaataaactcgtcgaaaaagtagaaaaggttaaaggtggtgatgtgccaaattgtattgatcgtagagatagtttacatggaccccgagtgtacatatttatacccatgggtagacacaatacttgctaaacaagaaagaaactttcctaaagataaaagggaaacataaagtccttatatgacactaaacaccctttcctaaagataaaaaggaaactaacggacttttcctaattaatagatacactgccatgccgcatcctccttgaactcggtctcttctggataagcttttctttaatagattaatttccttaaccaaatatagcaagaatccggctatggcgacttgacgactcccatcagccgattccaggattctgaagccgatactgactctagccgatgatgacttcggggcttaccaaatttcactgttaacacagtggtagtgaaaaaaagaatgatatgacgaaattgtcttcgacaatgttaacacacacaaagcaactttgtcgtagagtttgttatcttacggaccttatcatctgacaatggtcaccacaacgacactctggatgcttctgccatgtgaggagtcccaggggatttacctgccattctaatggttctgcagcaattcatcattcgtgctcatcctttcgcctgaggttgtccgatcttctttcactacgtgaatatcaacgtgttccgtcgttatgtgggttctccgtatctacccactcaatgaagttgcacaccgtacggtatgtct

SEQ ID NO: 6871 - DNA, 1729 bp, Oryza sativa
ttgaacttagtaaattatgattggtgcagacctagagctatactggacatcataaaatcaggtgagaattttaggatctccacaacaacaaggatgccagagcaaggaacatgtgaacgttgtggctacatttctagtcaggtatagtgatggtataataatatatatatatgttgactttttaggacctcttccttgctgatttactcaatgagactgatgctaattagattaagtgaataacagaggtgcttttgctaagtcattagataggttgtcattttattttcgttttgagggaaacattgtcagtttattcagttataccagtttatttgtgccattacagtttgtttctttgaagtgtttgaataactcacccatatgatagttcaatccatcttgtgcattccatgaactatcgaaacatgaccatggctgctgaggccctctgcattgtgctcactcatataaaaaagctatctaatgatgtgactggcatgaattcccctgatttccaatgcttttactgaacatcagttgacattctggtcttcgtagaaattatgcaaagcatgcgtcttgctggacggattgaatcgaggcttgccaaaactaggcatagggaggaccaaaggcgtagctggaggtgatagtgactgtgagcagcaggccaaacgtccggagaggagcaggtcgagtctgcaaggaaaacatggaaacgtcgacttttagatattatcagtttttttgctcaaagcctcaaaggcttctgccgagatattttgttaaaatgtcattgttggtttactacacctggatcatttgacatgattcagttgtacaatctgactatgggcctatttttgggagcttctagttattacagtttctctcaaaatcagaagcttccctaaacagtctagcttttggtctaagattctaagaaactatacttgtaaaatctagaaaatgaactaagagccagaagctgagaaacccagcttttctatatttttataagctagctaaaaacaagctgcttctcacaatctgaagctcttcaaaagacccattgtaagatggcttgctaaactgtcagctggctgattccacagcatgtgttctgtacatgattcgcgacgaccagagtcgtccacacaacggtcacactatcctgttataaatcctgtttgaaaccagatactctctctatctcgtagtataagggattttgagcttttccctgtaacgtttgaccactcgtcttattcaatttttttaaattattatttattttatttgtgacttactttattatccctagtacttaaagcacaattttttgttttttatatttgcaaaaaacatttcaataagacgagtggtcaaacgttgcaagtaaaaactcaaaatcttttatattgtgggacggagggagtatgtttttgtttgctttatcccttgattttttttattttttattttatatattaaaatatttataggaatgatttttttgtttgaaaattattcctttatcaataaacagttgactttatgaaaaattctaaaaatagttaacagtgaatatgagaacacaattatttttcaaacattgtttcttaataatagatagaaacccggcctctatattcatatgtgccaccatttactattaagcgatttccacgattgggatgaagcgaccaagacaattaggataaga

SEQ ID NO: 6872 - DNA, 549 bp, Oryza sativa
ttcttttgattataacacacgctattgttacatgaaagctggttcagacctggatagcctgggtacgccctgaaaagggtaactgaaaatgaatcttaaaattatgctggactagtggaattggccaacctagcagttgtaagatttttgagtttgcgatactttgttgctgacagatctgctttttgctaattgaaccagggctttccaccatttccgaaatcaagatagcagccccattatcaagcatccagaattggagaggctcctaaaggaggagttccgaaccatcgaggatttcaaggcacggaaggcagcagagaaagaaactggcagcagtactgctgccgccgcaggccataacaaggctgatgcgaagtaggtcctagcatggcatgaaattttggtggtcatcccacaaaaaggagaaagtagcaaaaccgtttttgtttggtgaaaaacttaaggatttgagtagacacctgtgcagattttgttctcccctgccgacgatacttgtgtggccttgtccaggaaattttcctctcg

SEQ ID NO: 6873 - DNA, 5956 bp, Oryza sativa
  unsure (1)..(5956): unsure at all n locations
tgttctaattccatacttgcaactccagacattccaatatggagatctagtgcactgtgaaactacttttgagaagatgggccgcacatcacaggtttgtgtctaaattctgatcagcttctttcttattttcactacttttcggatttttgtggtcccaatttaagcttgtggatgcatttctgaacatatttcaggtaaacatcatatgcggtcaatgcccaaataaagaatgcaaaggtctgttgatttttcttattttccatacacctttctgattcttggggggagtactaactaaaatttgattatggttggctgcatataacaagtttctgattcttgcggggagtactaactaaaattgataactttattataggcaaacaaggatgcatctgtagtatatcttatgatgaactgatgtgcaggtaaccagtttactttatttgcattttgggtgaagttttctttctgataattgatgcagtagttgtggattttacccagtgcctactgcctatactaattttcctttttagtttcttgtaaatgcatcccatccctattttatgtttgatgtactaagtactaactgccaggctctcccttgctgtattcaaaaaacttgtaagagttggggatgttttcatttgtatagaactattagtgtggaagtagtaaccggattccaaaaaattttatgttcgctagtaaacagaataattgaaccaagattactatttttttagaggaaaccatgattactattgagtctaggtcttctcatccaagttgttcccatgctgttagcatgccatgataatatcttgtaaaacgaaagacaatattgtgttaaactttgaagcggtttagcacaaacttttttagacacaagaagaggaatagatggacaaggatgtaatcatgtaaattgctttgaacagaatggtgccaaactttgtagagaatatgactgatataaacatgattctctaaaatcaaagaaaataaagtttgaacattgagtatgatatatatttcaaatctgtgattgcttcttggtgttttgttttactccttttttatatgttcttatatatgtttatagcattatggtgttacttgattgattctagtgtgtgcttgactggtggctaaatgtgatctttctgtcagggtgactggtgaacttgctatcccatgtcctaaaagtggtccaagagtatttaagggtttcactgtcggattccatccccggtcatcagagttggtaatgctggctgattggcttttcttatttttggggatcttaactattatttcagtttgatttacaagtaattttgttaccctaggtttataatggattgactcaactgggatttgagcaatctcatcatgagttcaggtattatcctgtcaaagtattgttaacttttaattagatgatgttggcctatttaagcttcagcttatctgaatagaaaatacgtaattggacactttgattgctttcagaaaagaactttcatcaggcttaatataggatgcagtgcctagagagggttgacttgtttttaggtgggatttctgtaagttattaagtataaagcctatatggttggttggacccagctgtctctgtctgtggggtgatctagttgcttgagtaaccagtttgttacttagtggctacaacagatgcatggcatgggctagaccactcaggcactgacctgtcattgtgggaacttttgggggggggggatgattaaatgaaacaccccatatccatccaaatgcatggatggaagggaagtctttaaacaaaatgccatatgttcaagtcaaaaactagagtttgttgttttgccatgaattctggtgctattagtggatccaagtaggtgctgaaataaatgtaggtcggacagggtaataatcaaagcttattctgatgcatattatgtaagaaaaacttggacatgattcaaaacgtgattgagtgatggatagtcctaaaatggttgattggatgaatgtaacacaatatatatagatatattttttgttatttcccagtacatgtgaaaattttcaactagtcctaaactcccagaatttctgctgtgaaattttaaacaaccgctacattatttacatgtaatttccattgcattattctgttttctgtgcagctttcagggtgagcagagtcatgtatccctgtatcttagtgcagtgttttcactctcaggacttgttggaaaaccttccttgaaggtagggaaaaaaggatttaggccataaaaacaacactttttccatatgtttttcttcattgatgaaatgtttttttcccatcagatttcgtacttttgtgatgttgtatgttgctccgtgttagtgaccacttcatcagtgcagtcaagcctagcttagttgataataatactgcagttgtcattagtagaactgtactgtatacatgtaacttttaaaccattttattgaaccaggttaatccagttaaagggcttgatgtgacactgacaggatcagggaccaacggtgctatgcctactaccctgtcccctacaattctgaatgtgatctggagatgttagttgcatccttgtctctccgaacagatgcattgatacattcaatgtatgagcttgttttctatattttgtaggtgaaatcgcgcggagcagtccttatgaggtcaacattttgattccagtagaaggctatgatccaattgaatttacgctcaccaaagaatgtggttggttcgaccacataattgtcagttctacataagtgcatattgacttctagtcgcatttagacacatttcaattgagaaaatttcgtacgttagaaatccgatgggtttagttttcaataatatgggacataaatttaagaaaaataaaaaaaactaacattcattttaacttagtgtagtttgcaattctatgattagcaccatctgaatatttgctctgtagattggacaagtgtgttcctatcttgaagtcaagaagtcaagatatttatggcaatcattagtttattatatttatcttgaagatgaataactactaaaagctgcatataactagtattgtgatacaagcaaggtgaacaaaagttagttgattagtcttacaattctcatcttccttgttcaaaaatgcacagatatatttcagtttgattaccctgtgagttatgcatttgtttgtttgtgtagttcatatacaagaaaaagagagtaatccaatgagaggctgggcaacatttgggattatttcttgcatgtatgtgtgccttgaactttgtaaattagcttcacagcaatggtatatatcgtaccatgaattacaaagtctgttttctgaaattagctcttcctcaaatttggaatcgtttgtttcatatgtataaattgtcctgggccttataaactagcttcacagtgaccacctcagattctttcgtaaacatctttgttgcaattagttttcctctgacgctctattcatcgattttttactgtttttctatgggcatgcagcttcattgtgttgtcaagtctactttgttgtggaggtttcatctacaaaacacgtgtccaacatcaggtaaaattttattctgtaaaacaaaaatcttataagcaatactgtgcagaattgtcttgataaatggcacctttgcgccaatttcagtctggtttatatgcgctgcctgggatgaccatcttgtctgccttcctagatgcggtaagtgttgaaacttttatctgaactacctgctcattgccatatgacaaagtaattaataatcatataataaaatgccaaaatacttatttgtaacctaatcgtttgtgatcaggttggtggaccaagctacatgagagcagatgatcatggcggaaaccatgcaagccaagcatcatgggaacgcatgcctggtacctcacaagcagcagagcatggcaccaaagataggagatacggatcactttgaactgaacgatgctttagtttttgagggttgcttttttgtaagtttgaagtattctgtaatcagacaaactctgcacttcatctgcagttgagcttccgaagcattgcttatcatcttttcagcttagatggtgttatgaattgtggtggtggatcattcagcatgccaccatcgtcatcgccatccgatcgacgtgcatgctcattagcagatactagacctctgttcttagatagtgctccctccagtttttaatgctcaacattattgactttggacatatgtttaatgatttatcttattaaaaaacttatgtaattataatttattttgttatttgttttattattaaagaaaagcatgactttatattttttttgcatacttacattattttttttaatataagatgatgaatagtccgacgtacatccaaaaccaaaagtcacggatgtcaacatctatcatatctagggttttcaatttcgaaatcagttttttttttgtcgggggagaccgaaatttcggtaatttcagaaattttttttggccaaaattatttgaaactgactgattttgattaaattcgaataaaatttgaccaaattcaaaaaaaatgcaaaaaaaaaaaaaactgaaaatttcaggtgagatttgagcttgccggtagggggcgaaattaccgaaatttcaaaccgtgatcatatatttaccctgtagttcaataaatagttttactcaccactcattctttttattcatcgctcaacggtccagatcatctcgctcacatccaacgcatgcatcagaatcaactagccggaaaatcgcgcacgcgggatccaccaaatcgcgcgcccttctccctccgcgcgcgcctacgccaaatcgccaaccgccgccgccctctctcccgcacccgtcgcgaatccccctccgcctccgcaatccgccgcggcacccacacctccctcccctcccagatcgccgccgccgatcccccgcgtcctccaccgtcgccgaatccccttcagcgttggatcgagcgccgtcgtcatcatcatatcctaactgaccaagcaagcagcggtgattttttgttgaaggcggtttaattaccttcgttattcggttcgtgcaaccacactctctcaccttcacttgacacacggacgatcgatgggcaacgccgtcggcgcggcggcgaacggcgtcaccgccttcttcggcaacaccttgttcgcgccattccgatccctcttagacgtctcctgcgagtaagaacttctgttttttttttttactgaaattgatgttcttgcgtccgatgagaagaataatccgtgtaaatgttgttcaaattaatcgcgcgctgattttgttgttgttgttgttatttaaattaattcttgatcatcttctagtggcgtttgcgcgggaacatgggacgcgttctgcttcatcgaccatctctgcgcgctcagcctcggcaaactcatcctgttccttgtcctctcctacctcagtaagttttgctactcgtagcgtttttttttgtttgaattctatactaaatttcatccaagtttgttctaaattaatctagcagcgtgttaattgatatttcgatgatttgatttgattcgcagtgctgctggtgatgtggaagctcggcggcaagtgcgtgctcaagagcgcctgcaagacggccatggcggcgtgctcctgctgctgccacgccatggcggccgcgccgtgctacctctggcgcgcgctgcggagcaccaggcgcgtgcgccgcgggcgccgccgccgccgcgacgacgacgtggaggaaggaagaggaggaggaggaggatggggcggctcgtgatgaagtacgtgcagtagcaagnggtccataacgcgg

SEQ ID NO: 6874 - DNA, 730 bp, Oryza sativa
  unsure (1)..(730): unsure at all n locations
tcgacttcatgcggtaaatttacctgctgtgaaaaaacatcttttttgaagatttcatgcaacgtgctatctaatacattgagatgcagttgacatttatcgtccttcagtgccgcctggcactcccacttcctgctcctgtttggtttcaccccagtggtgccgggtgggttttgctgactcagttcagaaatatgcggagactgaggccaagagaggcacaaagaaccaaagctggagtcggaaatcaggcttctgccatcgtcctgtatctgccttgaatagatttgcaacgtgtcagagctgagtggggtcaatttccaacagaagagaggctgtgacaccaggagaaaaccccgagttccttcgttgggtcctcaagccaacagcgttattgccggcgtgtcccatttctcaggaaggccacactgtgggtgaaaagtgacagctggggaggcagagagcctgggtttgagttgagcctcgagaaagcactaaaacctttctaggcctcactttcctctctctgtgaagcggggatagtaatagtcattgtccttgatggaacggtgtcccacccctccaaattcaactcctcctggaacctcagaatgtgacaaaaaaaaaaatggcgtcattttaagtgtaattagttaagatgaagtcatactagatgagagtgggcctaagtaanggtggtgngangagtcgtatgcaatcattnnccatg

SEQ ID NO: 6875 - DNA, 5434 bp, Oryza sativa
catctatacgcgattttcagaaagtctggtccgtacgaccaatacaaccattaccgttgcgctatggccagacagtgggatgtacggtcctcttctaggtacataacgtatttcatttctgctgcttcaatgtatgaactaacataatacttaatgcatcatattatacacatgtgcatccaaatgttcgagaagacataataaacgatatcttactccacgatcaggtgaagtttgccttaagatgcagagcaatcaatctacaaccgagcgacactgacactacctcatctcctgagagagactgatatgaaaatgaacgtgaaatcgatgatgacaaataaatattctatttttcggcatttggttgttatgtaataaataaacaattaatgtttatttcataaattaccaatgtattgcttacaataatgttattttttatttggttcctactatgattatttaataatgtatcagtaaatgctcaacaataaccgtattttttttctcaattctatctatcaacgtgcattgcacatgcacgctcactagtaattatagcttaagacagttttcttatggcaaaatttactaaaggacacttcaaaattgtgtaattagctgtgggacatccgaaagatgtaaatttgtccgaggacactctaaaagtgtggtaatttgctgcaggacattgggcatattaaaatataatatccactgaattgatgagagagaaaccacgtaaaatgattgttttgccccttctcttcttccccttcgtcttccccaacactagctgcctagcgccattgccgatttccgcttcctcggtgagccccgcatcgattccttgcacctatagcctccctaggatctctttaactcgttgggcatacatgcatggcagtccattgaaggaatcaagccgtcgccgttcaccatgctcagcgtcctcgtcatcgcccacaccgccgcccatgtcgctgcaagagacgacatcgaggtcgtcgctcccggaccggctcatctcgttctccactgccacgccctcctcctccccgccgctcggctgctggtgcggtggtgactgattgggtggttgtggggtgcaggcgatacgggcaaaggatctgaacgagatgttcccggtggccaacgcggaggtggcgccgatgttgaacccgcgagggttcgcgaacctgctgtggaagcagctcaaccacctcggtaacaccgggttcgacctggcgctgttccgcgtcaacgcctacagcaacatgctctacctccatgccgactccacctcgcctctcacgtaagacatcgaccactggttcccctgtgcccgtaagaaacacagaaattgaacgaactcatcccaagatccgcttcgagatcattcattcgtagatagggctgagggcaattttgtcgttttgaaatttctctcccatctttttatcagaaataataaaatattgtctcgggtgtcctacagcaaattacatgaattttgtggtatccatcagcaacgacacaattttacagtgtctcacaaccaattacacaatttttgggtgtcccagggcaaattttgccttttcttatatgtcgtctccataaaccccatctttgaattgctgcatgaatcatacgcatttggagctaaaaacgagttgaacacaaatagtaaaatgttttttttcaaagaactttaacaaaagacatatttctcacgccaaaaccgttataagtcttttcttttggcatgctctcttattacctgcatcgtcataaatcttatataatcaaaggatatatatagctgatgccatgtaatttcagatggctggaactgcaaccgtctggcatggcctctactctcttcgaacaccttgcggttcaccttgggtacgtactaatgtactatagtgatctttccactccttgatagttggattacgtttccggctgctaattaaagtcgtgcattcagtcgtgcataccgcacacaaattgttacatcaagattcaagacccaccaagatttatgcgacgggacctatcacggtatcacctttcacattgtaggctggatacgctgatttcaggtcagattccgcttgataggcacatcacaggatggcacacaccagccgccagaaaaaaaagctttgcacgagcttaaagcgccaacatggaaacgtggttgctctcaggacacaaacagttaaagtgtttcctgatcccaagtaaaaagacggccgagaagataccatttcacgtggttgctcttaggacacaaatagttactgaagctaagtaaattgatcgactcctatttcacgttcgagacccaaaagaacaagaaaaatattggagtatgagtgaaatacagacttaagcttttggtgaaatggtttgtgcgctatctcacaaattgcactggctggtttaatcatggatggaggaccaaatctgaaggaacacttgaagcatgggacgaccctgccttttcagggtgcagatagaatcgaaacatgtgcaaaacgagcttttggaaaagaagatgctaataagcgcatcgaatcgaaggtgattatgactttaaaaaagggcgccagaatcaaacatgacgaagtatctaggataaagaccctggttttctgataagataagatccgtctaatacagtactaagtgactggtactgatggcaatttttgtttggttctctccaaattggagttactactacctaaagaagagaacgcaccagtaaaaactaaaaagacagtcgagcagaaggctctttgcatctgtaataccaccctccttaagaggatacaactcggtaccgatctgcgataaactgccttctctttccatggggcaaacggcagagtgctgataaaggagtatgcatatgagggctaggccattctttacataaacaaggagaaaagtgatagggctattggttcaagtatctcaggcttcctttgaatagaggtttttgcaggcatttcgagggtgtatctaaaaatctgtcgcaagtttattgcgtaaaatttttcaaatgtaagtatagtacaattttagtgtaattacattgcaactatactaaagttacagtgtaatacatgtaactaatgaaaagcatgcatatctcagctgttaaggagtgcttggtgcgaagcagggaccctgagttcgatccaccggacccacagcgcgccttcacgaatctccgtgcacatcagatggccagaaaatcagaagttgccccaaaataaaactgttggaagtttttttagcgaaaccgttccaaaaggacagggagagactttagacaaaggcatgcacaagtgtacaacgccaaccaacaaataagacggctcatcgcaccttttagtaatgtgaatgacagaatgagagaagaaaggtagataagagagacgaggagaaggagactggccctatagatggacaggttcaggcaaccaagcattagagcattgggggaatccccccgtatctattaacaaataatttcagtctgctaaaatgagagaaaaacgggcacctaaacattatgctgtactgtgtttttgcaaacttgcaacagctgggatacgtaccaatgttcagatgccaagtattcttgccatggtcatgcagctgtgtttcttgcagtgcttttcgcgcagatgaaacttctaccagtttatgcaatttaaaatcgcatatttgcatggctgcagttccagatcaacaaacatgttagaactaaaacaaaaaggagataagaactatgaataatcaaagggataccagaaagcagcctgcacctttcccaatgttatgttccgaaagatacacaatattactgaaggtaggggtgctaatgggtggaaatccaatccattactgccccaacccacttctgtaacaagcatccttccaattcaacccagaccacttctccttcttcaagccccaaaccaatccaacccataaaaagttttgaaccaaacgagtccaacccattctagttaagtgggttcaaccaattctaaatccatggactgaaaccgcagtgtccaatccttggttcaactctcttcacgcacgtacatacatatacatgcatgcgcatatacatgcgtgtatactaccaatatacacatgttccatgcatggatgcatatatccactttagtatcacagaaactttagtatcacagaagctgtggttgcagcgcccagccgaccaccggcgccgccacagagaactccggccacatgggagcacctcctccggccagtggcggagccagaaattatacaagactaggcctaaggtagggctcgactaatggagtattagttttatgaaaaaattacatggtgaatcaacaaaatttaagcaagtttttggaggcaggccgccctaggcctgcctccgcccctacctccggccgccagcttccatgtctccacatttttgctgctgtctccacagagcagaggtgacgacgtcgtcatcgttagtgccaatgatccgctgccccatctggggctaaggccatggaggccgacagctaccagccacctcgtctgcagcgccgctggtgacatggtggcccagaccaggcaggccaaggttgaggttgaaacccatgccaacgcacccctccagcagcggtgccgcaccgagcacgaacagcgagtcagagcagctggcccacatgctgggcagaggtcgccggcggcggcggcaggatgatgatgatgagccggtggtgatctcgccgccatgctcctgccagcggttgcaacgagtagtgacacagaagggtgtgggaggcagagaggaaggtggcaagccaccggcggcgtcaagcgaagtggtggtggtgccgtggctgtcaatgtcataggaagacgaatgtgatttggggacaatccagtggaagcccatgggctgaatccactttctacccaaactttcctaaccaaaaccaatccaatccaaaccgttttacatctccatccaacccaccccagcccattagctgcatcaatccatttcaacccatccaaagccaacccacactgaaatccaatccattaaatccattaggatccaatccatgagcaggcctaactgaaggcatcaaagttggcaaagttgatgatgtagtagcccctttttccctgaaacataacagaaatgcatgtaacttcactattacaatgccattattccagtgggtgacagtgtctcatcaattcagactagctatctagtttagtttgctacttgcaaaagagctcctgagtatgacttttttttgagagagagagaagctcccgagtatgactttactcacactggtgttcgggcacgagctccagttaggcagtg

SEQ ID NO: 6876 - DNA, 5119 bp, Oryza sativa
tgaaagactgcataagaaaccaaattatcagacacatcatcaggattcaggagaaagaaaaatcaggacatgaataccagttgtacttctcgcacaacattttgggggaaaagaagcatgtgaaactcaaattccaaggtagcatcaaacctgcaattttgtggtaccccccatgacaatgccccaaatctttttaagcttggtggcatagacatataattcctccagtcttccattatgactcttagatcatgaagtttgctctgtaatccaatgcaacagtttgcatgcatagtgcaaaccttgtttaaatctctgctgggttcacaaatgccaccaaagtatgtagtgcttaggaacttaattttcagtccaatatctgtaatgtaaggatcatgctttataaaattaaatacatcctgatcatgatagccaggatatctcagtcgcgaagaataccaaaacttgtagaattctatactttgattgtttgacctcacatagttaaatcccccgtttgctatgttccccaaatcagttgcattgcctacatagtgatcacatgcaatctgaaaatctccatcaggatagaaatgaggaaaaggattgcggaaccacgtgatgtctgcatcctgaaatgcagataaaaaatatgtcaggtgtgactaataagaaactctatttcagcttcacatctgctaatttttcaggaaaatatacagccctatgtgcgtataaaagctgattttcaatatagataggacacactcaaaatgcaattgactttaccgagaaaatgaagctgtaacctttttcaagaactagccgcaagaaatccagccttttccacatcatgtccagataaccagcagtcagaaacctcttctcttgagaaaaatccacattctcggttgcaagagcaaagcagtatgcgtggatcttcatacaccttttgtaagccttccaatcaaatgttattatcacaagatgtctcaaaagtgagctagtcctaacaccacggcgaaaactgtcgataaaaagatcaatgaccgagcctgaagaagcccatgcagcattcagtgttgtcaatataatggtcttattatccatggaggcctcctgcagaacttgctcaagtttgaggtcgtcactgtcctaaaagaaaatgcaataagccaataatcaaaatgcaggtctattagctctacttgatctgatgatctctcgaattcaatgacatatcagacagcagtgaaattggaagaaattgcatccgcaaaggaaagcagcaatatactatggcttattgttcacgaatctattagttttcagattttaatgggagaacaaattattggatgctatgtatgataagcattcattgcagaattgatatgacgaacagcatgaaattttgacccgtgaaacaaatataaggaatcttgacccgtaaatcacaatgacggtcatttgattattgttcattactgcaatgcgtatctgtaagtcatagtcgattgaatcagttaatggagtgtcaaacaggatcgatgactaaaaataacctcaaaagcgaaatgagtagaagtgaggtataaaccacgcgattcactaacaacggcacgcagaaaacctatatatatatatatgctaagcacagcaattcgcacctcagataactagaaccgctacagaaaaactcagggggacaaaattaaacagcagaaacgacggggaggaggaggtggaagcaaagcgcaccagatcgtcggccgcagcgggatcgacgtcgccgtcctcctcggggaccacaacagcagggggcggctggccccgctcccaccacggcccgcgatcccatcccacctgcaccggttggaccgcgtccaacaccgcggcgcggtacagcacggcacagggcagcgccacggccgccgcgagcaggagcgccgccgcggctttccggagagccggcgcggacagcggcagcgacggcttcgagtgcccagggaagtgacggagggaggtggcggacgtccgtgccacggtctggttcggcaacggcctcgccattgcgagagcggcggcggcggcggcggcggatgaccacgacaccgacgcggacacgcggcgcggcgggggacggggaggggaaagtgcaaagcggcagcgtaacggtcggtgaaggcgtaaactcgtggtttccgtaacgcagcgttaaagcggataccgcctacgggagagagagagaggggatagccgctcgcacgtgaggcggccgcacacgcgggctgccagatgggccaccgcatgcgaggtgtcactcgcgcggtgcaccgctgcaccatcaccgccttccagtctccatgaccgatcgggcccactcttggtcgctctacctggccccacatgtcatccactcgtgctacgcagcagttgagcaatcggtgattaaaaaaaaattccacacccaaaccctagccccgcaccgatccctctccctctcccgccgccaccgcctccgcctccgcctcccctcgcgccgtcgccgtcgccaagagccgccacttccgcttccgcctctgcctcgtccaagtccaagccaactacctaaacctaaaccctattcttcttctttcgcctccgccgcgatgtcgtcggagcctccacccgatgccgccgccgccgccgcctcctccgcgggggatctcgcggccgatctctcctccgccaccatcagcaagaagcagctcaagaaggatgcgaggaaggcggagaaggccgagaaggcgtcgcagcgccagcagcagcagcagccgcaggccgacgccgacgaccccttcgcggccaactacggcgacgtccccgtcgaggagatccagtccaagaccatctccggccgcgtgtggaccgagatcggcggcctcgacgaggccgccgccggccgctccgtcctcatccgcggcgccgcgcaggcgatccggcccgtcagcaagaagatggccttcgttgtgctgcgcgagagcatgagcaccgtccagtgcgtgctcgtcgccagcgccgacgcaggggtcagcacccagatggtgcgcttcgccacctccctcagcaaggaatcaatcgtcgacgtcgagggcgtcgtctccctccccaaggagcccctcaaggccaccacgcagcaggtctgctctctccaccattatgttgggtcaatatgatcatcaattgcatttgcatcaacccttggccgcagttgattagaatatgcattcggatagccctcttgtgatagctctagaatgctgaatatttcatgttagatgatggttctgcaatcgattggaattcacattgtgatagtcctcttatgatacctcttggaggctgaatattcatgtatggtggtttttgttggactttttgtatccatcttaatttaccgtcacaattagctcgatttaatcccgcaacataacttattatacggtgtgcacatttaaaactgtgctttgtttcagttagtactagctaatgaagtgtcttttgtttttgctggcaggtggagattcaggtgaggaagatctattgcatcaatagggcgatccccacccttccaatcaaccttgaggatgcctcacggagtgaggctgaaattgaaaaggctgaacaagtatgtatatgtgcaacttgcttgtacatccacaatgtatatttacaggatgcctataaatattataatcattgtgagacttaagaaattaaccactgctgccgtttcaggctggagagaagctagttcgtgtgggccaagatactcgcttgaactatagagctattgatctccggacacctgcaaatcaagcaatattcagaattcaatgtcaagttgagaacgtgagtatttatttatttatttttactgttatcatttttgtattagtggattgtattgtgccaacgatgctatgtgatctatagctcagttaacacattaaattttccattgaataaaaactactctggcaaatgttcatgctttcagcttagtcaatcttgcagtaataaacatttgcctcttgggaactaagctcaaactttgcacaagttattgctgtttggagatatactgatttggtgaccccaagatgttcccaataatctgtgccttgcaacttatctaattgcacttgtcaagggttagattcaatatgtttgtcttgagtgaaggccatgcgtgtagtatatattcatgtccaagccttatgtaggctaattcttaattcagtggaggttaaacaacgagcttctattatgttttctatcgcgtatgagcgtgttatattcattatggaaattaaatcgttgtcatgtattttgcagaaattcagggaatattttctgtcgaaaaattttgttgggattcacagcccaaagctaattgctggatccagcgaaggtggtgcagctgtattcaagctacagtacaatggacagccagcatgtttagcacagtctcctcagttgtataagcagatggctatttgtggtgggtttgaacgtgtatttgaggttggacctgtttttagagctgagaattcaaacactcacaggcatctgtgtgagtttgttggccttgatgctgagatggagattaaggaacattattttgaggtaaggaaaattggatgaaagatgctttgtattagtataagcaaagtgatgctgactaagtgctgatttctcaacacaggtttgcgacataatagatggtttgtttgtagcaatatttaaacacttgaatgaaaattgcaagaaagaactagagacaataaacaggcaatatccatttgaacctctgaaggtgaacaagttcttgcctctttttgttccccttttataatattatctaactcatattttgatactatattagctaactcatattatgctaattcatacagtatttagagaaaactttgaagctcacgtatgaagaaggaattcaaatgctgaaggtaaatatcttgtttcagtcatcatctctatgttacctcttatttggtatgggtgaatttctgaacatatgtctgatctattgaatgaaccagggctgcaggaa

SEQ ID NO: 6877 - DNA, 13583 bp, Oryza sativa
tcaatccccttgttggtggcattaaccgaacaagccatcatggggattaaacgaacaaggcctaaagggtgctcactactgctattcaaataatgccgatgcacagatttatatcaccaagacattaacacagtaagcatactcaagtactcaatggtgatatctggcacgtcaacacttcttaggtcaaaaaaagacagagtgatgcagacgtccaaataaatcaggcgatttcagtgtatagttatagactgaacacaacaaagcacacccacaaggcaaacatttacctaaattccagccaacctttgattctctccaaaaaaagagttggcaaaagtggcaaaacaaacagaaatggaagtttaaaagaagagatcttactcaagattcaacataatcatttagtgtatcaaaagcacgacagtaaacattcaaaggttgattatctgtgcagcttcatacctcaacaaagcttttatatattgcaagatacaaccgatgaacatcttcatggtcttcactaacttcaagctcctttgcaattatctccttaccaaagtgctgtaacatcaagtcaagaatcagtggtaaacatctgaactatagtcatggtcctcaaatggcaacttgtaaatttcaatggtctaatacatcatgctggacaaccaaggaggaacttggtgtcaaataattaagaagaatccatgagcacatcaaggatcgaacgcaggaggatcacaaaaggactgcaatataccacactagcaagtgcatctcggtctaatacatcacaaaaggacatcatgatcttaaatccactaataaatggcccatcaatctgtctagcgtggtaatgcagttaaagcctcttatgtagcagtttcaaggttctacctaacaatgtagagaactttgttcatcgtcgtgtttgctaacaagttgtcaggaaaaaagctcaggtttcagaatgtgaattatccatgggaagtaccttgtaaacaagcccggcactgctaagttttgtgttaaagccatgtccaaagacctcattaaagcccttctggtgatgatcgtagcgatgccggctgggatcatagacaccaccaacatcaagcacagcatccagagtatcgaggatctacaatgatgcccaacaagaaaaagggaaatacaggtaagttaaagatctaagaatctaagagcacattacaccaaatgagaaggtttatgattattgtatcatatacaactacaagcagcgatttttacataaattacacaacaatctgtactgtactaattgttgcacagacgctagtacaatgggaatcattctgtcatggataagagtaaaatcatcagcacctaactaagacacacatctagcacagatgcaagcgggacatttaactatttgctacttttaagatgtggtgtgtaacaatttgccactcataatctatgatatatgggccatcatgtgtctatgacatgtgtgtccagtggcaaattgttaaatgccacatctaaaagcagcatgtacaattcaggacaccagattatacgtaattaggagaaaaacacaactcagttaagtttaacagagagttgcattattagtatatacagaatctaattgaaacacaacatgtctacaaattgtaggaactgccgcgtacagacccgcaacgcaacccctagagacagacaaacttcacagaaccaaagtcattttacaaccccccccccccccaaccaccccccacccaaaaaaaacagaaaaaaaacaaaaaaaaaaccaaaaaaatgtaaggcaatggtaggttaatcgagccagtgagaaggcaagagacctgggggtcgcgggtgcggacgacgtcggcgccggcgaactgggaggtgaggcggatgaggtagcacccgagcgcctcgtcgcagtggaagctgccgttgtgggtccccacgcgcttgccgctccccgcgccgttcgcggagcggccgtcgcccgagacggacgagtagaccctcaagcgcttgggcgaggcggcggcggccatggggagagggtttagggtttgggatcgcacgcggggaatgaacgtgacggctcgctgcgacagcctccaggcggcgagcatactacaagtcgcgtgcggtgcgggcgatgggggatgaggtggtgactttcgctagatgttgggtttttgaggtggggtttggttggccgttcaaggccgccgaactgcaggaacaaggcccgatgcttgcgtgagaggtttgagttgttgccttgttgggctccctcttcgcatccaagggccgggacgggatttgtccccaacttacgggcatataaatatgtatggttggccggccatataaatgatcacttccaataaataatttgttctctttctaagtcatgtaaaatgagtgtatgttcgtgtcttttgtccataaatactcttactttgagttagattaaacgtgtatgtttaagttgggaaattggaggcaaacaaaatagatatagaaatcaattcccactcctttccatacaatggttaaaaactcctatcttattccgtccagcaaatggcgtacgtttagtcccatcacccctccggctgcttatcatcttccacttccaagatttcaaacaaaaaaatttccatccgggctaggataccacatgggcgattgacacatctgccaccttctcccgtcgaatcaagagccctttagtcccatcacccctccagctgctcatcatcttccactttcaagatttcaaaccaaaaagttctccatccgagccgggagactagctggtcaagggccgggagaccagctgggcgcttcaattgcagtgagaaggagagccatccccatccatccctctgcgcgcggattcccatccatccatctgctcgtgcggatctagaatttccgagaggaagaggcatggtgagtttgcaggccgccgagcggcgtgcggtcccgttcgtggtcttcacgccactcgccaagcccctgactgccgcgctgagcagcaagaggggtgatgggatctcagatgaacttattgcatgcatatatcatatgaccaccactttttacactttttagactgcaccttcgtaatgcatgattatgtatggttggctggccggccacatgaatgatcaataattcattttcttttcaagtcatgcaaaatgcgtgtgtgttcgtgtctttttcataaatactcatattttgagttagattaaacgtgcattaagatattagaggtaaacaaaatagaaatcaattcacatcactttccatcaacacgttgcggggttgtatgagggattggaggcaaacaaaataagtataaaatcaattaattcccatgtttaagttgagtgattggaggcaaacaaaataccacagttttctataggatggttagacacaaccttggcattaaactcgttgcggttgccatagttaaattaaggaaaaagcgtggacatatactctagccgcaatagccgtctatttttaaaaaaaaaaaattatggaagaagtgtgaacatatactctggcgagagcaaaacattttctacaactcttgactaattttgtataatctgcaaaaatgttgtagtttttttttctctaattggtatagtttgccagtgtacacatattttcatcttagaattacttatgtaaactttttaacttaaatcatatgaaacatttatcttaaactacaaaatgaaacatttatcttaaactacaaaaatacaactaagagatttagtttgagtgtttgagggaaggaaaaagaactcatatttagaaaatacacaaaacgaaacgagatgagttattagtgtatgattaattaaacattaattatttttaaacttaaaattttggttaatttgtgttttctaacattttttttaaaaaaatacatcgtttaatagtttgggaagcgtgcgtgcgaagaagaagaaaaatcttctctctttatcaatttatcaaacgcagtatatgttgggaaagcaacggcattaaatagcaattccggatgaacgtatggagcacacaattttgcgagcaaagagccaacgtatttcataatcatctataacggtctataaggaataagtccacttcatatcccccatctttccatcgagtttaactcgtatccttaaaccgcaatactggaatcttaaccctcaaacttacaaagtcaggttaaattagatcatatggtagtatgtgtggccggttttgccgacataataacatcttaataagaaaaagaaaactgaaaataccattaggcccatatgtaagtggttaccttacattcttcctgtgattctcctctcatcttttctcttcccctcctctcctccatgtcggggagcttctcctgtcggtggtgagctttgcgacggtcagggtacttatcctggtggttgcggagggtgccgggtgtgaggtgtctagagaaagaaggagatcgtcatcgtgggtgccggcgtggcgggcctggacacggcggtcgccctgcaccgcctcggcgtggacgtgaccgtgctagagcaggcgcctgcgcccagattacggtcaaacccgttcagagcagtctgtccccaaaatcaagctaatcatggcagccacccacacaaacgccatcctctccacttcccctctcagagcaaggataataacatagccaactgctagctctatactaataccatgtcatttatggcaatcactaatataataggttggctgttaggttagctgtttgtttacatctattgaagatttagatatttaatattaaacatttagatatttaatattcgcatgtgcacctgatctcctcgtatctggttggaagaaagcattttttcctttgtgtgttgcgcttcagccgagtgatagatgaaatgcccgctccatctttttcttcccttctcactcctccacgtcggattttgctgacgggtaacatgctagcgccggctgattaggatctattaaacctgctctcaagtgctgccgcctcccgagtcccgaggtgttccacgtcgccgtcctgctcgtgtttgatctgctgacgacggtcgcgtcccatgtggtttcttctccggattcaatcgtgtccaggagtctaatttggtatttctctcttggtggttttcaattctcctgatacattcaatctatgtgttaggtgcagtagttatctcgttgattgctcaatgtttttctccctatcgtcctagcaattagcagattgatcttggttcctataattcgtcgcttggaggagaggagaagaaaagagaggagaggggaagcagaggaggaaggtgagaggaaaccacttatatgtgggcctcactattttaaaccgaccacacatactgctataagagtattatacctaatttaacccggttttgtaagcttggggttaagatttccgatattgcgctttaaactcgacgggaagatgagcgacgtaaagtagacttattttggtctatattttcacgggcccaagcatcccaggaagtgcctccttgtaaatgggcctggacctgttgaaaagacaagcgggccacgtggactggtacatgtaccttgtgcggccgtttccgagttgaaacaatgtccgccgctacaaccgggttcacttttttatttttcattcgaacgtgcacatcacggagatttgtctattgctccgatattgccgaccatgcaaaagcacaaactaacatgatgaatgatgggtgacccagcgtgaccgaccgctgtgatctcggttgctactaccatccaggctccagcacaccaccttcttttctttagggcccgtttgatacaactacaactctagcttcacctctcctagagttgaagctcatccaaacagtttcagctccaccaaaattaggagtggagctgggtagagctctctcacaaaatgaactactccagacccaactcctagagctaaatttaggagttggagctgtatcaaacaggcccgtagtagagtagctgtagctccggagcagctagtgcgctaccgcgctagctccaatcaccggcctaattaagtgccctcgtcatcaagtttctagtagcatgttcttggcaggtttcacgtcaagtttcgtcctttgtcgtttgatttgtgcttgacgacgttccaagatcacggaaacatcaaacatgcaggcagaggtagttcccatggtcactacgcggcgcctttgattgttttctgatgcctactactaccttgaaaaagcgacgaatttacgtgaactactccgtatatataccgattttacttgaaggttgaagcacgcatcgtagcgtaccgcgtacgttctctcgcatacataaaaaactgtactatttgctcgcgatgcacgtactaagttatgtgaattaaattaaagaggtataccatggtcagaattaactgtgccgtccagccagacgcatcggtactacagcagcaacggacgggtcaatttctggggacgtatgctcggccacctgtcgagcgccatcaaatggcaccaggacaatgcaacaatcgcatcaccggttaattaagctgttcagcacggtacagattgcaacatttcatactccacaagcatagaaaagcaaccagttaacaggacaatcacgagtatcactttaattaaccttgaaaattaaactatagctagaccaacatgcttttcaacgatctgtttaccaacctggggagatttttattatctctaaattcctctcctatctttacacacgggattgatacagcatcaaacacactaacacgccaccaaacaatccaaagggtttaacaaaaacacaaacccgtttttacgtaaaaaagcgactatatttggtggggttttatgaaagaaaaaggtgagagatcttataggcaaatttagcttctacattggcggcgacatcatagggctaggatggacccggcccggacgctgttgccccgctcctgtgggccctccacctccctgcgtgaggagggggccccacgtgtcagcttcccggcgcggcgggctttctccgtcctctccgccgccgcgtccgcctccatctgctcccgcctgcactcctcgctgcagaacggcgtgtcccctctgctcgatcggcacacgaccgcgtgagatgagatcccatggcgtttggcgaagaagaagaagaaacggagagggtgaaaagtagaggggagagatagagtgggcggcacctgtacatgaagatgtcgcggttgccggcgagccgcttccggcagaggaagcacgcgtcaaggaaatgcgtgtgccctcccctccccatctcctcgatcgatcggatcgccgcgcgcagccacaccacaccagcttctccgccgccgccgccgcgcgtcgacctgactactccggcgcgagatccggtggtgccgtagaataggccgtgcggccggctgactcctccggcgagatccggtgcggattcccctcgcttgcggcggaatcgcccgtggtttccctggattctctgatgcgtttctgcgtgttctcagcgtccaaaattcgtgatgcttggtggggaggcaagcgaaggatgcgcgggctattatatagtgggaggggtagagaggtgtcagtaagtgggaccggagtggagatcctgcgggtcccacctgtctgtgggctctggcaggattccgcgtggagaccgacgcgctggtgttgtggcacgggaggtgggccccacggtcgccgacccgctcgtccatctgccgccttccagcttgccccggcagtgctgtggagtgggccctctccggttggtggaaccaacaagtcagtggtagtaggagtagctaggaatggggtttcaggctttgcttctggatgaatcttctgacgatcaccgccggatcaaaacagccttgcagttcagtctaaacaaaataaagaatgcccgctccttgcagcacatgtacacaataaacacggagattttatataaactacagtttctctatttatttttcatgattcttaacaggatcggcaattattaagcccctgtcagatactcagatcttcaagatcttgcggccctggcagctctggaaaaatcttgagaaagtcacacggtacctttggttctttgaacaagaagaagaagggctgtagtttcgccggcgaccagtggtccgcaagtttcagcctggagaggcatgcatgatgcacgggtgtttagcccctctctctcaaacaccccccctattagttgggctactcacatcaacgacctggagcactgcaaggcctgcctcgtggcctggatcctccatgaaatgctgacagaagagctgagtcgtctcgtcccgtaatactggaccagtggaccatcgcatggcgggcgtttcttctgcagaaatcttctgaactttagaattaaggttgccatttctatcttacgggctcgcttattaattaagcgcacgtagtaccggttgcggtgtggctgacgccttacggcgggcaacaactgcacaagccgtttaacttcatcccaaaggaatccatcaagtgtggttggtcatcaggctgagtttgcagtttacaggtggcagtcaaaagaaagcgtaagagcacaaagattgactccgaatattggctgcccttatggattccgtcaaagttcgagccatgcctcagcgcattttcgttacggtaagtcggtaattaacatggttaattagtagcttctcacttgggaaactccttttatcccttaacagaatacctcctcgtttttatatattatttaaataatcataaaaaaatttaacatgataatcaatataacatatactcccaagtaaataagcaaattcacatttaacagtcgcaagtaaaaaaacaaatttcagcacgactagcgtgtcctactcgcactaaaatttattatttttttatttgtacaagatacatttgaatttgtatgttagtggagtaatatatcatatattgatctatcttgttaaaaattttaaaattttttgatgatttttcggatgacatgcataaaacgaaattatatccttgagaggtataaaagagtgatattgtggagagtaaaaatctaattacatcgcacttacttacatgttagagtcgagcaatgacatcttagctaaaagagtgatcttgtggagacgtgtgtgtcttagagcaggtacaatagcaggctattagccaactataaacatattttaatgagataaatgatgagagagaagagcagcgggctacagatctgtagccataagtaactattgtatgaattggctattagattagctatagatgaattggagctagtagtgggctgtactattagacttgctcttaggaaaccttggggagtcttggcttaaaaaataagctgatgtggagctatcacctaggaagttgcattatgtgagttgtgtcgttgttgtggtgtggttatttttggcgtctttgatgattatatatacactctcgagaaaccacgccacgagaccacttaacattggttttcccttccctctttcagcgcatgctgccaaaacgatgtcgggtgtaaagttgtgatgcctactgccaataggatgcttgtgtaaactaatttgctcatcatctaatatattcacacacaaccattttgcgtgctcgaaaaaaataccactttacaatgtaaatgcccttatgaaaggataaattaaaccgaacggtttgattccacaatccaaaactcttctaaaacacgaatattagggaaaaacctaatatcaaataattagaaggggcaaagtttcgaacccagatcggttaacccaccacattgtggagctagccggaagacccttggacgtctctcaaatccaaagctcttctctgttcgctttggataagttccgttatttttagcttaattatatctccatattatcatcaacctgattatatattcatgccaaacttataataataggatttattgaaaacaaattcttcaacattacttagataacttttttacaagctaattgttagttacaatacataacatctaatttatacctataaacaagtatttatatcaccaaccaacttttatccgcatttcaacttaaaaagagcatgccttaagacatgtaacaggttccaaaggtaatataaatatgcttagttgggtactattgtgcaactagacagccaacagatcgaacatcaacaaaggaaaatgaagacgagatggaatagagagggcgttacaatatacattagaaaagagctcataggcttcttttgacagcccggtctgaaccagtacgaagtaaatagaccaaacacgagagcaggacgcctggacgagcatgctgttctaaccaaacctgtatatatatatatgctcatcagcaagcataatgcacaaaaaaaactcttctataattacttcaccgttttccctaccacaaacgtgggaactcggggtcgtggtggtggttcctctcgatcgatccatggactcttcgaaatgtctagtacacacctgtacttgtatatgtagtatcaccccagttgaacgcgtgtgtgcatgcatgcgtaacatgcatgcgcgcgtgagtctccaatccggcaaagggcgcgcggcttggtgtggtgccgagctgagctctctcttgatctctacctctgcggctgcagctgacgctggggcgcgcgctctgatcggtggtggtgcgccgccgcctgcgccgtgggagagtactgctgcttcttcctgcggtgcctgttcctgtccatctcgatctgctccctcctgcactcctcgctgcagaacggcgtgtcccctctggcgaacgaacgacatggtttagctcgatttcatggtgtgtgtgcagccaggcggtggtatggttgagggatcatcacctgtacatgaagatgtcgccggcgaggcccttgcgacacagggtgcactcgtcgaggaagtggtgcgcctcctccacctccgcgtcctggacgcagaacacggacggggcgccctgcctcgccgcgccgcccctgccaacgttcaccgccttcgcgccgccgctgctgctggtggtggtgcccggccggatggcctgcgcgctgccgccgccggagaagaccgcggcgaagtcggggttgccgaaggcgtggaagtaggacgaggtgaagtccatcgatcgggtcgtcgatcggcgccgccgcgcgcacgtctcgccgcggcacacctacgcagtccggcctgccggatccggatcaggcaggcgagcgagcgaccgagcgacgacggcgatcgacctcggactctcggaggaggggcagaggtcgggcggaggtgagaggccgttgggaggcaggcttaatacttgcagggcaaagagcttaactggctaactgttttaccagctaatctctagcttaattttcttcgtctccaggggaaccactcgataaatgcgtgatgtctaatttggaaaagggaaaatggttacaaaacacagcaaaaaggtgacctgtgttgattccgttgcatgcatgcacctaaagataggttatcactaccgtgtggcacctatttttactgcatccatgaccctggtgacctggccaattaattcgccagagacgacgcatgagtaattgtctgcttgacaggcagcatttctacgatgtatattactccgtacgagattgcatcacgatttggccggtcgatcgccatgcaagtcgaggctacggccaatggaagttcgacatcacaaccattcgtgattccaaggtaccttacagatactctaggattaattaaatagacattcccgtcacgtcgacaagcgctccaagacaacacacaaaattgcccttcatttgtttcgttgtgacgaggttcatgataagctggaagcacgcaaaaacatttttatacggccatgatggcgagcgaggacaggaaaacggtggaatttctctgctgccgcgcgctaaaaaccaattgagccgcgcacctgatggtttcgtgcacgcagcttcctgaaatcaacgtacaacaactacgcagtgccctttcgttctacaggaggtatatatgcatgcgatgctcaccgtgtacacctgaaggctctcacatggtttggcacttcggttttgagtttggacgtggactgcgttgtcgcgagctagcagaggggacagcggccgtaacatggccagccagcacagcacagcacagcactgcactgcaccgcacagcagctagcgcaccacggcgatcgagttggtgccaaccgtgtgcgacgcgacacgtacgtgcgaacgcgcgcgtgctcgtgctgagctcggtctcggtctcgacggatcggtcgatctcacgtgtgcgccctgaacaaccagcagccgcagcctgcataccctgccttgcctttgcgcccaagtgggttcgtgctgggcttcaggcacaggggcgcgggcaataatttggcgtgcttagatgtcgtaacgtgtcaagaatctcagctcgcacgggaagagggctatcaagtgcacccttgcgttattgaatttggcctaggttgcctaaaaacgattcttttctctcttggagcgtgcactgtgagcacatgcatggttgcaacttgcatataccaaggcccagcaatgaaagattatctctctattatatactaaaagtccataaaacttcctacaaacattctcaagccgccacgtgggagtcctataaacaatcttaaaacgtcacgtgtcactttaataaacaactggacccactatttttaattagtattagaaaattgttttttcacctccctctcctatccccacgggctcacatccaagcagcccccgcacgtccatacgaacgtacaaacgtacgtaacgaaactacctacacactactcattggaaaaacaaataaaaaactattcattgaaaaaaaaaatgaaaaagaacatatatatgtatgcacatctgcacccacgcgcggttggaaaaggagcgatcaatccttacccctttattttcttcggttgttcactatctaaaattttataaaatatgtgatgtatcttatctataaaaaatattgcatccatattacctatatattttaattacaaaaagttatcatgtggacatatagtcttaataactatatatgtgtgttttaataactgacaactaagtaatctcctaagccgccaagtacattgttgaccaattaaatatggttgatcaattattttatactattcatttatcttagcaataaattatttatgtatgtgcatacgtattgtttttattttagataccttgatgatcataattataggccattaaacttcctataaatgcttctagacttctagcccgttacgtggcaccctataaacactttcgagt

SEQ ID NO: 6878 - DNA, 7234 bp, Oryza sativa
  unsure (1)..(7234): unsure at all n locations
tttggaatagggctcaacgttggcgttgtgatttcgttgatgattccgctattcgtaacaatggcgaatccagagcagaaatgaccctatgtcagaaacatatcacatactcgtatgcctatatttccaaaagataagggattatggaaggatgacatattcaagtcccaaaatacaaggtgtggtttgactcgtggtcttcaacatccaacttttgattgtcattttctgtcatggtaccaccttcatcctaatttgacattctctaagtagaaggcaccaataccaagaaaagtgtgaatgacttatattttaaatattggatgtcattgcaccattagaaattaatcttgttggttgcatgtaacacattcaatgatgcacattactcacattactctttgtacaaataaacaaaatgacacttgtttaatgatgatcattttggaaagaccccagaaaccttatgggatgatcaaagtgggatggagggatcatattattatccatattgaaaccaacttcacatgtaaaagaacatcaaaatatgaatccaacaagaccgtatttatatcagtaaacctacacattatatattattagactagtggttagaaaaatttataaaattcaaatcttatacgtgcgtaccttacagttcgagatgtcgaggtggagggagtaactatcttaggtcattattacacaagatgtaatgaagtcacttgtttatattgattcctagataatcatcataatctataccacttttttttcaaaaaaaaaaaagtaatggtggtagcagtgaccaccacgccatcaataacatgtgatttctcatatatacatcttaaagttttctaaaccattttaaaagaaggtaataatgaaaccatcttaaaagaaggtaataatggtgacagtaaatctgttatcaccgtcccatcaataacatgtgataacatgtggtttctcatatgtactccttgaagttaaataaagaaatgagtaataggagtaggttttgttttaactagagagagaagtgggtagctacatcaaaatttgaacggtaggatttgattttaggatgaatttaaggttttttttcaatctcttttcataattattaagataagtaaaagaattcataattttattattaaaaatcaaagaacaaaattattgtatatcgactaatatataatgatgtagccatatttattttctccacgtgaacatgtaatgccatatgattctcttttaatcccgtaacagtgtaaaagcattctgctaggcaagttttaatatagctaatgtataatatttaatcattgtcacaaatgtagcaacctacgacatgtaaaatataaccgaaactgtctaaactgtcactattattatttgatctattattatctgatgagtctacaaacaatctatcccgagaagataaataaatcttcatccttacccttaatttccttaaatctcaagtgcatgtgctacctacgtatcaaaatatatgatgttatatgagatgtacaaagtatgtatgtgcttttttttttagataatgatgtatgtgcttctttaaaaggaagtaatagtaataataagtgatgaatctacaaccactcctaccaccaactccctacctttttagaaagtaaaatgacacgtaggtctagacgatccacgtgttaaccagccccaccatcattttctacatacataatctcttatttttttatacatttgttattgacatgtaggcagtagcatgtggcctgtatgaggcgggggaggggggnggngangnggacgggnnnnnnngnnnacatgccgcncngngngacccnggggcctacatgtcaataataaatgtataaaagaataagagattatgtgtgtagaaaatgatggtaataacggcttaatgattatttatttaattaatgggataagtacattttactctccttaactcttcgttttgtctaaaatgcaccctcgatcttcaaaatcgggtatttaacacacttaaacttttaataccgttcacttcaccccccccccctcatacagggccacatgtcactgcctacacctcttcttctacctccatctcctctcccctttctcttctctctctatatatatccttcttcttgacagccaaacctccatgcgctagctgctgctgcgcctctctctctatatccttcttcttggacggccaaacctccatgcgctagtagcgcctctcctcagtcaccaccgacctcggtcactggttattcctcgccgacccccactactatagctcgtcggtgaccaccctgagctcgccctgtgtgttgcagctcacttcccagatatcgacgaggagagcggcgtcgcggtagacgcactgtagtggtagcccccttgagctcgacgaggagagcggcaacggcagcctccccgagttcactgaactggactaagagagcatagggcaactcaggctctccagcggcatcggcgagctcaccccaagtccccatgcacgtggatctggcaagctctggccctcttgcgtggttgatgcctcaggaccccaaatccacctcaaggaggcaagtcgatttgtcgtcgcccggatctacgtggatctaccgtcactccatcgtccttgtcagtggcgagagagcggagggagaaaggagaggggtgatgcgacgacaaatggggacggggacagatcgagcagctcactagtaaatcggtttccccatcaagttagttcgtcaccgactaccgcggcgtcgccaaccgtcaagtagatctcaagctctgtctccctctccgacgatctctaccccatccattattgagcggcaccacaaaggtcgtcgaggtggtggtgcccgatggatgagagaagaagtagaaaggagagggtggaagatgggtgtcccctacatgcccaaccttttttttatgtgtcaattggaccaccacgttagttgcatataggcaaagccagcatggtttgaaaaaaaaggttatttattggtattgatagttaggaggtgtaatatacccagttttatagtttgggggtgtgatttaaacaaagacaagagttgaggagggtgtgatttatcggcagtgtcatgttttttcggtgtcctctaaccaattacacaggttttgatgtactgtagtaaattttgtctttaaacaaatatatgagttgagaagggtaaaatggacttatcctttaattaaaatttgagtaaatttcacaaaacaacaggtattctgatcaaactatcgcaaaactatatatttaaggcgttatatcacaactacagatttaataccatatttatcacaaaactacatatttaaggttaagtatcacaaaactgtatatttaaatctttttttacggggaactgcatatttaaaattgaagttatcacaaaactatatcttttagagtttaaacccctagcaccattattatgctagagctataaacattattgttttatgaccaaattggttctaaacatatagttttgtgataatttagttaccaaacatacagttttgtgacaattcatcttaaacgtattctgcgataaatttagtgttaaatctgtagttttgtaatagtttagtatagtacatgtagctcttaaaattttgttgcaatcgcacgtgcagtaggctagtaccagcaaagcaatacggtgcgcatcacagcacagcacagggcaagggaccgcagaggcgcaaaccgtttgcttctaactaccgcggggccaacgaacttttcctctccttcccgcatcctctccacctctcgtcctccccctcccctccgctcatcgtgccctgctccgctgagcacgccgcagctccggatctgtggagccggggatcaggcaggcggaagcgaggtcgtgtcttggcacttctgtggctggttctttcgtagctctagagaattttggtggatagagcgcctcgatcggagaattcgggggggacgagatggatggtctgcctgcggagctgtgcatcaagatcttccacctcctggatcaccaatctctcgcctctgctccccaaggtgccctttttttgtctgctctttttactgccttgtttctcacgattcttagtgcatcattcttgccactgtcgcattcagacgtaagcgctagcaaattgcatcatggtgcctcttcttatcttatgctaatggttcgcagtttaacttaaatcatggccttaacaagtgctgttgcaaaattcagtgtgcaggaagtggaacacgttgacctccgacgacgagctgtggcgcaggctgttcaaggacaggtggggagcggatgctgcagcgttctacgcgccagagggctccaggtcatggaaggacgtcttcattgtgcaggatcgatgcgaccgatatgggctgtaagttgccatcgaattcactcgcctatcatcccgctcgagctgtacttcttatcttggcatgcctactgtcacggtgtcccctgatattcagacgtggcacacattctgtagtacactgcaacaatgtcactctgaagtactcctatatgaactctgaatactgtaagttacgcctcattgatctttccaggggtgtcaggattatcagagaaggaagcgattactacctgatttaccagggtgagatccagaggtacttggggtcgagacagcatgtgagctgcgatagcaaggacgctcctgcgcagagtagcgaggacgagcagcggcagatatccgatcggatcttgttcttccttggagacctggaggctgcatgcgcagatgccaaacgtgtgaaggtgcgacgaccgtgatatccaggaacagcgctgtatgacattgtagttgttatttttgcacatatttcgtgcacatatgttgtatgtaaaatcttcaatccattatccgtagcgtttcacattcatcttatgtatttcctcattttaaaagtaaaaagtttgtaaatctgcgctaatcgccttttacttttaggcttttagcaaagcacgtgtagcatcatctggtaatttttccgccgtaagtaaatgtaatagtcatttagctgcaaatgcatatatgcttaccacgacaaatggatatgtcccatcatcttttctaatctttataaaatgtaatcataaactcgtcgttcgagattaaaaaggcaactggcctctcctgtcagctaaggatgttttacgcaaggaacatgagtactcaaatgtcaattacgagtcaataataacatgaagttcaactggttaactgtgttactgcagctcatgggtgacagtgcgttactgattgaagcctccgtcgaacgttgagtcaacacttgatagcagctcttgccatttccaacgctccctcatacgtcttattgccgccaatgaagccgctcatatgaacaaagacacatcctggaatgccaatatcgtttgacagttcatcatctctcaagcccctccacttttccggcagaggctttcggctctcaaatctatccggagcaacgccaacagcttgtactctccaacttttgctcctctcatcctgcaattacgttatccaaatcagcatacgcagacatcaatacttttagcatgctactggccaacgctagaaagagagtttattctatgatcagaagttcagaactacaattttaagtgcataaacaagggcccttttccttctttcttagattgaataaaacggtgtttgacgagagtaagacaaaacaaggtggaaatcagcaagaccaccctaagggttaatgacaaaatggaggaaacatggcatagtataaatgattgcacttaaagtaaaatttactttcaaggctgtgaaacgtaaatccaaaagaaaactgagtctctgctagagcttcaagctacatgctacttctcgatttcagcttatgcaactagaactacatcaagatattcatatcataggctgagaaaggcaacactttcacctggtacaacacatacttcgtgaggggatcaatcttcagctcctcttcaagctcaaacagatgaagtttccactgcaatgataataagagattctcaaattacatgcttggaatgattcaatatgttagtcaattcagcagggtattcctgaaaaaagatcttactgggcagaatctatccaaaaccataatttcttcacttggatcaacctttcctcttgacaacaaacactccaagacaatagatctcgcaggtaaccatgacttaacatgaaagcgaacactctggaagtgaaggtgcaaaatattatcatatacaaagagatgaatggcgacacactaaaaacaaagttctcatgcagtaaactaacgtatcacatacagagactattatacctccataaattcacttccagcaagcatcattgcctgttgaaatgcagcattttccttctcaggtgactggtctggatcggtccagtctggattaagacgcccaacgcgtgaagacaagtgtgtgttgttcacatactttgggggttggtctgtgtcatattgattgattccgttgtcgactgcatcaagcgcctgtcacatgacaaaagttattgtttctctgggatcatgcagaaatattggggtagatgcataaacacataaattaataacagtgtataaaagatgtcttaagaaaaaatgatgtgaattgatgctttatagattgaagctttctactccttagtataacggttaaacttaaacaaaaaaaattacttgcattcaagtatatctgatgcctctacacccttctctgctaactttataattggcaccaaacgcagactggatagtaatcatattttgccacatacagtgcatgcagcctatcaagctaattcaaaagtagatcgtgaaaagcccatcaaggtaatgcaaaagtacggatgaaacattgaagcattaaccttgtagtaggcagtcgctaagctatgatatttgttagttggttccatgctcctaagataaaacaaaggatctaatatgtgcctagcaaatatttcttgctgtatgtctgctagtggatgtataatggagctgcaatttatcaactattctattccccttaagggcttgttcggataatcccaccaattaacccacgaacaaggggat

SEQ ID NO: 6879 - DNA, 731 bp, Oryza sativa
ttgacattttcagtcatagaatcttaccaaatagatagatttgttggacattttgacagatgttcatggactaagcctagtaagctacctacaatggataccaaagaatcttgtctggtaatttggtttgttaacattgaccaattcatgacattaaacggaaattatttttcaaaaaaaaaaaaagaacagtgatgaatcttgatcaatcaaatctaaagaatgggactggggagagattcaaccccacagtatttttttttagtacgagggaggaagtgagcacaccaaccgtgttcgcagctcactcaaatttgatataatgaaatcctgtttttgctaaatatctagtatgttagaaacatgttattggcaactttgaagtagaacaggtgtacaacttacagatatactgggttatctgggtcgtcttttttagtaaaaccagatttaattgttgaactaattttttgcttaggtgttggcctaaaatgctttcacagaattatatccatagcgattaacatcgtggtttgtcctggcaggaagctggaacagaaatcgaacccatgggtgacctcaacactgaagctgagaaaaaactaggccggcttgttaaggagaagtatgcaaattcagcctgtagttacttattcgcttcttttcaaaagaaaatgtggtttgacaacttgctacattgtctgtaggtatggaacagaatttttcatcct

SEQ ID NO: 6880 - DNA, 741 bp, Oryza sativa
gaaatatgacatcttctaactactccatcagcttaaagaaattacgagatcagttcaaggagatgccagaaaatgcaacaaaagaacaaattgaacattacactagggcattcattttggatattcttgggtcaatgattttcccggatacatcaggagatggagtgcctgcaatgtacctgcaattccttcaggatcttgataaaccaaaggagtacaactggggggcaacaactcttgccgtgctatatagacaattaagcttcggtgcagaacgagagagattggagatggctggtccattagtgcttctgcagcattggtgttggtcgcggttgagaccaggacgaccagtggatcaagataggaaccctattagttggggagagccagaccctgagagttgtcctacatttggagcaaaatggtgtggccaggaactttatcctctgccacataactcgggtgttgcgttttatcagaacttgctggatcaagttcaagacaatgaggtctcttgggaaccatataatggactattgatgtccatgccaagaagagttagagctgaacgtgctttctggtatagtcgagtacctctcatccatttttggatcattgaatttcattatccagatagagtgatgagacaactagggagaaagcaaaccattccacctctcccccacatgatgagagcaagcttcgtcaactccataaaataaatcatacagggaaacc

SEQ ID NO: 6881 - DNA, 965 bp, Oryza sativa
catgtcgctaatgttgcagtaaactgatagttctgtcactcaagttacagttttctgaaatttactccttacataatgaacttctaattattgttggtttagtggttaaaaagtgattactccctccggtttcatttttattgacattttggacaatgacacggtctacaaaatatatctttgaccttatttttttattataatatacacaataaataaatacatgtttatttttattatagtgctttgaaagacaaatctatacatgttgttctagtttctttaaactaaatatttttaaagttattgatagtcaaagttataaaaatttgacattaaccttgtctaaaacgtcaattattatagaacagaggtagtagtggataagaaatatctgtcacctagtgaatagatggatctctcttaacctctttctgtgtctcttaaggtaggggattaggctcttgtttgaggagattatagtgcctgcagctcccctcagacaatccggattctcatccaaattctaaaaatttatagcaatagaatttttttaaaaaactagaagttagaaatcgtgaaaccccaattttctatattccaagcaactaactacttactaatgttcctctgaattttctatatagcagcataaaaattgtgcctccaatagttgtccttgcatgtgtaatttatatatgagttatgggtcccctaacaattaaatatggactaaccaaacttttagtagtggcatacgaccattttcttatgagcacatttcactaaattagaggcattttaactaaacaattgtaaaactatagatttaaggtattgtttcataaaactatagatttaaagtattatttcataaaactatagatcaatggtaaatttatgacaaaactatagattaaggcttaatagcactaaactacagatttaatattaaagttatcaca

SEQ ID NO: 6882 - DNA, 7701 bp, Oryza sativa
gaccaccacatacaaccaccacagtcgtgccggctaaatatgaggaagaagaggaagaatggaggaggggaggagatagagaagggagaggatgaggtggaggaagtggggtctactgatatgtgggtcccactatttttaaatcttattatttgactgacatgtggacccacatattttgttttattttttaaattgttaaatttcgcttcatgtgccacatcaatgtcacgttagatgaagatcgagtcaaattagtcacgtagatgctatgtcagctgaaaccgtcatgggacttatattacattggttttgatagttgaagtacccgttgtatctggtattgtggtttaaggattaaaatcgaactcgctctcaggttaaaggacctattgtgaacttattccgatcctgagtatgttgcacgagaataactatattgggccttctctttctcggccggcgggatggcccgtctatccatccaccgttggatcatctgtcggctgcggctcgcgttgaaggcttttggcctactagcgttgtgtgctgttgctgccgtgtgccgcttgcagatgcgagagctgacagtttggctgcagtacgtgatgctaccttctctttttctcctcaaatgcctccatgtatggtcgattctcgttctacccctgtcggtctctacttcgtttccatgtcgattgcaacatctgaagtaatcgtttcgatgttcgttttggtctgcggtccatgtcaaatccaaatccgaaaagaaaaggtacaagagatggtatatctttatccgaacttttctccgtgcccttcttttgttcctcaccatgtgcaaaatgttcccgtatataaggccatactcggaacgggaatgccagaaggagaacgtgacacgtagctgaaaggctcgctcgcgagtggacgactggacggatcacggatgccatcaacgtgcgtttccggctcggaggcgttggcatacatgagtggagagctatggagcgacaggctcacatcgcgccacgacgccaggttacgcaccgttgctagttgctaccatcgccatcctccgtacgtacaacacggctcgttttaatttcgtaatctgcttgctgttcctgagctagcttccgcttcgttcgggttagccggtggccgcctcaaacgtaagcggagcgatcagatccattggcagcgcccggttaacaccgctcgacagaacgagagggagccaaacgcatggaggagcctctgcgcgttgcttctgacttcttcagctgttggggtcagcgtctaagcgagcacttgtccacgtgatatcgcacacctgggagggtcttgtaccacgcgcgcgcgggccacaggtcgcatacttgcatgccagcgaagcgagagattctttgctctgtttcgtcaacccgtggacaggtcacaggtggacgtgtgatgctgcggacgttgttctcagaaccaaaaagaggaacaccgaaacgaaacaaaagtatcaacaatagatgaacagtggaaatatgctaagtttgtttagttcgcgaaaagaaaatctttaggtgtcacatcagacatttgattggatgtctgatgaaattttcggacacgaatgaaaaaactaatttaatagctcgcctgaaaatcacgagacgaatttattaagtctaattaatccatcattagcacatgtggtttactgcagcacttatgactaatcatgaactaattggtctcaaaagattcgtattgtgattttcattcaaattgtgcaattagttttttattttatctatatttaatgctctatgcatgtgtcaaagatttgatgtgatgttttgaaaaaaaaattagaaggcctaatggaactcaccaatcacaagatcaaagcgacattttccacatacagccgccgtcgggcaccggggcagtacagcgagagaaaaaaaatccgtcgtatttttttcacgaaataaataacttgaggggaacaagttaaattgagtataccagagttgaaattaagagcggcacaaggaaattagaaaatcacgagaattaggatgtcatcggtcgcccacccatgtgctgcacaggcttatatatttgtactttaaaaggtttaatcatgccgtaaatatgttaggtgttttttttataacactcagttaaattataaaaaaatctagtacaacttgctaattactatatcacaaaagaaaaaagtacgaactacccccgaactagcgcggtcgtccgaattaccccctgaaccacaagaccggacattcttcaccccaactatgtaaaccggacgaattaccctcctcggctcaatccacggtggtttttatctacgtgtgtacgcgtggcagtccagtcagcattctatttataaaaaaaaaaagtgggacccacatgtcatactcttcctctctcttctctctctcaatctgtctcactcttcctttatctctctctctctctcacaggtgggttggcagcagcgggggacacggagcagcgggggacccacatgtcatactcttcctctctctcttcctttaccccccctctctctggacacagccacacatgaggcagctggtgggtgcggaggcgaccacgggcgggtggcggtcgaggagtcgaggccggcgacaggcgggggtggagaaggcagcgggtggcgggtgggcgtgaggctggcgacaggcgggggcggaggtggcagcgagcggcgggcaagcgcggcgaggagccaaggccggaggtggcggcatacggcggaagcaaggctcgacgttgatgccggggaggctgctccgccttgccgcctgcacgaacgaggtccacatccgtcgcgctcttcctcccgcccttgggcccggttcgctgtgctggcggcggcgcatcgccggtggacgaggataacgtgcgacagacggggaacgaggcgcggcgcgacggctctattaacaaccaaatttggtaatctgagtatcggagatgaagataagatcaaagcggaattcaagatggaaatcgttccggaaatatagcaaggatcggctaaagtccgaatcggctgagaccaggatcggcagagtccgagttggacaaggttagccgatcaagccgataccgacaatatgacgtggtacgcgttgtcgggttgagttaatgtgcttcatgaggattgccatgcatggatagagtcctgagaaggcaattgtatctattaattaggatattttatgtaattttcttagagatatatttgggcaaaagtctgccacaaagacttatggtatcttagagtttgttagagataagagtcgtgtccgatatggacatattttgtaatctcggttataaatagaccccgaaccccatgtaatacaacaacacacgttcaatacaatctcggtgcatcgccatccttttacttttgttttgtttcgacgagttcttgctttcgggtagagctgcattggtttcgatcttcaactagaggtaaaacttgttatggcggcttgcgttctcgggattagtgcttccatctttatgatactctaatcttgcttatgtaattcgtcgagttatcatatattctatataatctttggcaatattgttatctaacctccagtcggctaacatctgtcgctataaggcagccgattaggttaaataccaatgttgacttaaattatatagaatatccaccactctatgaaacatccaacggcttgattgtctagatattgtccttcttttcatacttatagctgcatcagttgagtttgaccttataagtcgtgattagaatctcaatatctagcctgcttttggttgccgattagggtagcatcggggtttcagccgattttatctgatttaactacttttattttatatgcttgattgacatgttaagtatgccttttatattaagatcttgttgcattcaagtatagtaggcttttgtttagtatattctacttgctttaatatcttaatatagagtaatatcggagtattagccggtacatgctagatctatctgatcggctatgctatgaacatatatagtcttgttgttaatatatatttcgataagtgatttatactgtctcgacatggcgaccgatctatcccaatcacttgattcaagtatatatcgacataaagattatatatcgttaatatctacagctgatcgggtagatttagttctttcttgttcattcatgattgccgatcgattcacatatgacatcggctcagagataaatgatacgtcatcggcaactagccgatcagctatcgtttatggatttaaccgcgttctctttgtttttatttcttgttgattgcaggatcaaatcaactggcatgctcacacacttaaaggcaagcttttggacctgcactggagttaagcagatctctcaggcctcgtgttttcacatcaacaggctcggaggaggagccgcggcccctgcgctcctacgacgagaaggaggagcccgccgcccacagcgcttgcccgctcgcccggtcgtcctccgcctccgtcgccggccgctgtcgtcctcacctcaccgccgccacgctcctccaccacctccgactccgtctccgcgccaacgtccacgctgtccgcgccgtcctcgccgaccacccgtccccgcgccgtcctcgccgaccgcccgcgcccaccgcccgtggccccgtcctcgccgtgcgcgctgtgcgaaagagagaatagagagaggggaagaaagtatgacaggtgggtcccacgttttttattaaataaaatgctgactggactgccacgcgtacgctacgtagaccaaaaccaccgtggattgggtcgaggagggtaattcgtccggtttgcatagttgggggtaaagaatgttcggttttgttgttcaggggggtaattcggacgaccgcgatagtttgtggaggtaattcttactttttcctttcagaaataaattaataaaacactaaatctagagtgatatggattaatatttattatactttacaattattaaatataggaaaactgaagagttcataatatttacaattgcatattgtatctaacgtgagttatcaatatgatctacaattacgataatacgaactatctaatcaacaactagatttttctaattagcgtgggagctccactcgagtgcaaaaataataaaggtataaataaattttgtaataaacatgagaaattttgaacgatacgtatcatttagatgatacacatggaagaaatgtagcattttagtaacccgtggacggtccctttttaaagcaagaaatcgttaaaaacaccgggtaagcgcctataggagaacgatgaagtcattaggaccgaacatggatggggcaagttcctcgattttgtgataacttctacttctttataaaatgtgtaattttacgatactttgcctcaatacttcatttgataaattagtcgctaactatatagttttgtgataaaaacatcttaaatatatagttcttccgatagctaaacaagttttgatgctaccaatgtattggtggagatttctattgtttggcaagttttaaaatcaacccaatcaaacaagtactatttcgtgtaggataagatttgacaccaaaccaaaatagtcctaacacccgggtgcaactagagtaaatgctcccaccatttgtcttataatttacaatccactgatagaatttaaaaattaaatatttttaaatttaaagttgattataacttctcccgtcgtaatttacatctcgcattaattttttaatatctaaatacacatatactcccaccatattataatattataagttgttttgaatttttttcattcaaacttatttagatttgaccaagtttatataaagatttaataacatcttcgacctcaaattagtttcattaaatatatccttaaataaataatatgtttattttctattaaaaatattactatatttttataaatatagttaaacttaaaattattgattataaagaaaatcaaatgatttaaaaataaaatagatggagtacatattaataataggccaacggataacaaccctgaccaggcagccggcctgtcaccgggtgggtcccagggagaatgtgaactaatactaggtgggaccgaccaggccggtggcacagtggggtagtgttgaccgctctacacccttcgttccataaaaaactaatttctagaaataaatctagataaaatatttgtccagattcattctcagatattatcttttttttcttttcttggccggagagagtactcggcaaagcttccgggagtgtgggttcccaggagggaagtatgggcccacgaatgttgttttggctacaatgaacttgttggcagttggctgaggccttgttggttgccttggggaagcaatttcgttcgaaacattcggatttgttcggatgtttgtctgttggattttctgcaactattgtttcccaagctaattaggaccactacttatcccatactgtggattactacatttgtcccaaaatagttataattctaaattatttactatataataagattttaaaagaaaaaaaaaatgatgtccctcattaaattgtgtatagataaaagtgagagagtaattatttagcatatattaagattttagaagaaagaccaaatggtgtatagataagaattgctgagtgagagaaagaaattagaatgataagtgattgttgagataattagtacactattgtgataattattttgagacaaaattaaataaaaaatacaattattatgtgcctgagatagtactatttaactcatgtttagtagtagtatcttgctaccttgctttattctcttttctcatctaataggttgacatatcaagttttaatctatgtgatatattatttaatgctacgaaaatcattgtatgagaaatactgggaccacttgaccagagagcacgttttaattataggacgtgattggtttgacagtcctctaaaataaacttcgactaactctttttaattaaacttcttttaacttcaattaagtttataaaaggactgtttaacacatttttcgcgaacgtaaaaagattgcacgtcaatatattagaagaaaaagaatttttgttacacaacgtaataagcaagaccggtttatgccagggaagggagaaaaaaacaaaacaaaagttgcagcaaggaaaaggagaaaattttactacgacggctaaatgcaactccgatcagcaggaagggggcagagccacactacactcacatgaaatcccaaagactttttaccacaataaaaaatgttcaagactagatttaacgaaactaatttggtattcaaggcataggtacatttttctataaatattgtcaagcttaaacaagttataaaaaaatttataatatgaaacgaacagggtagcttcccatgcatacgtgctcaggctaaactatgatactctagaatttatttttgaaaactatttatttatgcttacataagagtaaattttagaaaaactacaactttagtgataaaactatcagtatactacaacattagcgacatgttt

SEQ ID NO: 6883 - DNA, 1454 bp, Oryza sativa
tcaaaatgatcaagccaagatgaggaagaagatagaacaagagaagggggggggggaaataaggtgatggcatcagaactcaaagtatgaagacctcccgagcaaaaatagatctaattaaatttcttccagtatatatggaagtagaaaacacgaattaaatttgattcatgctgagaaacatggcatgagatccgaaggaagtggaaagctaggagaagggtgatgaagaacaatgaaattgatcagttcatagcatggggaggtgagggtaagaccaaaatggagcggtgctacgctgctacgccgattcttccagggtcatcacaaagtatgaaaatcaatgtgccggaaagatcttaataccagaaggggctcccctgatggatcaaaaaggaaagaacataccttcctttctagtttgcagccttcatgctaactctccactcagttctcacacacaacacaccctctctagtactggttttgagaaatttatcgttcgagctgtctctgacacacgcacaacccggaagatgggcaataataatccaaggaagacccggagaaactggaagaaagaggtcagcaggagtagggtttgtatagatccgctgaaaagatatcctcccatgctagttagggatccggcctcccggtttataagaacaccgcgccatgtccctatagtagtatgcacagacacacacagacagacggaataaaataattaacatggccaggtaagtatagtagctcggctacttggcacctgctaaaaataaatgaaaaagaaaacgagaaaccccagaggagcaggacgccgttgcagcagataaaagaaacaaaaaagaacaaaaaaaaagaagcaattgatcagagaaaacagcagatctgcaggttcaaattgatgctggtttgttggttgtgtgtgttgttgtgtctgtattaattatacccggcgctgccgaactcgtagagcttgccgcggctggagaagatgatgagcgcgacctcggcgtcgcagagaacggacagctcgtaggccttcttgaggaggccgttgcggcgcttggagaaggtgacctgcctgttgatcttgttctcgatgcgcttcagctcaactcttcccctccccatctcgcccgatcgatcgaacgattcctcagctcagcaccgatcagcaagcacaggctagctagctcctcctccaccaccaccaccactgcctctcttcttgcttgctaaagcctccaatgatgacgagaatataacgagccgcgcgagaagaggagaatattagtggagtcgagtccggagaaaggacattgggcactgtaccacagtagtacactagtactagtagtagctctttgtgaaactggtttcttgcttgctttgacacacatctctctttctatctctctctctctccctccatcacaattcacaca

SEQ ID NO: 6884 - DNA, 684 bp, Oryza sativa
ccattggaccaagtaatcctccaagggccattgcaagatcaggaagcgtatgttggcccatggatgggcatctttgcaaatgttccagctgagaaacaaaggaggatggagctagtctgatgcagcagctagctaatttcaatccctcgcagtttactgctgtgctctgctccgagggtaggtatactggttatgcagttgtcggtttcagcaaagattggattgggttcacgaacgctttggcattccacaactacttcaaatcacaacgtctgggtaaaaaggattgggcagcacttggacaagagaagtacatctgtggatggatggcaaaagaagaggactacaaatctagtgacccagttggtaggtttttgtcagcaaatggtgatctgaagaccgtgtctggtctggaaaatgacctgtctcgcaagactgagactctcatagctaacttgtcacaccagattacagctaagagcaagtatttggtggaactggaatgcagatgcaatcaaatgaatctctctgttaaaagggcaatggaagaaactgacttgctgcacaaaagttacaatgaaggtacatactacaaactgttcatatgaataattctcatgccatgggcatatgattgctatgttgttgtctacttttattgccaatttgccagaataataatat

SEQ ID NO: 6885 - DNA, 647 bp, Oryza sativa
tagtgagtgctccactggctccacagcatgttttaatggttccggttctagtatggacacgttaacaacagatggaaagtccgcctcataatcatctcgatctgtcaagaaatccaattccaattccaaaaagttacggcgggactcatgattgcttgttggaactaccattcttggacattgaacctgagcatctgcgagggctgtccttactagattaaagtttggtctgaagtttgtcatggaccagttctcgctgagtctgccaggtttctggagtgtgttagagtaactcataacacagtgggactcacaggcagacttcgatctccaaacagatgaaagaacagccatgaaatgtttctggagaagcaattcattgttaggaagctcgctgattacattgagcaacatctgagtttgatcctggaaaataagtcatagaaaatcaagttgtgcacacaataagttgaatataaatagtagatttgtttaaagcacacatatacaaaaaaaaacaggcacagtatagatatattcacatgcctggcctcttaactggattaaagcacaagattgcagattgcaactggcaattggcagaggtatgacttgcttattagtcagatagaggaccaaccccagca

SEQ ID NO: 6886 - DNA, 2700 bp, Oryza sativa
atgattgattgagttttaattattacgaacttgaaaaatatattaatatgatattttagagcaactttcatatagaaaattttcgcacaaaacacatcgtttagtagtttaaaaaacgtgccacgaaaatcttaatttttcatccaactcttattaaagaaaagaacgggaccagtcaattcagtcagcttatcttgggccgtttgtttgtttacttcgaacacagtcaataattaaataacaaagtactaagaacgaggagggattaagatcatctagcttctctctaacgtggattactcattactgatatatggccgggttccttatgtagcgggtccacacgtcaacaattgaaaatcagagagaagtaattgagtcgcacttaatttaaaaaagttatactcgaaatttacaccgaaagttcagaaatatgagtgtagctgactcgaaatagatatatgccctgttccttccacatttagaactgtggaaggataaagaggcaaatttggaatattccacacattagttttgcaacgactagctaggagcttctgtataggacaaatgatcccagtcctacaaaatcataaagacattccagttgatacacaatcatgcatcatgatcaagtggatcaataaattatatatgcaaaatggaccagttcagctctcggttcagtgacgtactagtataaccataaaggttcaatttgcaaacattgaaaaacccaataccggaccagaaaaacagagacataccaaatgaaccgtttatcattataccactgtacacaggtgtattatctctatgacatgatttacttacatgcagtatctaatcatcgcagtaattacatgaacctcccaatgatcatgccaggtgccaggccgggccaaccaaccagctgcttgcctgcttctaattaattgttcctaccgtctaatcatcgatatattccaccgcattccgacacgtaccactctcctccagctggataatcctcggcagaaaaagaaaaaggaaacgaaagggaaagagagctttgtctccgttgattaacagcagcagtaagctagcttaggctgtgaaatggcgcgactgccctcccacccaaccgatcccgtgtcgcgtcgcggtcgcgcgggccaaatattgattcaccaaacgacgcccgtgaggcgggtggcgaggcggcccagtcgcccgcgcgggccggcggcggggcgcgcgcgcggcagcagggtggagcggcacagcgggcacgtcaaccggccgaggtcgatccaccggtcgatgcagccgcggtggaacgcgtgcgcgcagttgcccagccgccgcaccacgtcatccgcctccagcctctccaggcacacgatgcaccccgccaccgcctcgtcgtcgtcgcagccatgacagccgtgctccgaggccgcgagcagctgggcgaactcgaggggcgggaggcggtccttcacctcgtcgggcagcggggcgtcgacggcagccgggcggcccgatcgctccgggtggtggcagatcccgacgacgaagagcatcagctggagggcctccctgatggcggcgaggagcttggccaaggcgatgagcggcttggggatcgccatgcagtagcacaccagagggaaccccatgatcgccgctgtatcgagcttgctacgcacagttggcaatactactatacaccgagtcgccgaacgccgatggatgcacggaagcagagactgcggcgaaagagagtcgtggaaagcaaagggggaggatggtgacgagtgacgactagtcgttacgagcgcgcgcgcttatatagagcgccagcggtgatgggcgccggtcggcggtcgcggcctcgcgggcggtgtggtgaggtgatcgataccgagacgttttcacgtggtttttggtggataacgcgcgtgcggcgtgcggaaggaaccagaggcgcgcttgccgtacgttttaaccgcgtggcgtggcaagctgacgcgtaacgggacaacgtcgcgggttgttttgagttcgtttgagtttgaccggggtggtgcccccgccgccctggtacgtgcgcacggactacgggcgtgggggcacatgggaaacgcacgccgaaacttgatttgggcgagggcgagtgggcgtggggtccccggcgcggcaaagacggatgacgggctcgctggtcagacggaaaattcgtaggtgcttctactccatactgttgcttgtgttgtttactcctactaataatacacttgtacaacttgctatgcggttttcgacttttctcgcctcaccagagtacagcacggaagtggagtcatgttttgctttttttttccccgatgctcactgcgtgacggagtccaccaggcactagtggttcagagcgagactcaagggtactatacggagtaattcgcaaccgtatgtccatgttcaattcatacagttgacaggcgctatccgagatgaagacgatcgaagaacaagtcagcgcttgacggttgtaaaccacattggctagtcctagtgtggacgagagaggacacgtccgttagttgcattgatggagccactagcacatggatagagatggacggttgggattgggacacagatagcagtgacgaacttggtaacgttatggggaataggttttgcagggctgcagga

SEQ ID NO: 6887 - DNA, 3234 bp, Oryza sativa
aaggcacttgcttggggaggatcttggaccactcagcgtcaaagaattgcagcagctggagaaacagcttgaatgtgcactatcacaggcgagacagagaaaggtttatggcattctgcagtcctttgtttggaaccaaaatacttctgtttctagcctaccctgttcgcttgttatttgtccactgatttggatataggtgcaatacgtgagaagcaataaaatatacagtatgtctttagtttgtaggtaaagttatatatatttataaatagacaggaggtgtacgctagctatggaatatccccttgctaaagtttatataaagagcacctaactaatttgtttttgttcatggaagtgaacataataactgggaatgcttatcctacattatctaaagagaattgcataaaattgtttcaatctctagctaatgcatggtggtggtttggtagaaagccaagacatatttcacttagaatattgataccttattttatggtaaaggtcaactgatgatatttttaaagaagtgtgaaagctactatgcagcataagtaatccctttgtttcataaatttgccctaagtcattatctttaaccatcaatttctggaaatttgtgtagtttaacaaaatgtgaactgtacattctgtaaggatttttcatgttgtgtatctaacaacataacccttgtggtgttaaactatagtatcatttttttagaaactaatggtcaaaaatatatataagtgtttgaattaggacaaacgtagaatgacaagtaatttgaagcaactgggcgtagcatgtatcttgataaattcaccctattctaggcacgaaggtgatgcatacagtggcactaaatttcatataaaagactatctaagtatagaatagaaatatagaatggctagcacgcatgccctttttctttatatggatacatgtgtagtgacagggccgagcaactgcaacattaatctaaactgtcaatttcagatatactactacttatggctgcttgtttaggctaattaataattatatgtttactcttttcaaaataaaacacttcaaagctgcatgacaatcccgtcaacaaggatagtaatgacaatgagtagctgatgaaataatatggcttcaattctggagtttcaggaaaatttagctgctaaaaaaagaataagtgaataacccaaagaaaatagaactttgaaggatagaggtagagagattaaatatacactagtattcattttgtggtgcgtcgtacatgcttcaaaatctcccaaggaccataaaagatcccaagaaatagctaggtagaacacatgaaagttcagaaactggatataatctacacttcattatattactgtcaactcaatatgactgtgcttgaatggtttttgtgcagacgcaactgatgatggaacaagtggaggaacttcgcagaaaggtacattatcaatccaaagtttctcaagcatacatacagtatcagcattgccatgggcgggtgacttcaggagtgctagctactagtgataatctaaattaaaccacgaaatgacttggctagctttgacaatgcatctatattgccagcaaggctgctagggtataccgcatgcaagttaattagggtagatcgtgtagcctttgactgtataactaaagaaatggtagcttcgttcttgcgagagatttctttcatgagagttgttacatattatactatctccaatatatttttcttgtgccacaggagcgtcagctgggtgaaattaataggcaactcaagcacaaggttcttattcactcggaaatctgttatgccaatgcggtgcacatataattatttattgataattttcattcatatattctcatatccaatgctgcagctcgaggttgaaggttccaccagcaactacagagccatgcagcaagcctcctgtgctcagggcgccgtggtggagaatggcgccgcatacgtgcagccgccgccacactccgcggccatggactctgaacccaccttgcaaattgggtaagattaatcaagaaaagccaagaccagaaatgcatatacttataacttctagctcaaatgcatacagctcgatcacagcatccgaactagtagaactaatgaaagattctcatcaaactgactgtgtatatcttgcttccattatattatctgaaaaacgattatgttactaggtatcctcatcaatttgtgcctgctgaagcaaacactattcagaggagcactgcccctgcaggtgcagagaacaacttcatgctgggatgggttctttgagctaagcagccatcgatcagctgtcagaagttggagctaataataaaagggatgtggagtgggctacatgtatctcggatctctctgcgagccacctaatggtcttgcgtggccctttaatctgtatgtttttgtgtgtaagctactgctagctgtttgcaccttctgcgtccgtggttgtgtttccgtgctacctttttatgttttgatttggatcttgtttgaaaataatcttaccagctttgggtaaactgtttattacgtactctatatagcatatgtgaccgacgacaacggtttcattttagatgatgtgtatggatgatttctttccaaaatcacatctttagtataagagcaattttaccatccaataccaaattttatactagaaaatattttgggatatcaaaatttatggtacctccagtaccaaatgttgaatggtaaactttcataatatacaagtcactctaggatatttaagacaatttttagttttttcttattgttgcccttgttaaatacatgagaaattttacatcacttaaaatgtatcaagaggtatcaaatttttttaatacaaaatttagtactttctccgtttatatatgaatgtggacaatgcttgaaagtcttataacctgaaactgaggtagtgtatcgagaagtacaaaattttacactaaaatcccagtacttactcaataactgtaaaattactctaaatatgtactccctctatttcagattataagttgttttaactttagtcaaagttaaactgtttcaagtttaaccaagtttgtagataaaagtagtaacatattcaacacaagacaaatatattataaaaacatattgaattatagatttaattaaattaatttgg

SEQ ID NO: 6888 - DNA, 2939 bp, Oryza sativa
ttcctaggaaattaaatcctctaaaattcatatggtaatccttaattcatttcaaataggaccttagagtgggcatatccttaaaatgtgcactcacgcagaagaaatagtcggtcgtggttatgcaggtgtaggagtgaaaatggggtgggtatttcccgcccgcccgcttgaccacattatttcgggacaaattccggtcgaaaattcgggtacctgggacttttcatggatatcgggtccaaatacgagtcttttttggcggatacgagatcaggttcgggaacgtagtatccgacggatacggattatccggtaaataatccgggtattacccggataattatacggatattacccgtattatatttttgtgaggcactttttggtactatatattggttctattataaaaacaaccttcataaaacactgccaaaacaaccttcataggcactttttgtgtgtttagttcacgttaaaattggaagtttgattgaaattgaaatggtgtgacggaaaagttggaagtttatatgtgtatgaaaattttgatgtgatggaaaagttgaaagtttgaagaaaaaaattggaactaaacaaggccataaaatatgggttaggatatagaaaagatgagatctcactaatatgtgttaggatatggaaaaggtgcgtaagcagaaagccggtaacgttctagtagttgggtgaaccggctttacccaccagtttcttagctaactccaaatatcttcacataaaaacaaccttcataaacactgccttcttagataaaagaacaaaatttaaacgaaagaatgctgttgtgcactgactcaatgcaatgaccttttagtatagtcgtcctctatcacgtactacctgctcgtcatctagtatacgagggccatcgctgtcgtggatgtcacatggatttctcgtgtggcccgaggaatggatcgtggccgcgcgagcaagtagttgtagtatccccaactatgaaagtgggagtagcatttaatatgatcaagaaaggcaaccaacaatcgccttggcaccctgaaatatgccaaattgcaaaggtttttttaagctatgtaatcatgcggagcaaagcaacgtggacagattcctaaagtaaagttgtccctgcgaactgagaacacatgaaaagaccctcaaggcggttctgaactggagtaaacaccctagcgatgtgtttaccgctaataaaaagttgtggtggttacttggttatctccgcaagataccccggtatcaaaaaacgtaagcatgtacgaatctgtggcggcaggtgaagtacagttgtagagaagtttctctctcttcaaccgcgagtccccgcaccaacggattcagactccacatgactcgtcagaaaaatcagggattcaaccatgccatggaatcaggagctgtttccacaaaaacacccagctaaacacgctaggccggctgtttcgtcccgatcgtgcgcagccggcggcgccgcacgcgatcgtgtggtcgtcgcttcgcttggaaacgcaccgcgttggcgcgccctgcctctcccgttttttcccatcccttcacacaacaatcacaccaccacgcaagttctcacctcgtcattacggattttacacttgcacacgcatccaaacctttcgccatggagtacacgatcgccctcccggctctcctctcatttactccgtactatttgcgcactaccggagcggaggagtgggccccacatccacggcagcgaaggctcaggtcccacgcaccgattcaccggacgtggggccaaactgtcagcgtcactgctgccgtatgggtgtggatccacgagtcagtcctttcttttttattattcggggagtatattaacgtcagggtgggccgtaaaaaggtaggcgttttattagggggaagccattgaatggcgcaagcggtttatagccgctgtaggtaggattcctccacggtaaggttcgttccatccaaaggcctttttatttctcctttctctgtgtctcgctcgtttccattgagcctttgctctcgcgtctctcgtgtctcgtggtgtttttggtcttggccttcctctcgccatggacccggcgggtgcgccgtggtgcgaccctcgccgagggtacggcggctacggtgttggatcggcggcgttgcaggcggcggcgcggcaacaatcgcagcagccgcgatctgatggtgcgggaggcgcgggcgtcaccggaggcgtgctcaagaggagcctgggggagatggagaggtggcagcagcagcggcaggtggcggcgcagcaggccatgtacctgcgctcggtgaggcagcgcatggatatcggcgctgtgctcggtggggccgcctcctcgccggcctatggcatttccggcttgtcgtctggttttggcggtatctcgcagcagcagccgtcgtcgacgatgtcgtcgttgaccaccgcgtcgcgcacggtgatgccagggatgcagcagcggcggcggatgatggccgttccgaccgcgcagaatcaagcggtggcgagggcgcccgctgctaggccggcaacggcgaccgaactggtcttgttgcaagagctggagaagcagctgctgggcgacgacgaggaggcggacgcggcagggagcggttgcggctctggtatcacaagctccgattggggcgacacgatccagaggcttaactccgtcaccgccgcgtcgtcgccgtcgcttcccctgccgaccgccgtgaacagcaccgcgctattggcgcggtccccgacgaactcctcttcgtccacggcttcgtcgtcagcgtccagctcgccgccgatctccgcggcctcgtcgcggcagcttctttccgaggcagccgctgccgtcgccgatggcaaccagggctgcagg

SEQ ID NO: 6889 - DNA, 1202 bp, Oryza sativa
attatcgatgatgtggcttaacctggatgcttctttatagtgttaatgcttgtagggggtaccaactatataggaagaagggattgtctttgttgtcctcctttgacatgtcaataaaaacttcatttattacataaaatatggttaatgcatgccggtgttgaaattctactagtttaattcttctaaactttgccattctttagaatgcttttacgaaaagaacatccgatttagtagctgtgtcaagtaaaatattttaagtcactgcaaattagctttgggatacatcatcaaattaacacagttatgctaatctgtgtactttttattgaatgtaatctcacaatacgatgaaaatacctagctaggtttatactgtagctaatttcaatgtcaggacattgataattgcatattcatacaaaaatatatatagtaaaaaaacaagacccattttgaaaccaaaaccaacagcagaaattcatgaccagttcatgcagatatatatacctgggtttcagaaagtgcattgttggaatcttgagcattgtagcaacaatgttggtacctttctaaagtctttgttatgctgcacaaaaatgttatatgtaaatttctcatatatcaaattactacgacgtaaaaagtgcatagatgttatttatagaggcagaagcttatattataatgatatcaaaggtcactctatatttactatttcttttcgtccaacaaaatgatcatgttttttttggcaaaacatagtatgtaagaacgtaaaaaaaaaacatagaaatgttacttgtagagccagaagcttatattataactcttgatttatgacatagataatttttttcatccaacaaactgatcacatgtgttttgataaaacatgcagtcagctttcatcgttgaagtggctttgtgtgagatatcacgaagtgactttgtgttgcatttatagattgataaaattattggttacaataactaggttttactacctccgccctaaattagtggttgctttaactttttcttgtaacatttgaccattcatcttatttgaaaaattagtgcacttataaaaaaagataagtcatatttgacatacttttgataataaagtaaatcacaaacaaaataaataataatacgataatttttttaaataagataaataaccaaacgttaaa

SEQ ID NO: 6890 - DNA, 501 bp, Oryza sativa
gccccgcaagccagcgcgcgtgcccgagccacgccgctcaaaccgccgcgccgcccgttgcttcccgcgcgcgcgtgccgtggtggccgaccgcctggtcgccgccgccgtcagcctctgccgcgcctgcccgcgcctgtcgcccgtgtcgccgctccgctccacaccgtcccgccgtcatcgccgtcgtcatcgcctcggccccgccactccgcgcgcaagctgccaaaggacggaggcagagctcctcctccctctgccgcgtcgcccccgctccctcctccttttctcgaagaggcaagggacaagccctctttcctctccctcttttcccctttttcctcccgccggcgtcatcctcctccctcctccctatcgccgttttggccgcgaccgccgagcgctagccctctcctttgaccgccctaagttggttcccaaaccgacattgccatcctataaacccaagcctccccctttcctttcctctcccattcgcct

SEQ ID NO: 6891 - DNA, 600 bp, Oryza sativa
cccaatggaaaggtaaaacatcacttgcagtaatctattgttggtcaatacagaaatattactttgaacttagcatggtattgccttatatatgttcaacaagtgtttatttgcatagctatgacgcagtggaactgaattctgtgcttgatcgcaggtacttgcagtgaagaagatagacagtgcgtcactttccttgtatgaagaagataactttcttgaggttgtgtcgagcatttcacgacttaggcacccaaacattgtgccgcttgcaggctattgtgttgaacatggacaaaggcttcttgtgtatgagcacattggaaatgggacactgcatgatatattgcattttttcgatgatacaagcaagatccttacatggaaccaccgcatgaggatagcactaggcaccgcgcgagctttagagtatgttattatttgagcactctagtgtttttcactctatgaaaaggttatgttaatcaagtataatgctacaatgcaatgccaacctttcttcagatacctgcatgaggtgtgcttgccccctgttgtacatagaaacttaaagtcagcgaatatcctgcttgatataga

SEQ ID NO: 6892 - DNA, 580 bp, Oryza sativa
tgcacattgacaatatgtatgaaaactattctgcatgtcgaaatacatgcagcgttctgacattactagcatctatgctgagctgggattattagaaatgctagctagctagcaatgcataatatgtccaaatacagatgaaacttggaggtggcatttggaacaggcacctcgttcttcttgtacataagaccctctcttctccaaccaacagcaccagtaacttgtagagtggcattcggaacaggcttatctgaaggctatcagtgcagagaacaaaaaaaaaatgattcagatgctttcacacaaaataaatgagcaacaaactatttgatgtgactttttatccggttatcttatttcaatgtcacatttttctcaccttggaggaaaatggcgaccgaactccttcttgagttatatacaattttaagatttcaggtgagaggttttgagggtaaccgaagtccataatttctgcacagttagatgagagagacagttctacaggtaaatagaagcatccacagtgcaaattgatgaaacaaagtccaaaaataagatgtcccttaccatcaag

SEQ ID NO: 6893 - DNA, 4374 bp, Oryza sativa
  unsure (1)..(4374): unsure at all n locations
tttgcgacgcccacttcttctccaagctggatctccatttcgggtaccatcaggttcgcatgcacccggacgatgtcaacaagacggcattccgcacacaccaaggccatttcaagttcttgttcatgccattcggcttgacgaacgcgccggcgacattccaggcgctgatgaacatggtactcgccccattcttacgccggttcgtcctggtgttcttcaacgacatactgatctacagcgggacatgggccaacaccttcagcacattcgggcagtgctcagcgtcgttcgcgccaatcatctcatcctgaagcgctccaagtgccacttcggcgaacagcagatcaactacctcggccatgtggtgttcgcaaacagggtggccatggatgtgcagaaggtgtgcgcaatggcatactggtcgcaaccctctccgtgggagccgtccgcagcttcctcagcctggctggatactaccgtaagttcattcgcaactacggtgcgatcgcagcaccattgacggctatccttaagcgcgaagcattccacttagggatgaaaacagtcggaaacgatcggaaaatagcctcaaccatttctgtaaccatatttttctcggaaacgatatcggaaatatcgaaaaaccggaaacggaacaatacggacggaaacatatcggtacagatcggaagtcggtaacaaatacggaaatattaaactataaaaatatatatttaactttacataagtatgttatatgtatacataagtatagacatgccctataaatatcgatatatttagaatacggtaattaccacattataagaaacggtaatttccacgagaatacgataaatacggaaacgatcggtataacagcaaaaccatttccgttttcatttccatattttttgccatttccatttttgtttcggtcgattaccatttccatatggctcggccggtagaaagtcgaaaatgaacgtcggtcggccggtaattaccgttaccgttttcacccctaattccattggacgccagacgcagcacaagccttcaccgagctcaagcatgccctgtggatgggtcccgtgctgcaactacccgacttcatcatgtcgtttgtcgtcaaagacgatgcgtcggggtccaacattagagtcgttctacaccaagggacgggcccactagccttcttcagccgggcagtagcaccacgccatgccgggctcgccgcctacgagcaggagttgatcagccttgtccaagccatccgccattggcgcgcatacctctgggaacgggcgttcctcgtccgccccgaccactacagcctgaagtttctcttggatcaacgcctttccacaatctcgcaacatcggtggtggtaagcaagctcattggttttgactttactatagaatatcgaccgggtcgcacgaacgtcgtggcggacgccctgacccaccgcacgaaggacgccgagctcatcgccttggcaatctccgagctgacgttcatggcatttgacaacctccggagcgagtagggatggcaatttgggaggggagggaacgggggacatatttcacccgcgggtgacctctcctctcccgtacgcgcacccacatcacataggcggaggcagcggagcacagggcagcaggggcggcgcactgcgcaccggcaccatgcacccctcgccgtccgctccctctcccctcccctcctctctcttccagcctcccaagtcccacgaatcggcaccacgcactcctttggtctcgtcgtcccggtcgccctctccctctcccctgcggcctctcgactacctaatgcggggccctagtcgggttgcggggccctagaggggtcggggacggggcctgatttggcccacatctccagtcggggccaggggcgggggatgtagtcaggggtcgggggcgaggccgtttcagcccaactcggccccgccccgttgcgatccctaggcgtgaggtgaccacgaacgaggacctagccaagatcgccgctgacatttccagtggcacgctgggttggttgggctagccatgggctttccgtggcggccttatccttcgcaatgaccgtgtccgtgccgacgtcttccccgacactgcccgcgctgtcgccgccggccccaccaccggccacgaaggcgtcgagcgcacacttcacaggctgtgcacggacttcttcacgccccatgccaagcaagtcgtccaagaattcatgagcacatgttcaacctaccaacgcaacaagaccgaacaccttcatccggcgggcctgcttcagtcactgtcggtgcccacgcaagtctgggaggacatcgccatggacttcatcaaaggacttccccgcgtgcacggcaagacaaccatcttcactgtggttgaccgcctctccaagtacgcccacttcattctgctcggccacccctacacggtgacgatagtggcgcgtgtgttcttcaacaaggtggtccgcctccacgccatagttattaaaaccggaccggagaatgaaccggtcaagctctcggttcactggtctagcggttcaaccactggttaggccgatccaaccacgattcgatgtattataggatgcaaatgtcttagaccaacaaaagtgaacagatggtgtggtggctagcgcgtgcagcgctcaaccacatgacccaaggtcaaatctccccacaccaacgtccttttccaccgatttttggctgagtttgctcagcgggcctcacgtcagcccatcaccaaaagacagcccggtctgaccactccggtttaaagcccggtttacataaaaattgaccggttcaaacggttttctccggttcaattacacatccgatcttttaaggggaccagaccggctgaggccctagttccggtttttcccggtcggaccgtcggtccagtccggtcttcataactatgctccatgcatctcaagatccattgtcagcgattgctgatcgggaccatgttcaccagcacgatgtgaatgtaactattacacatggccgacatcaagctcaacgtgagttcagcttttcatccgcagtgcgacggccagtccaaggcagccatccgagtcattagcatgtacctcaggtgcctgaccnnnnnnnnnnnnnnnnnnnnnnnnnnatggcttccgtgggcagaatattgcttcaacacggtgttccagagctcgctgcgcacgacgccattccaggtctgtgtgtatgatcacggcacagcacgtgtgcgcgctgtcaatcaagccctcgtcgagcgggacgaattccttgaggaaatccgggaacacctcctccaagcacaggattattggaagctctactacgaagagaagcattgtgatgtcaccttctaggtctgtgactgggtctaggtgcgtctactccatcaccaagcagcatcccttcccggcttctgtccatagtggaaaaaaccagaccgggccggtggttcaaccaggaaaaaccgttaccagaggtctttctggttcggttaaaaaaaagtcaggacatgcatgtgacccgctttgaaccggctgaatcggacggtttttctatgaaccggccattaaaccatcaccgggcagactctcaaggcccatttagcctgcaaagagcgttttggttggcaaaaatcaaaggcccatttagcctgcaaagagcgttttggttggcaaaaatcagaggaaatatgcacctgtgggggttcgacctctggtctttaggatagaagcaagcggcgtagaccaccgagccatccaagcagttgtgatttagcaattacatacgttacacatatatgtattaaatcgcggtttgaccgtccggttcacggttggaccggcgaacccaaaggtcgaccgggtcacccaccggtccggtttttcctactatgcttttgtcgcaacaagttggcaccatgctactacggtccctaccaagtcgtcactcgcgtgggcgatgtggcatgtcgcctcaagttgccggccggtgccaagatacatgatgtattccacgttgaactcctcaaggtgttcaaggacacaccgctagaccagctgcctgcgttgtcggcgctctcgaacgaaagagtgctcccgcttccagctacggctgttcatggtcaattgacgcgccggagtatgccatgtgctcatccaatgggccggcaaaccggctgtcgatgcaacgtgggaagacgaagatgagttttgtcgcacctatcctacgttccagcttgaggacgagctgtttgcgaaggaggggagacatgtcatggtcggcatcacgtattcgaggaagcgaca

SEQ ID NO: 6894 - DNA, 651 bp, Oryza sativa
ctcaagcgattcagctactttctccagggccaaacacctgatatcaccaagctcttgtctgcatgtagggcaacggttgtgcaccctagctttgcaggtggaacacagagtgtgtccattttggcactgcaatgaaattcaaagagatgagaatcatatccaaagatcagaagttcagaactacataatgagactcttcaggtttacaccactagatcaatctgacacaacgaattgggaaagggagtgtatggttagaattgcttattgaaattcagcccatgtattctctaaggatcttcgaatgatccatttttaggttaattaagttctatacttctacccaacatatatacttcacaagtaccgtcgtcttccttcccttttataacttgtgctaaaagggaaaactcaccatggctaaatgttaaaggtactactattttttataaattctgctaaagataaaccgaatgacctgaaggcatgattattttggcagctcattccagattataatagatattagccatctaattctaacagttgatcattcgcaagattcaacattcctgcttcttcttaggcatcgactatatgtcaaaaaggagctctataattactagaaaaataatgcaggaattgaacaat

SEQ ID NO: 6895 - DNA, 1078 bp, Oryza sativa
ttaaatggtcactttatgtgttaactgtgaattttatccaggtctataaagtactatagatgttaatatatttctctataaacttgatcgaatgagagaagttttgacttaggacaaaactaaaagaccttgaattatggaaaggagggggtatttctagcttatgtttcttttttctgttaatgctcattaacatctggtagcccctataataatcaagggttaattggatctatgccattataagaatcatgtatttaccatgatatcaagaatatatgttctttttgtacttgcagaattataatcttgcttttgttgttgctccacaggctataataattgattgtgatgaagatgatacggatgacgtgatggaggttgttcctttgaaagtaagggcagtgctgctttagttagcgggtggaattttgtcactcgagaagacatccccttgttttgtgcatgttgttcaaaaagtcataaaaaattgaaaacataagatagatcaatatgtaaaatatctcttcacaaacatgcaagttcaaattcgacctatacaagtagaaaaacaaaaacaataaatttgattacaaatagtgtgttttgttctatcgtgtcacatattgatctataatgtcaaatcttcttaaacttttttatgatgttttgggcgacatgcacaaaacaaggggatgtctcctcaagggacaaatagacttttccctttatatgattatctgtttacaatggtgtaagtttatatgatataaactacatgtgctctatttagagcatccctgtcaatgatgctacatcattgatagcactctatgtagcaacaatattttcaattgcacaaactcacaatatctgtcctccttgttatctcataacttcatttattaattctcatctcaaaaacaacttattgattaagtgttctgatttttcttggatttcttactgtgcaagatgctgatgccaaaggaggtggaaaatgagcaaagaacggttcctggcattcctcaaacatgcaatacccagaacactagcaatggacgcactaacaccactg

SEQ ID NO: 6896 - DNA, 691 bp, Oryza sativa
ctcacgccgaactggctgaagtcgacggggtcaggcaccgatggcgggtgggcgctgcgcacgagcgcccagttgacgccctcgaagaagggatgctgcttgatctcggtggcgcccctcctcgacgcgatcctcttgccggggtccttcaccaggaggccccggatgaggtcccgcgcgacgccgctcgccgccgccggcgccgggaacgcgccgccgtcggggaaccggagcggctgctcgacgacgttgcagagcgtggcgcggttgctgctccccttgaatggcgtcatgccgtggaggagctcgtagaggaacaccccgaacgtccaccagtcgacggcgctgccgtgcccctcgccgcggatgatctccggcgccaggtactcgtgcgtgcccacgaacgacatggaccgcgcgtccgtcggctccgcgttgaactccagcggcgagccgtggaggagcccgaggtccgacttggacgtcttgcggctcctctttgggaggatccgcggcaagaacgccgacggctgcatgcagccgacgccgacgccctcgccgtcgccgccgccaccggcggcgaggcccttcacgacgccgttggcgcccgcgtgcaccgacgacgacttcaccagcatcgggcacacggagcaccgcagcgacaggtcgaagtcggagagcatgatgtggc

SEQ ID NO: 6897 - DNA, 3751 bp, Oryza sativa
caagtaggaggcagtgtgcatcaccaaggatggcttccagaattatttcagatttttaacattctctaggctggacaaggatgttcaaaacttcaaccccagcctgcaaaactctgtagctgacgtaatatcccagtgcctcatggcattcatgggttgcatattgctaccaggtgtaatagcgaaattgtatcgaaactttgaaagtactactatcctatgataagagtagcaatatcagattgttgatttactggcttgattactattgagccttgacactgcgacattattggtaatgctgttgctgaatgtattatgaacaacggcaaaaaacattagactggtactccctccgtcctaaaataaaatcatttttggcttcatctatttattccaaaataagtttatttttaagcaagtagaggataaatgcattaggaatagataaattgagaaataattacattgatatttgattgagggtatttttttaattttgtattggtatatgtgtaggatagatgaaaaataaacttattttgagacggaagatcattttcagaatgtatacaagtatacaaccaaactttaaaaatgctggacataaagtataggctaacgttattatgattagtcatttgaaaattgaatcaaacggcaacaccacgcatgcaattgtgttgatgccagataaaggtggtgacaccctagttatacatctatctctactacagctttggatcatcatcacttaaagatcagcaagagaaattgaaactggtaaattctcatcaaagttgggtttcttcattgatgataaagctgctttctacaccatgttcaaaacaaaaattccttgcatcatccagcaggaaagttctgaaaccacacgcatttcaacaaattaatggagaaggtacatcccgtttgcatgttccttcaattcttcgctacctgctctattatcttcctctaacaaagatgcagaagagctaattaaagggtattcttttgacaagatgcaaaagagctgatgaaagggttaaaaaaaaactaagagagtataatctgttgcaacttgcaactagcaaaatgacagactaacttagcaacatatggtatgccagtaacatcaagattgttttttttcctcgaatgccatcaagattgttgcacaatgcattctgacggcatgaagccatcaagccatcatctatcactggcaaactccaatctgaaggaaatgcctagagtcttatgctattaccgcaggtggggaggccttgatccaaatggattgcttccaggagtagctggtgaaggaattgtcggtgaagcctgcgatgctctctgaaaaagtgaagacatcagatccattgtcgtatcaccattttccattcttctgaattcaatatattttgggggaaaatagaaatttgaagaaaatacatatcataaatgatgggcacaaatgaagtataaattaaatgcaatttatcctcaaagaaacaatttgaacctggacctcatcctagaattcgccagtttccacacgggcaagttaaatagttagctgactgagattttaccctatccaagaagaatatatggacaataatttacagtattgctcttcaggtgtcttaacagaagtatagcttgtactagtatgttacaatattagatgctagttcatatgtaagttaacattgctaacataagccatagaatggatgtggatcctgctatgcactaatgcacatgctacttccattcaatcagccacaatttgatcaaacaaacgatcatcaattgactgcagcaacaaagttatacttcttatatcatcaaacaagttcttttcttcaaaatggaacatatactatctagaagacccctctggcctcccctttgctctcacaaggcagctacctgcatcctacatctagtttcaggaaaaacaaaaaccaagcttagcgtatcagatagaagacacgtctgacctcccatttgctctcaaagtgacaaggcagctacatgcatcctacaaacatctagttttggaaaaaaaatattaaaaaagctaagtgtattagattctctagcagacccctccagcagtccggcctcccctccgttgttagaagcaagcgacctatatgtgtacttgctacagtggcacttcatagaaatagagaattctattcattatctaactgtaactccggatgacaataaattactaataaattagtacagtcaagaaaataacagaataaattgtaagttcacctgtaacattcctggttgagtgatataagccatgaactgttcctttttcttgctgaacaaatccttaacttggttcaacaaatcttcttgtctttttatatcctcgagaagcctttccttttcccaattcttatgtttaacttgctcctccagttcagtgatagttacgggtaagtttgagaccccaagatttgcagttacaggaaattgtattcctaagcttgcccttcaaaagtaaggtcatgtataatcattaacaaaaagaagaggtggaattaagcttaatatgcttgttacagaacagtgcaaattagtgttaccagactttatgtagtaagcaaaccagggtaatgtatcacgcatatactcataaaatgaaaggacaattaaatatcaccgaaggacccacaatatgcagaacactaatgatcaaataaaagtatatgatgtgatgttaaaggataaatccatataattgcatacctattacctaggcagaatgagccattaggtcttagtatagacccatcaagagaaacagcaccatcatttatcaaaggaatagcatttcgcaattcagctctagtcttatagacttgcaactgagaaaacaggctgtaaaataaagtttccctaagaccgtggcccccagctgtgagacaactcaaatttgcctggtccaaatgtatcatatttactgcaaaaccaagaaaaccaggtgggaactctccactaggcaaccttggtttatgcaaaagaagtttcctctgaggatcatcgatcataaaatcaccagaaaatggcctgcaaagtgtaatagttataatgttgaagtgtccatccagcagagtccaacttataacggcacaatgaaaacacaccttatattttcaagacaaaagacagtgaatcttccatctaaaaattttccaattgtgcgacctagtccatgaatgccactggttttatcaaccataccttccttgtcatatgtttcaagaccctcgacaccatcataagtcttgcagacgacaccaagcatattgtccaatcccaagtactctgagagtaccctataacaaattcatggtacctcaaaagtaaacaaataattctgcccattaactttgcaccagttggtgcaataaatcttattatatgtcaaaacaaagagagaataatgacctgctgaggttgtcattatttatttttcccaaggtagctacgacaccaaggacatctttcatcagtggcagctttgatgcatgctgataatgacgaatcttcagttggcatataatcccagctgctgtctcgtcctgtttgagtatactttgaatagtgcgttgttcagcttcttcaacagatgtgtcattatttgcaattgccgccatcgatgaataataattgcctattttaactgagaaaagttccagggttcagcatataaataggg

SEQ ID NO: 6898 - DNA, 1154 bp, Oryza sativa
agagggagcattctgtgcagcagcagcagctcatccaactcttctgcttctgtggtgaccaaggagcaagaggcagttgctgctgcttcctcctctcaagaggaaggagtagcagtttctgagactgaatttgtcagctacagggatgaccccaacttcaggtaaatatatatgcttcatacttgtgtgtatacgtttgttttctgagatggagcttcatgtttcagaatctataattggcatgttattagcatcaatcagtggttcttggcttccattttaatgtcagaataaatccttggaatttatgtggaaatgggttcctgaatttgatataatggatattagatttgttttgttctccgtaccaacgaatggttccatggtctagcggttaggacattggactcttaatccccctattttttttcatcttattcatatatattggctagagtggctgtgtgtgtctctctatatatatatatatatatatatatatatatatatatatatatattggttggagtggcaagcactttttttccattcatctctacatatattggcttgagtaacaaattcatgatttgtaagccaaagctcttttttgtctttttgtaaaaaagaaacttctgaagattgccaaaaaaaaaaactactttatgtacatgtagtaagattcttgtatcaaagaagagagaaattcaaaaataccagctcaactttttcttgcaccttcttgacaatgccgtgtgcgtaactgcgtatgtatatgcaggggatgcagagggtgcgggcgggaggaggtggagaggggttgcaacggcgaggggcggatccagggcggcatagccaccgtccccggcttcgggtggtggcctatcaaggcgtaccggccgtgccccggcttcgtcgcctccggcggccggtaccggaggcaggggcagagcatggacgatgtggcttccggcagagggaagaaggtcccctccaacaacaaaaaaaatacaaaaggtattactactccctccgtttctttttttatgatgttggttatcatcgtacattttagaatggagggatttcttttttatgatgctggttgtcgtcgtacattttgggatggagggattttttgtttttttataatg

SEQ ID NO: 6899 - DNA, 698 bp, Oryza sativa
aggtttctgcacttcctaggttgatcgtaacattgttgttactagtctcactagtgttatgcagggggtatgattagtttataatttctaggtgttcctgtcaagcttaagaatatcgaatatgcgcttatattttataatctaaagttttactggtattggttgtcgtaggcctttagcatgtgtagatagtgattgattgaagaatgcaaaagttcagacgacttccacctgttctgctgcagcttgtttgatcactatcatgcatccctgttggctttcgtatggattgcgtttgccctctgaaactaggaagcttaatgtgtgttacgctgttactgtttgagtagttggataatgaatcccatggtagcactatttgcactccggtttagacatagtgattaaaatggaatttctccaaaactagatctggcccattgcaataagtagaattcacattgaacattaaaactttgcagctaagtttgactatgggacatgtctaatgtatcttctaccctttatctgctttaccatgcaggtggcactttcagattgcctatgctagttcatttcacgctgcatatccaaaatggtgaagctgacaatgatagcacgtgtctctgccaccttccgttagtggagggattagatgatggtcgggatctgaaggatgctgacttctacaatgatga

SEQ ID NO: 6900 - DNA, 976 bp, Oryza sativa
ggctagctaacacggatcgccatggcggcaacatactgattcgtaaggatgagaatgggcagattgagctgataccaattgatcatgggtattgtctgcctgaaagcgtaagtattttgttttgctttgaactgcattttttgtactgaaaattgaaatctatgatcacccatagtcactaatcgccataaagagttgctcactccatgtcaaaaatataagctgtataagtttcttacactgtcttcagtgcaaaactttgacctttaattccttgtatagtattaatatcaataactataaaattgacataacgtgaatgtactttcaaattcaaatcttatgatgccacatgcttgacgctaaacatatgtaccgctagttcaattattagtcaatgtttgcaaatgttggcttcctaaaattgcgggaggcttatatttcaggatagagggagtaattttcacgaccacacactatgtacacattttaatataatatccattgctaaattttttgtcctaatttggttactagcaatgattgttttctcatgttgtaaacaatgtttgaactattttagttttagtaattgatttgacttctaaacaatttatagtttgaagactgcacatttgattggctttactggccccaagcacgccagcctttcaatgttgaaaccctggactacataaagtcacttgacgaggaagaggatatcaagttgctcaagctcaatggttgtgaaccatcatctaagtgtgttcgtgtttttcgtctaagcaccatgatgttgaagaagggtgctgtgagaggtctaactccatatgagatcggtaacatgttgtgtagggagaacattacaaccaaatcaaagattgaagagattgttgaagaggcagagcatgttgttcttcctgggataggtgaaaaggcattcatggaagccatctcaggtatcatggatcgctat

SEQ ID NO: 6901 - DNA, 1061 bp, Oryza sativa
tctattcatcatcagccatgccaaaatttaaattttaaagcttaattttgaagatgaatttgaagtttcttcatcaaagtttattttttagcattggcatttaagtcgctaagaacatatatataaaaattttcccaacaatttactgtattattattttgctaatatgccatatggcatattatccgtattatccttaggttctgcgaagacaaatggttgggaaatgtaaccctgcgagaacagtactcgttcctctacaacattgtcaggcacaaacatgcaactatcgaagatgtctttcaaaatggatatcccaattttcatggagaagggatcaaattggatcgaagttagtcacatggaacaccttatcaccacacatcgctaatattggtttaatttaggagcaagatgagtttccatggaagatgacccctaatggacagctccatatggagtctcattatcatctctagtttatagtgacatctcgaatataaatagacgcccttggaaactaaatatgccattgaaggttaagattttcctttggtaccttcatcgtaaagttgtgttaacccaagacaatctagctaaacataattagcaaggcgatcaaaactgttgtttatgtaataataaggatacaattaaacacattttctttgaatgcctcttagcccatttagtttggtccatcatttttgtggcgtcaagaattactccacccgatagtgtttcacaagtggtcactagttggctttcgggttttcaaaaagatatgtaaccatatgtcctgttaggggcgactgccacatgctagttgctttggttacgtaagaactatatagtttttgatagaaaagttatttatcacacatgcatgtcatatttgtaactatccattggatgcacacctaggttattcttaaaaagccgagctcgtgggatttggttattgcgacgtgtctacacttggagcgggtggtcaatgagtgttttaactagggacataggtggtgatctagtcttaggatgatggtccttgatgcttcttg

SEQ ID NO: 6902 - DNA, 3173 bp, Oryza sativa
tggatcatttacctctttaagacagatcatcattcactctttccagcatattgaagacgtacaaatgagacagaataacctgatgtcctctgactatctgcatcagcaccatcattctgatcttgttgtgccccatcttgatccgttctggacagcaatgcaacaatactgtcaagcaatttgccccaagtttgggctgctgcaccatccaacagcagtgcagattcacagatcaacttcgttgatgcaactgatgtcagcttaacttcaacagtccctttgatgaatttaagattgggaatccaaaagcgctgaaggattgtcatgaaaatatttggctgaattgcatcgacagaactgacaagaacacctggtccatatttaaccaccaccaaggacatgaagaccacaagagaattcacaaacttcactgcctgccttgtctgtagtcgagtaaacaaagcactccatatctcatttatgtgaggattcatgatgtcaaaactcacattttccacaagtgtgttaagcatgtagaaggcagaatcttcagtactgctccgcgaaaggagactgcggaatatcactaagatattcggtagcctgccctcttggttaagctcatttggaattttccgaaggaatgctctcagcaaccgaaccaaggcagggacacacggtggacggtcccaggtagcattactgagcaggacaccaaacagctgcatgtagttctgcgagagaggtggtcggctcaaattgacaagttgtgcaaatatctggaaagcatatggccagaactctgagatgtcctcaaccaatatcctctgaagcaccgggaagaggcttgcctcaaacacaggaagtagtgctgggtcctgctcaccagcccgaccaatcactgctgccagggcttcaaacaagtaatggttaaaatcagggttcttggggttattgcacacttccataagaatacccacaaggcgagcagtaatctcatgaacaatttgcccagcaatattagcaatcccaagcactctcatcaggcacttcatcagataggggttctcatatgattcaggaaaacttagtgccttggacaggttctgaacaatcggctgggcatatgggttgatatcagcagcaacatagcgtggagccctggtaatcacatttgcacttggtactggtaccatatccttgatgatcagaaggttctcaataaaggtcgcagcatatgaatggacaacatttgactcgtgtatcaggaaccttattacacttggaagcagtgccagtgcagtggctttggggatttgatccttgaattccttcaagaacctcagcacagttgccttcagcattggttcagattcccaatcaggggcctgcagctcaggcacgatcacagatgtaaagaagctctccatatcaaccaccggtgtcccacctcctgtggcaccaggcttctgcataagagaaataacaaggtatattgcagcatccttctctttccagttgttcgtccgatcagctgcatatgcagccaacatctgctggacctgtgctgacacaagtgcagccacctgctcccggtagtttgccgcaagcccccgcagcaaccggcatgcagcccgcctcagtgtatccgcatcactcccctcggcatcacgcctaacatattccacccagttcccctcaaacagctcctcatcatcatcccgtaaccgcaggttaggaattacaacactatcgcatatctgcttcattgcatcagggctcccaaacagcgcgtggtgcacgctctcagcaaccgttgtcaaaaatcttattgcggtcaccgcaagctgcccgcgggatggtgagacagatggtgccatgaggaggccccagaccgcctcaacgaactccttcagatatcccctgaactcctcttcatacttctccatgtacagctgcaagttgtcacacacggcggcgcggagcgcatccggggcgccgtctgcctctatcgctggcgggtaggaggtggtgaggaacgcacggaactccgtcatccactcacgcatgtggtcctcgaagaactcgggcaggtcgatggagttgagcgaatagaagatctcgcagcataggcgaaggcactcaaacaccgggcgggattcaggcggggtgaccgtgggtgcggcagcctgaaggcggcgggaggtggagaggaagacctcgagtagggcagcggcgaagttctcgaggcagtacttgaggtcgaggcggatggtgttgctgtcgaaggcattgcggaagcgggagaagagggaggccgcggcggcgaggagggagttggtcgccgggatgtccccggcggagagggcggtgccgagggaggagacgatggaagggaggagcgactcccacctggcagggaagtcggaggccgcggcggcggcgagggcctcggagagctgcgcctggatgaggggcggcgcggtgaggaggagctggaggaggttcgccttgatgatggcccagtcggagggcgggaggtggtcggcgtcgtcgtcgccgccgccgtcgggggagggcttgggccagcggcggcggaggaggttcttgaactggacggaggcggcgagccgcgactgcgggtcgtggcgcggggaggaggcgaggccgaggagcgcgagcccgaaccccggcgagcacttggccgactcgatgctctgctcggcggcgcggcgcgcggcggcgtccggggagagcgactgcgcgaaccaccccgacagggtgtcgagcgtctccggcgccacctccattcccgccgccgcggcgatctagcagaaggcggctagggtttcgtggagatcgggagtggaggtagggtttttgaaatttctcgtggggaaggagagagagaggagagagaagaagaagaagaaaatgcttttgcttggtcggtcgatgcgaggaagagatggggaaagaggagagagctgagccgttggatttggccgcccttcttggagaaggaaaaaggctgggcctgtgggcccctgggatcctgggcccagcccaccaagcttgctagcccatctcagtgaggtcttgtgagttgtgacggctcaccgccactcgttggggacgcaccatcggaggcagcatcggcacggggattgatg

SEQ ID NO: 6903 - DNA, 936 bp, Oryza sativa
caactaatatgaaattaatatttcaataaattgtgaattaatattggacatgtgataaatcgtgactgctgtttattcatggaagtcttaagggagtctactcatttgctttctagaattgtgacactttacttttctcaaaattatacatcaacagtccgttgtttcctagaatgatcgatgggcaattgcaatttattttcaaaaaccgtaaaattgtattgcttagttccagcaactccacttcaaatttccttaccttcattgctctttgaggagaaaagggggggaatttgtgctcaagtagtcaacaactaagttggtccttttgcgatcaatttgacacagtaatgcttagaacatgtctacatcctttatttgttaaacatatgaattcctgccatacccccaaattatgttcaccaatgcacgtgagggatatgggaatctctcatgcgttactatgtcctatctatgtcatatcactggtggactgttaagcataacaaacacctgatctgcattaccagtttaccacttcacctgttttcacgtctgtgacaaggctttccttcaatggttttcaggcccttattcgcaagtatgcccttgttgccattgtgattggaatagtactgatgctcttttgggtcaagaacaagatatggtgactgagagtaacagtcaggcctcctgttacggtgctggaacttgagttctccgtgcaccccgaatcgattctggctcaacagatgctttgatggcttatcccgcatctgcccattcaagcgagtagtagtgtagctcttcttccgtgctttttgttttttgtttttttgttttttgcctattcctcccaacaaagatcatccaaactaaacccattgtagtataaaccctcgtcatcgacccagcctatcctgatggatgaagaag

SEQ ID NO: 6904 - DNA, 1057 bp, Oryza sativa
aatttctccatattatactgtgcttctactggttctataaggaatttcaatatgatggccattaaatggaacccactattcagaaaaaaaaagtattctagaatgttttatgtaaggtgtttacacaatatgcagaacaaaactactgaaaattgatggtcacaaagcatgtctggtattagatgataaggtgcaccaacaaagcgaaaagcagaaaagaacggattgtggtgaaatgtgaaaaatatcctgataaattacattggaatactgccttatatcagtgatgtgcacttattctcttcttaatttatggtctcatcaaagtaaactttttttacttgtgtttcatatggatgcaatcaagtctcaaatcatgaggaagcaaaacaaagccttcctatgaaaacatactacaataaggtgctcaagggaaatgttttcagagaaataaggtgtagacaagaatgtattacctcagcctcgcgcaagtgcatgtagatatcagaagcaagagtagcacacaactgcggatcctcgtagttattgtcaacatcacaaatttggtcgatttccattggggaaggagcatccttcttccacttagtttctgcgaaacaaacaagggataagatcaatcaaccattccaatagaatgcaccatatagcacaaatttttctagctataactgtgcatttcagcaaccaaaacacaccttcgacatctctatcctctgagatacgcaggttttcgtttgctcttcgctgcaaggaacctagaactgaggaggaatccccattatcaatgtactcaaattctgggcttttcattgagtcacacgtcgacatcgtctcgtcaaccgaaactgaatctcctgaatgcataggggagacgaagctgctgcagggtacagtgacaggtgccagtgcagcagtcggcacaatgctaggcactttaggaggaagaacagactccttctgtgtggcgctctcatggcgggatatggccggagccggcttggcggaagccgatttcaccgccgaggcccgattcgtg

SEQ ID NO: 6905 - DNA, 1224 bp, Oryza sativa
tttttaaaacacaccgttttgcacaagttccaaactcccaaacctcctatcaaagtgctccatccggtcttaaaaacaaaggtccggtttcccacacaaaaatgttacaccctttcacatcaaacgtttgaagtattaaatataagctaaaaataactaattgtacagattacgaataatttgtgagacgaatcttttaaacctaattgctccatgatttgacaatgtggtgctacagtaaacatttgctaatgatggattaattaagtttaataaattagtctcgcggtttactgacggatactgcaattagttttattattagtgcccgaacaccccatgcgacaccctatataatacccgatataacacgcaataattttacactcttggatctaaacacccccaaagttattttggatactacattccaagttcaaatataaaactctaatggcaggtacaataatagactataagtcagctacaagcttatgtggtgaagataagagaggagatagaatagaagcgggctacagatttgtaaccagctgcagcacggactcctaaacgctacggtggtgtttgaatctcctgaagataaagataaagatgaagattaagtgtttcacgtaaaacgaggtggtaataacgtgtgactaattgagttttaattattacaaacttgaaaagtggattaatatgttattttagaacaactttcatatagaaagttttcgcacgaaacgcaccgtttagcagtttaaaaagcgtgccactttaatccaaaatttaattcacccctttcatgagtttctaacgggctctacgtgtgtatgacaagtgggaccagtaattaatgatgtagtgtatatctgtagttaactattgtataatttactattagattagctataaatgatttggagctagtagttagctatatactattaaaattcctctaagtagcaaaggccgtgttcgattattagtgttagaaactaaccctccagcacgtaaaacaaaacggttcattaatacataattaattaagtattagttatttcataaaaagtgagttaacatgatttttcaaataactttcatacatatatttttttttaaaaaaaaacacaccgtttaaccatttgacaaaagcacacatgtgaaaaacgagagagataagtaggaaaatacgatgaggaatatttcctccgtatcaaa

SEQ ID NO: 6906 - DNA, 677 bp, Oryza sativa
ttcttctagaacaatgaatatggataaaggcatcctcacgtttccgttacgtactcctttaaaaaaaacttagagaacaaaacgtttccgttacggactccctttctaaaaaaaaactcagagaacaattaatatggacaaagatatcccgttgagttttttttactaagcaccaaaatcgtagacggaacctttttcatcttttgtcgtggcgatgccacctgtgctgcttgcgtggccgaccggcctctgcccaacccacgccggccacatcaccacctcgtggctcgtggcgctgctccgcctccgcctccgccacacggccccgctcccgacgaatcagcgagaaacggtaaccaaaaccttcgcctccagcctcgcctcgctctcgcacaaatcaatcccgcaaaatccctcgaccctcgatccccccccttctccctctctctctctctctctctcccggtgatcgcgacgccaacccgcgctcgcgccgggtaaggatcctcctcgattccccgctcctcccatctcccgccctacctagctcacgatcggtcgccgccaccgccgccgagtggtcggtctgtgtggctcgcccgagctgcgcgttgtgatgatggcgatgcgcgtggttcgagttatagatgcactgggggctaacgcagaatttgctc

SEQ ID NO: 6907 - DNA, 978 bp, Oryza sativa
aagttagtgtctgtcagcaatgtacattttgattcagcattctcagctctggtttcagctttcaaatatttttcctttagatcatcaatcacctgctccatatcagacattgaagacttaaatatactgtgccgttcgacaatagcctcaatcgatgcttttgcatgcagtaactgagtttctgactccttaagcttctcctccagtaagccagccctatctgacccctgacttttgagggattttagctcctcatcgagttgtatattagcgtgagaaagttgtttgcactttgcttcagcattctgtgttctactttctgctctgaaaacagcatctttaatatcattaacaatattttcgaatgtgctcatctcatcttcgccgacttcattttctcctgttgatgcaattgtcaatggcaatccagacttagattccctcagccattcctctagcggctgaattttatcctgcaaagtcaagaactcagagtccggttgggcttgagtcggcatcacttccttttcactgtcttgtttcatcttctctagagtgctattagaaccattcgattctgtcaagctttgctctaactttgatttaaggtcaccttcccgacgaattgatgcacttaggtggaactgtattgtattaactttaccgataagttcctttgacgctccaagaaacaattcagatgcattttcagctgcaaacattctttcagagatcgcttcaacagattcctccaagaaatacgattcatgttctacatgatgcagcttaagcttgagctcttccacaacggactccgaatcatgtaacttctttccgagatccagttcacttgctattgactgatttaacagctgcagagtatttctttgttcctcggcaggcatggctgagcgagatgaaccatgaccattttcgtatccaccatcttcactagttcctgtacaaatgcaattgtca

SEQ ID NO: 6908 - DNA, 1240 bp, Oryza sativa
ggtacagtagttcatcaggcttgcaagttcaggaatcttcagtttgctgattgcatatatctgaaggctgtttgcacaattttcttgctgataatgtttattcacgttggtaatctgtcttttttgcaagcagacacgcaaaaaaattcttattcgggatggggttttgtttcaccaaatgaatggcattcgtcacaactcttcatcttctctttgttttcccagcctggtgcacattctatcgtctcatctggcattgtctataagggtcaactaattagatgatgtcttgcaattcttttgtttgttcttcagcttgcattgggagtttaggtactaggaaacggttttctgcgtttagattgcttgctagtttcgatgtgtgttgggaaaaagagctcggaagcgagctgcatgctagcggtccatcatattcaggtgtagtttggccatcaccaatgtgcagtaaaagtttcacaatcacccaattaagcatgttgatgaagccactttgacaagcagcgaccaaacattgcgtacctgtgcaccgttcctaatttctgctgtctcttgtgtaaggaactaagccagcttagttggtcgatagctagtgtgggtgtacacctagaccaaaagttttatcaagttgaatttgggtgcctattttcttgttaaactagatgaatatcccgccgcgttgctgcgaaaaattacgttgcataatatgtacaaatgtaatttgattatcaaaatgaaaataatttgatacaattttgagtctaaaaataattaagattgcatgttttaagatagaagaaagaagagacaatttggaccatagctctatcatccaaaggctagaaataattaggggaatatagcttaatgagagaagagataaataatgtattaactacacttaataagaataaactatagtatataagattacaaagtcgatcctaatattttctttatcttcttaaaataaacacaatgaactcgcatgtttttgtcttttctgtttgaatgatgtatcacagaatgccctgcaaatttgctgacctttttacctgatacgtcactgatcggactttgaatcatcttttattattgttggaaggaaaaagtatatatgaggtcctcatcttgtcatcgaattacaaaatcatcctccaaccgcaaaatagatatatatcatccctaacttacaaaaccggatcactctaggtccttaggt

SEQ ID NO: 6909 - DNA, 1788 bp, Oryza sativa
tgcaggtcgctgaagaatatcgtcttgttcctgatacattatacctgacagttaactacattgatcgttatctttctggcaatgagatcaatcgtcaaagactgcaattacttggagttgcttgtatgcttattgctgcgtaagatctgactagcaatttttttaaatgtgtttctcagtttgcatctgagttttgtgtactgattttggcttgttcctatatcagaaaatacgaggagatatgtgcacctcaagtagaagaattctgctatataactgacaacacatacttcagagatgaggtttgttttgcatatctgttaacattgctgtgtttatgtccatgactaacacatagattatcaggttttggaaatggaagcttctgtcctgaattacctgaagtttgaagtgactgcacctacagcaaaatgctttttgaggttctattctctttcatctcatcgatgtctatagtgctggaatgaatcgaactctaataactctcttattgcctacaacaggagatttgtccgtgttgcacaagtatcggatgaggtgctgctctcttaatcatctcctgcttgctgcaattccataatagttatatggtgcattgcattaacagcttttcatcgtgcaggatccagcattgcatcttgagttcctagccaattatgttgctgagctatcactgctggagtacaatctactttcttaccctccttcactagtagcggcatcggctattttcttggccaaattcatactgcagccaacaaagcacccttgggtaagtggtggcatcatcgtattgaactttccatacatcttttatatcagcattcaaataaaaaaattacaagagctaacatatgcttctcattgtaaatttgaagcagaattccacccttgctcactacacacaatacaagtcgtcagagttaagcgactgtgtaaaggcattgcaccgcctttttagcgttggtcccgggagtaaccttcctgcaatcagggagaagtatacccaacataaggtataaacggcatatcctccccatttcttcagttatctgtactgtttctaatgctgatcttctgtacctttgcctttgtctgcagtacaaatttgtggcgaagaagccctgcccgccctcaataccaaccgaattctttcgcgatgcaacatgctgaactagaaaaataaaccaaggattagttacagttgctgactgaattcttcctccagaggcatgctgattgcccccctgttctttcaggtggtttggctgagtgtagatctaagatcgatgctgcagctgtgtgtggtaacttttatggtactgatgttctttcttctttctcctcctgttcttttacctgtacctagtagatctatggttttcagtacattgtacatcttgtttgtaatggcatgattcttggaaatattagctgccaatctgacctgggcgtctcccaggttgatgtatgagggagtctctgttcgtgttgctcttgtgaaattcccaataagagcaccacattttttaatagtgctcattctgaataagttattgatcatgtccttgctatcaagtgctagcgttcttgatgtttttagtcaaaaggaatatttggacgaattgcttctcatcttctacacatatcggctttactttttcttttttcaacttgttctgttcttctgttgacagatactgcatgcagctgatgtgatcgacttgaacatggtgattcagcgagaagcttagtagatcattgtat

SEQ ID NO: 6910 - DNA, 1163 bp, Oryza sativa
gattattactccctccgtttcaggttgtaatacgttttgactttagtcaaagtcaaactactttaagtttgaccaaatttgtagaaaaaagtagtaacattttagacccaagacaaatttattatgaaaatatattctgtcagggttatggataccatatacccaatagtaattgactaagctaggcggggccaaccatataccaagtcctatacgaaatcatacctcatatatagaaggagttccggataagggaggatgagtagagttccatatggaaactacaaggaatatttggattttatctatattggtctccctagttctacttggacaaggagatatctatgggtataagtacaagaccccataggaggagagaagggacaacatatcaacgcacaagccaagacaagccaaacatcgatatcagagataagcctaaataaaccctatctggtgcctgcggaggtcgacaagagggatctagcgccatctctgatctcggcgagtttatattcgaggaggaaaactatcctgtcgtcgactatgtgttggttatctatgccgccaagtcaacgacatctagatgggttatcccaaatattgtattggtgtgattatgatgaatatagagcaataccggcttcggccaacaggatgtaaggctattacctgtcagataaggggcccgaacctgtataaaaacccttgtctccgtctcttttacttcaatctcgcatataccctggtaccaacgatccatatactatgcaaaataccgttgtcgcggtctcaaacgtcgacatatgtgtccaaacatttgatgtgacgtttttggccaaaattttttggatctaaacaagacctaggcttaaaaatataactaattatatagattacgtgtaaattgcgagataaatcttttaagcttaattgctccatgatttgataatatggtgctacagtagacatttgctaatgacggattaattatgcttaataaattcatctcatatgctaattagcacacgtttactgtatcatcacataggctaattatagattaatcaggctcaataaattcgtctcgcaaattagtgtagggttatagaataagctttataattagtctatatttaatacttctaattagtgtctaa

SEQ ID NO: 6911 - DNA, 5970 bp, Oryza sativa
ttcgattcatacctacacctcttaacaaaacaactcaaaatttaactttatttcacaatccaatattacatacctaactaattatatgtttggatgccatatacctagaattaatcaaaatctaacaaaaacatgtttaaactaagttcaaacttgttttgaactagttagaaaagtagttaatgttaatacctaaatatttaaaaaaatttcatactcatttgaattgagtatatactcaatttgaaccatggagctcgggcaccatggagcaccaaacaaatatatatatatatatatatatatatatatatatatatatatatatatatatatatatatatatatatatatatatatatatatatatatatatatatatatatatatatatatatatacatatacatacacatatatatatatatatatatacacatacatacatacatacatatatatatatatatatatatatatacatacatatatatatatatatatatatatatacatatatatatatatatatacatatatatacctatatatatatatatatatatatatatatatatacatatatacacatatatagatatatatacatatatatatatatatatatatatatatacatatatatacctatatacatatatatacatatatatatatatatatatatatatatatatatatatatatacatacatatatatgagttggatttttggcacgcgagttcacatgtacccacaatctacaccctatatgtagcttgcacgaatcttagggcaaatatattaggtgctaacaaaatgtaacatgcatgatgtttacgttatactatattttttacaagtgtaaaatacgttgtttatgtaatttttgtatttcttgtatgcaaaacttgtttatgtaatttaccttgtttatataaattaccatgtttatgtagtttttgatggtaggatatatatcattttgtaagtatcatttttgcaagatgacaatttggtgatatagtagatatattgttttctcattttcactaaatatcatgttataaacaaaataagggttagagaaatacaatgcactagatatataaatgtcatacatatgattattattgaaaaaaattatttggtaaaaaatacaacatacatgttatacatattgtgaaccaacctaatcctaatcttttctccctatagtaatcattcatttggttaaggttaggtacattttgcagcacgaatcttggaacacatcaacggtgtagattgtaggtacatgtgaacccgagtgcaaatatgcattttcctatatatatatatatatatatatatatatatatatatatatatatatatatatatatatatatatatatatatatatatatatatatatagggatgcgctaaaccgcgcctggggtgcgcaataactaaactactcctctcacagcactcctccccacccaccaccccccctggtgcccaggaggctctcccgcacctttttctctccctcaccatttgtccttcagtaaataaattacttgcagttaatatcttcttattagtaaatgaattactaactaatatattgatttttgcattgtaatcccgcaccttttggcatgtccattccaactgcaacccgcacatttctcttgcacacgtagtaaataaattactctctgttaatatcatttattagtaaataaattactcggaatccaactcatttcttctctcagtaaatggattactcccaggttgtagcccttctcagttggttcattctctcagtaaatgaattactgtcgggttggtcttatttattctcttagtaaataaattacttaagataatacaacacttaattggatatcataccttctcgcagtaaataaattacttaaaataacgtattgatatcgtctcaagattttcttagtaaataaattactattacaccaatctcaacataacatattgacattgccaacaaattctcttagtaaccaagttactattacaccgatggttctcaacatatgtctctcagtaactaaattactattacatgcacgaatccaacaagcaagacaacgctagtgcctcatatcgatgttgagccgacaaagcactatagattccttaggtctccccatcgataggtatccatcacccacgaacatctagagaggcatcccacatgcacctggatatagacagaaacgattacatcatctaagagaagtctttaatttacactcataaatgactctaaatgagatatgattcgctgaagaagaaataaaatgcttcataaaaaattgagcagcaggaagagagaatatgtgcaaaatgcagcctccatctgaagaacataaatcgagtagaataaattttagaactgatgagtctatactgctttatttacaggaatacactccattagactgatcatagatttcagatgttcacatgcatgttaaattaagaaccaaaattctaattgacacattatcagttcgccaagataaatccagaaaaagtgtgcaaagtgtacgacatgaaacatttagagcgtccaagtcaaatgaaccaaggatcctatatcttcagagatcacccggatatcattgaggtcaagagaaaagttcaatttggcagtcagtaaagatctgtttctagggaacatattattatgcataaaaatgatactaatcaaatagactcgtcctaaatttttcacgataccaatgcccaaataagctaaaatgatatggaaattattcatggatgaaaactcccttggtgtccttgatccgcacctgcggaactagtgaaggacatgccatgtgcacatgagcaattagaacaacaatctcaatcctctgaatatgaaaaaaaaaagcatacttaggcaacaaaaattattgtgtgcccagtagcaaaacacctgcaccaagaacagggatttgtgccaatagactgaacaataaaggtctcaatgtacatcgttgtcagtataatcctcatctgcattgatgctgcatccggattctcactctgcccctgcgaaaaaaagacatatcttgtcttttcatgtctagttataaacactaaactaaaacctgggaaaattgcaaccataaagcatagaagattgaatcgagaagaaaaaccaccatgaatctgaacaacgtggggaaaaaaggcctgatcaccgatcatgcaaacatgaaaaaacaaaaacgaaaaaaagagaaagggaatagatcagattggcatggcagcaccaaagacactattcctttcatgggggatgcagacttcaatcacgcagacgagttcggggttgttgatggtgtcgcttgtgaaggaacgcagatggcgccggccctcctcctcctttgcccgcaccaacaacttatgcaaatccaatccaaatgttgctactacacctcctcagcgtcctccacgggcggcggacgagggcagcgggcgtgggcgatggtggcgatctggaggccgcctgcggacaaaggcggaacggcggccgccgacgaggacgaaggatgttggctcctccgtatagctcgccaacgtggagcagatcggcagcggtggaagggaagccggtggagaccatgggcggaagaaaggcaggcgcccttcgtcgtggagcttgcctccagatccaggcggcgtgatggcctctccccggtgctgccttttctcgaatcgccgccggcaacctcctcgttctagatctgaaaaaagcaaaagaaattaacaaaaaaaaatgagtgtattaaatcctatatatataggaggaagtttagtagtaaaagaattactactgtatgggaaaggggaggaggtcgggggtacaggggaggggtggggtgggtaggggtgggttgtgccatctgtagtatagtatgtctatatatatatatatacacatatatatacatacatatatatatacacatatatatatatatatataggttcctactaccaggagtagttactccctccttttaacgggtcaggttagtggaaccatcttgatccaataaccggtagttaggttgtttttttaatttaaacaattaactaaattgtttattagttgaaattatttcttttttgttagttgcatgcaaacgaacttctgcattggaatttctgctacgtgctggtcaacagaagatacatgttagctagctaaactgaatttctgctcgtttggtgcatgcatatatttcccatgtatttaggaacgttaacgtgatgaaaaggcagaaaatatgtgaacgttgacacatttaaaatgcacggtctgtgaaacagaaaaggaacagagcattagttgagaaggaagcagaacattgtttggaaatgcggcagaacatcacttggaaaaaaaaatcccaaaccgaaaatggagcagaatatcgtttggaaatggagcagaacatcgtttggaaaaaaaaatacattctactcttcctagacaaactccatcttctgctcgtcccggcagaaaatgtatctaaactgaaaatggcagaacatcaaatgaaaaaaaaaatccaaggaggaaaataaacctcaactaaaatttggcagaacgtcaactggaaaaattccccaaatatcaagggcagaacctccctgggtaatacgtgattagttacaaacaacaattgcggcatgtgctccgtgatggccgagtccatctgaacttgtaaataggcaatatagttttattagctagtaggaaggacgaaagcttaacaaaaaaaaaaaaggtgcagaatatgttctgctggtgtaactgaatcccatcctcttataggaagctctatggcaagaatacaggcagaaagtttctgcttgggtaactgaatcccgttctcttataggaagctccctggcaagaatacaggcagaaagtttctgctcgggtagaaacaggaacgggaaaggaagcagtatgtgagtatgtgactcagaaaaggagcagaacatcggttagaaaggaagcagaaaaataatttgaacagaagcacaacatcttctgctccttcaacaaaatcgtcactaagcagatgacgttaaaaaaggcagaaaattaaaaaggaatagaagaacatcaattggaaagaagcagaacattatttgtaaacggaacagaacatcaattagaaaggagcagaacattatttggaaacggaacagaacatcaatttgaaagggagcaaaatggtttctgccaatcatagtgtccatgttctgctcctccggcagatgaactaacatgcattcgaaactgtttgtatcccacgaaaatagcggtcggcattctaaacgggttggataacatggctaattaactccgaaatagcagaaatttgcactgccacgtagcaaaccgtacggtggataagctggaagtagttactcccagtagtagcttataatattcatatatatatatatatatatatatatatataggcaacatatcctatgcacacaggccctcacgtgtacacacgtgcacaccaactaaaaaatgtcaccaaaaaatttagaaaaaatcatacacatactttcaattgtattacacctagggttaaaatcttaacatcaaattcattatattttagccgtaacaaaaaaaaaacaaaaaatctgacaattttaaggttgcaattttgtcagaattttatcttttttgttattctctatgtagaatgaatttgaagatgcgactttgcacgtagatgtaatactattgaaagtacatgtatgaattttcctagaattttttgtgataattttagttggtgtccacggtgtgtacacgcgagggcctgtgtgtataggatacgctcccatatatatatatatatatatagggctgcaggaat

SEQ ID NO: 6912 - DNA, 2533 bp, Oryza sativa
cccagaaaataagacatatacctcaatataaccattatagtgctcatcatcaagagtaataatgaagtttttctcatcccaaccagcagcactcactttcctaagcctatttatcttcgagaactttctttgccatgtcttcaaatggttcttaatttgctcacccgtgagagtactattgaacctttcattgaccgccctagcacatgcattgagatggactgccttgaaaccagatgaggtccttgtgccaccagcaacaacattagctaggtgagaaagcatgaaagaggacatagctgaggtccatgaagcatgggtgcttcctcccttgccactgttgttatccatttcctacctatcataaaataaaacaaaaatgtccattcagtaatatatatatcaataaattatgcatgcaacaatatatgaactcagaaaataactattcagcaatatatctaataaaaaaatgaccattcagcaacatatcaacccaaaaaattaccattcaccaacatatcaacccagaaaatgaccattcagcaacatatcaacccaaaaaattagcattcacaacatatcaaccgggaatatgagcattcagcaatatatcaacccaaaaaattacctttcaccaacatatcaacccagaatattagcatccagcaacatattaaccaagaaattcaacattcatcaattcatcaaaccagaaattcagcatacaacaatacatttatccatacaactaagatttggcaaatggactacaacaagctgtccacacgaaataaataaataaagaagttcataatacaaatgaaatgtagcaaataaggtagaaatacaagttgcatagctacatattacactccatgatggttattacggtcagcccacatctgatcagctaaaccctgcctgaactgaaccatcaatgcatggtcattcgcttgccaagttggcgattcatcaatgtcctcacttgaccaatcagacggagctacaagctcatcaattccgtcatttatgacccagttatgaataatacaacaagctacaacaatatctacttgagttcgaaatgggaagaatggagtggcatcatctagaactttgaacctcctctttagtgacccaaatgcacgttcaaccgttatacggagggatgagtgtctaaggttgaacaactccttctcattttgcaccggattattcccccactctttcaagtggtaccggacagcacgaaaaggaggcaagaatccttgtttggctccatatccaccatcaactagatagaattttcctatcatatgatcgataagttggtcacattcctaaatatcaacatttgtcatggagaatttgataaactatagtaatctattaccttgtgggacatgaaggccattttcacgttccaaagcatctcttaaaactacagcatcatgtgctgtcccctcccaaccagccaggacataagtaaaccgaagatcaaaatctacggccgccattacattttgagtggcatgggacttcctaccacgaaaagaggactccacattcttacgaacagaggctctaatatgtgtgccatcaatagctccaatacaatcctattttgtgttcaacaacattaaaaattagggacaatacatcaatgttcacataaatataaaatgagataggaatgaatctcacaccttaaagtaaggatcccatctaggatttcctgctattttagttggagtgtccaatgaggggggtctgataagttcatctcgtagctcaccaattgcatgaaggactttgttaaaataacgacttactgtttctccagacctaccataattagtgcggactaacctatttctaaggttatgtcccaccgtatgcagaaacatagccacttgttcctcaatacacatgtggatggtatcttcaagtaaaccacgatccctaaatagcttacaaaaacgaaaaaaacttccttttctaagtctaagcatgtcaatacaagttgtatcattgaaccaaattttcgtttctaggtactcaattcttatcctatccctttcagccattgggccatatctaataccttctctccttgaacctctcgttcttttcctagaccgaataatcatggccatcattgataacaataaatttgtagcagcaatacaaactaaaagcttggtcctcttatccatctacaatacaacaacaaaaataacacatgaccatcatctactgtcaagaaatttaccaaaaaaattaacacattgttgaaataattatactacaacattcttaaaaaaaacagacatgcacagatctatataaaagaaatccccattcagggtttagggtatttttaccttgtacaatggaaactgagctctgcagtttgtggatggggatggagaagatgaggatgagcagcacctggcaatggaagctcgcgcgccgctggcttgcccttacttccacagttggcttgcccttatcgggcccgcggggtact

SEQ ID NO: 6913 - DNA, 18961 bp, Oryza sativa
agcaagtaatcattatattatcagcccacaccaggcaaaatcatcaccattattcaccatacccatatcgcaattcatttaacaaatcaccaacactatacttgtatcatttcaccaagtcgctcatgaccgtgagcaccggctaatcgattagttttaaactctgcagagtttgtacaactttacccacatgatgtgatagaagccaaaaggctacactctagttgtttcggtacccgtcggtaacccacactctacacattgagcacggtctagaggtcacaacgaagccgttacattgcgtaaagtctagccttgcatgagcatggagagtgtttctccacattggccatgaaccaatgccgctaggaaaggtgggccccatcctaatactaatgttgtaacacatctattccctcaacaaggcactatccattatattggatatgcttagatgcccatgccatatggagaacacgatcgttcccatagagggtcacatgggtagctcctatgagctatcgctcagactagtccctactacaacggccttccaatgcaatgctaaacagtaaacaacttagtaagccaaggttgccccataaccgacagatgtggttgcacggtaagcttagttggtgacacatagttcggtccttaattgactcgggcgaacactccccctatcagcgtagaactatcaccatatgcacaccacttgccgcccaagtttgaaatcatcattttcagtttccaattttcacataataacagaggcaaccgctctgtacaacattttaaaataacccatttgaaagagttaatatcatgtcatttataaccatagcaaattttctaagcatggctaagcaatagctatagtagtagctcgaatatacccatattggtgcttggataggaccacaacccatcctaggtccatcaacaatagggtgatcaataatcaaggtggataatgcaacaattaggagttgttctaccaaagtcccacatttttgcaaacaccgcatgcaattttaaacataataaagcatttgcgaaaatatatgattcaacatgatcgaaggaggaattgatctaatagtacttgcttgctcaagagttactcgaatatttcttgatcctgcacactcccatcaacggcaacaatcgatctgtcctctatttaaatttaaacctatattcaaatgaaaatccaataaaactccaagataaaatatcatgcacggtgcatgaacatgttcagtgtatagatgatggtttaatataaatttaggagaaagattcgcctaaatccgatgttgaatgtgcaagttatcacgtttctaagatattaaaatacggtacgtactattcgaatttaaattagtgaatttttttacaacagtgattctaagtttgagtgtgcagtattaaaaagagagttggaaactaacaaaatctggttcacctcaatcggagctaaaatgaattttctatgattttccaaattttcagcattttatagtgcataaataattaacagaaaatcttttctcagatttaataatttgtttataaaagaaactaaagggcactgcttgaagtacgttttcctatagggaagagaagacgcatttctgttctgtatatctctactctacttttatttaaaaaattcgtagtggtgatggtgaagcacatattttcccgacatgcgatccaacataatgtacatcgacacgcttcagagcggcacactactcctccgcatccctctgcaccacccacgcgcgattcctacggattgctcgcaatccgcaatcagcgggaaaaaaaaacacgctagcgccgccccacatcgccgcgccgctcccccttcgccacggctcatcctcctcgtcgcgagtcccctcggcctccgcaatacgccgcggcaccacacctccctcccgtcccgcacctcctcctagatcgccgccaccgataccgcgtcctccaccgtcgctgaatcccctttgccgcgcgcccatcattggatcgagcgttgtcgtcatatccacctccaccgttgtggagtcccccgccccacatccccgtccccggcgtttctccaccccgcatcacctgccgtcgacgctcatcgctaatctgctcctctccgccaccgccagcgcccgcatccacgcctgcccagatcacgctgccgacgccactccccgatctcaactgaccaatgtcgtgcccttacccccagcgccacatcccaccctctcctccccttttggccttcgaggcttcgcttcggtcccacaccgacacgaggtaccgcggctgcagcgccactgctgttttctcagctatgatttgggatcctgtgtgcaaggagtggctgattactccatcctcaatttgttgatttagactttggaggcttggtctgctttgctttgttatttaatttgctgttccttatttttttaaatagatccattcctgttcagaggaggcatacggggcagaatattgttcattcatagagaggcataatgcacagttaatttcaatcactttccattttcactgtaagttctaagttgttccagaaaggccatgatgatattactattagaatgttagattaaaaatgcatgcccagtagatgtttttattaaatgcctctgaaacaatctggatgtgatttcagcatacgtttgtgcaaacagaccctttaatttgattgtctaacagtatcaaatgatgatttttcaagaaaatccactgaggaattttcataatttatttgcaatccacagatgaaattgtactcttcaatctttataacaactaactataatcttttgcccaggggtatttcaatccttacactaatctatttactgtcaattagagaatgtaccaaaagaatttttgtttttgttatcaaatgttgcacatttgatgataatctatatttcttaatactgtctgcaccttttgtttgcaagctccaaattctataaaaaaaaaaccttgactgcaagcttgtttacaattgtttggccagcacagtaggagcagggtctgatcgggtgctccctgtgcataactgctattggttcactgctgttccaaagtgagcaatagtaatttggaatgaaaatataccaatataagaggtttccagcctcgatattcagatgttcataatatatctgaccaaagtagagacaagtttcaggttcatatatctgatcaaagtagtgcccttgccaaattcagttccagagcaacatgcaactcccactaggtgacccaaaaatttcattgtggttccactacaaccaagttaaacacgtcaaagtgaatttcttcttcatgttcggacagaagtgcatagctagatcaagataagctagagagcaacccaatagttagatgacttgaacatagccttataaatagcatgcaagcctataggtatatataatttgattggttttcctgaaaatactaaccaaaatactttttttttgtttttatcaatttggttaattattttacatgataatatttccacgttcggtcatcaacttatggttgttgcacccctgacagaatggctgggcagacaccggtggctcttgggtgaaatgagagcaagtcaaccgatcattttcatgaagagatgaattagacggaacaacagagcctcatgggtatgcaacaaataactagttttttttcctaaacaatacatgatttttcattatgacttaaaacctactctagatgggtcaacaatgggattgcatatttctttacttggtctcagaatgaactgaaatgtttctcttttttcatttaactatattagaaagcacatattgtttgacaatggtattagttgcatattgtattttcaaaatttgaagaactaaagaggttgacatactaaaatgctttgcatgaacattactatgacttttacaccttaagctcaaagttgtcttatttgtccagggactcaaacttttgagatatgtatattggcatgaagagaaaaggatacaaatatatgaagcctctgacttgttgggttgttgtatgtgttagttcctggcaatgcagagctagcactgtaaggaaatgactgtgttgaggcaagtgtcaagcactaacttcttccacaacaaccctgtcttccatggtaaccattccgttactccctccttcccaaattgatcatcacactatgaaattcaagatttctcaaattgatcatcatataaccgcatggacacggatttcatcagaataccattaatacaacatggaagaatgtgtgcatgctaaggtgtaattggcatggtgttaatcgatgcatgtattgtgggagaatgtgtgcatggtatcttgattgatgtgatttaaattatcattggtcttggtgcataaacatatatgatgatcaatttgggaaggagggagtatttcttttgctatgtaatgagaaccattgtgtagaattttgtaaacaactttaaccattgcttctctgcatgcaaatgcagatccattcctttccaaaaggattagttaccatttcttttaatttttacacatatgattagcaattgtctataagcattaggaatgagaatcagatgaaactatagacaaactttccaaagtagtatcaatatgtggccaataatgtgctgttccattcattaattttgttatatgtggtactagcatgtgaatactataaagatgtgaaaattataaatatgtgacgtaattattattagttctatattaagattttttgttacagccgatttacactcaatgattatttaacatcatttcacacggttgtattcattttaaaactgtggggtccatctctcagtgaggggcactcctctaaactttcagccaagcactaaagttttcataaattacatataagtcctaggcctaactgtcagtgtctggcgctttgcagaaagaaccccttttaccctaataacaggactaggtccttcttcttcaacctacaggcagctcgataggcagagaggcacaacggctcgggaatggctcgccggcgatgagcggtggaggggatggctcggcctaaggccggggaaggctggagtcggcgagcgccatggccggtggtgccagcggttctagatgacgggcgggcggtgtgccacggtctatggagattcgattaagggataggggatggcctaaggaaggactactaggagacttaccctgtgcagtgctcggttagagttgaggcggtctgaggcggcgtgacgacgagctcccatggcggcagaggtcggtgacggtggtgacatgacggcgctctagagagggggccctataattagttgatgaaatgggttgaagggtctcctagggtcattctggcgcaaggagatggaagggaaatcaccgtggtggagatttgattggcgtgggttggggggcggtgctctgttcggcgcagaccgtggtggtggtgcggccgttcccggctacccagaggggtttgagcttcggctatgcatggtggagaacgagtgtggtgtggggagttagctggcgcgcttgctcaatttataggcgagggaggagccagaggcggatgcggaggctgttgtgacgcgttcggcgccatccatcctaaaataacaaaccaaactctctcaaacaggatccacctcgtgagttcttaaatgcatgagttcttacaaataaataaatataataaaacctcacccctgcggccctacccggctaccctgcgagtgcgagtgcaaggcgagtccgagacggagtccgtctccagcttggtgctggagtcctattcggaattgtaactcgtgtactgttgtacccgttgcaacgcacgggtattttttctagtaaccttaaatattcctgcatgtgttgtagccgccaccgtctgctagcttctggactgtcccatccgccatgttcaccgcgaagaccgccattggcctccccaacggtgtacaccaccgtaccgctcttctcaccgaaccaccggagctcgatcggggtcgtcctcgccggcctgaggtctggtactcggacgtacacagtgcacgtacgtcgtgtctgtactctccatgcatcagtgtcgtctaattgtgtcttcaacgagcagaatacaagctgggacactcggcgagaagtccccacgttgatgtagcgcaactccgtcctgtccgccaacacccccaagtatgcggagaaccggccagtatcccccataccaatgttcaaaatagccggctatagccaccgctatagcgggctatagcgtttgggcagggttggagctaggatagttagccttttgcgctaaacgattttttccgctcatagcggcaattaaccggctaaatccgctaaactgcagatcatttagcgccactcactttgtagtttagctcctgggccaaaatcagagcaggccttgggccttcgccagtggcccaaaggggaggtagaagatcaagccagcaatctgtgttgtctagactgtaatgaaggcatgaaagaacacttaatttgtttcagtccgtgattttttcttgattccatgttcatatgcataattgttgactgatttctgtctggcaattacaaaaccgctaaatagggttagctgggctatagcccgctatagcctttcttagcctccctagatactagccgctaaaagccttagccggctattttgaacattgccccatacgtgtaaggcaccgaacacacgtccatggctgagtccgatagcgcgcgccgacgaacgcctcccagtggaagggccagtaggccacgccgccgccaaggcatggcctagccgggcgcagtatggtttccttcgttccgggccccagctactgtcgtcagacgagtagcaccgcatagccgtgaagccggggcggttgtagatgatgagcaggcggaagaaggagcgcgatggcggcgtgtcgaggtcgtcaccggtgagtattgcgcacacgcgtagtactgtagtagcctggacagtcgccgccggtcatggggttggagacgacgagcgtgaggccgttgctggcgcgggcgcgcgtcgcgccggagctccaatgacgcggccgttgcggccttgcgggacgccactggctgggcgtagtcgagcagcaaggcctcgccgtccgggagctagaacgggcctaggaaccgcgaggcggatgccgccggaaagaagcgcggctgccgcgagctcgaagccgcgagccacttccgcccccacgcgcagcggccgacgtcgttctcctggtggaagcagccaagggcgaggcttgggaggaaccgagtggggaaccgagctggccgcggcagtgcgcgggagattgtagcggcgtacgtgcgtggccacgaacctgccccagctagcggggacacgtcgacgcgaagcgcgcgacgtcggtggcgtcggagaacacgcggtctggcagagtggtcagaagcgcgccgtcgtttcggcctctctggtggcaacgccggcgcgacagccacccgccggtgtacggcgtggcgtcgcgacgtgcgcgggctcgtcgcagcggcggcatgactagctagagcctggagggtttccccaattgtagttgtgcctgctaaaaggatgcgcttcgatcgttaatggatgacgtacgtgcatgttagggtatatatataggccggcatgtcgagtccgaaattgtgacaatttgtgagtgtgtatccataccagcacaacacgtcgactatcacgggtcacggcaccgaatgagcccgacgcagcgaatccggtcttcagctgcgacgctgcggaggattcttttctcttttcattattatcggtcgacgatctcagccgttggatgttgatcaaacgacttccacatcgtcttcttcctctcgcctcttttttctctctctctattttcgttctcctgctagggcaagctcccccatctctcgcctgacaagtggcaactcctgtcctcgattggcaggacatcgctcaatccatgcaccagcaccaccacaccggctatcttacacagcaccgcgccgagcggcgtccccatcaccgtcttatgcccacacctcctccccatcggccgatgtcaactctcctttaagcccatcggatcaaatcctcgccggcagcacccttcccctaaccccaacaatcaaaaacttagtgtcagcaacccggcctgcttaggaagcgcgtgttgtttgttccatattgtatttgcactcgtattcaaatccagtcgcacagaggcgcgtcaagcgtgcgcacgcgcgataggagggaaagcaactaaggaagcggagtccttggcagtcgcatcgtgcagatgatgctgctacggacgaaaatcaaagggtgacggaagtaaaaatactaatcttttaattcttactatcaaaatgcccgtgcttcgcacggtgtattaaaactaaaaatatttgttcttaaccgaagttattttcgcactgcttctgtacttttgctcgctagaaaaagtatcaaatgatagagagaaatatagtagctcataataaattattattctgaagaaagggagataaaaaaagacaaagccggtttgatttccacctttacacgacgcgagtcaacatggactctgaagatataggtagatctatggggtggctcagtagcacgatcgactagcaaatcagcaagcacccttagaccaattgacggccgaacgatgaccgtagcatggtaggtagcagccgcgtctggctgcaacggacgaagactttggtgaatgaggcttgaagtttgatgttataagaactcgaccgggatcataaccatatcagtgtgtactacggccacgagccacacatacggagctgatcagcacaacaataattaatttacggtgctcggacatgaccacaaagctggagatgaggtgtgtgcaatgccgtgatgatgcgtttggagaggtgactccaagatggtggtcggcgtggtgtgtgtgcgcgctgagagtgtaaggagatcattgagttgatcaacgaaatgggaacatggttgtgtgaggcatgtgccgtggctgaattaaagtggtgcacaatattactgccagaagccgatgcccatgggtatgacgcgccaacctaacaagtgctctggttcctacaacaagacgttgatcatgggcaatatatattgataaaatagcatgccacgagttgctacttgatctaatctcctatacaagttttagttaatttgatttgtacggtcgatttagttaatttggatgtagaaggattcaatttggactttggtggaggggaggggctgctgatgggctttggcctagagcttggacgtgagacatattataaacttttgtagagattgattgatctactgggcttggccaaatgaaggaagagggaggctatgtggactttggaaattatttttcgagctgagcggtagaatggtgggtcccacggagatggggttagagcagtgggtcccctggtaggtcccagtcccaccgtttttctctctttccttttcctcttcttatcttctctctcacactttcccttccttctctcgcttttttcttctctctcggctgcttgcaggcaggagagcgccggcagcgatccaaatggcgtaggcaggagggcgccggagggcagggcaccggggtgcgccagggtagagggagggagctccggcacggttggggatgcgacgagagcggctgtgctcggcgggcgcggcaacgataggaccgcggtggctttgggccggcggcgcagcttggttcggcttcggcgatggcgtggtgcgagctcgacgcacgcgtggcgtccaggagccagaaggaggatgggggcggcgtcgggcggctcggcggcgctcgggaaggaagggcgtgacgttggcgggcagatagaagacctccttccccacgccacttcttcgatctagaagtggttagcatcgatctgcaactggtgggcttggtgggcttgcttgctgcacatgattcgtggatgcaccgctattccaattttatttgtgcgattgaattccaattgggattttttcgggggttgattgaattccgattgggatgggatttgggggtgttgtgacggacaaattttattgggtggattggagttcctcatggatccctatgctgattttattagggtggattagaatttgattcctggtttctcccatgaatccgtctactgattttgtttgggtgaattagagtccgattcttcgaaatttctgaatcggacaccggcattgcaggcgcggtgatgaacgacgcggtgatgaatgacggacgaagaagtgacggacgaaaaatcacgtgggtgaaaaagatgtgacgaaaaatcacgcgggtgaaaagatgcgacgaccggaaaaatatattactagcaaaaagtgtccgtgggttgcaacggaaagtgtacagactagaaaattaagaaaaatttaagaaaaatttacattatgtaattaattaaaatacaaatttgctaaaatatttggtatttttaagtaggtaagtgtataattaaatcaatttacaagtaaagccagtgtgagaaataaaatgacattgttaaatttaattttactaaattctccacgattagttacgctctttgaaattttattggaattatcaaagcttaattgctaatgtttaataatacaaacatcatttaacaattatttaattggaaaaagaattaaaatccttcattctaggtttgggccgaatatagaaaagtttatattttctcccttttgtctattcaatgtgcctggcctgtttcctttctccgttgaagtccattttgtgtcctccattcggtggcccaatatgccggcggcatgacgcgggagcagctggagccgtccgatcgaatggacggtctagattaatcctaacctaaataaatacacctaaaccctaaccctaaccctaggattcattctccccctctcccccgcccccaatctcctcgagcggaggcggcggcggcgcccaccaccctccttcccccgagcgactgcggcgacacggagcaacgaccggcgagcggcgcccccctccccctcccccgagcggcgataggcggctatataccaaagccgcaactctagagttcatccgtaagcgcacagatataccattgtagcatttcacccgagagtattccaaggatatcgtatttattttatcccgtgggaagatcatgtagagagaacttgactaataatttatatattacttgtgataatcacattctaagcaggggttaagataatccaagggtagaatgacacacaagcatcaactactcattatcataatatattatctaagctaagtggatggaaaagagaaatataatctattcctatacttctaatatacatagtatacatacattctagttaaccgatatactagctaagaccctctatccgatgccctcctggtacttcgggaagtcacccctgactgccgagttccttacgacagcccgtcatgaccatacaaacgggactaaatacgaagaaataccctccccagggaattaacttaggattatataccggcacggaggaatacccgtactgagctgtcaccatcagcggcccacctctcatccgcaatatataaccccaaataataatatcccgtaagctagacaccacgtctaaactaccagatactactctaatatcatcgtcatgacatagagtaattgcatatgcaaacattatacccgcaccaatgcatctcccagataagctagctgtatattcagtataacaagaacataatgtaaagtaggtacttatatacttggaaagtatttcaataccataaatgtatttagaagagtattctaataaaagtacaaagcttacaaaagagaagagaaaagctactagagccatacccgaactattccgaaggctgtaggatcgaatcacaagaactaagccaaccagatgggggttgaatggttggtatacccaaaaaccgaaaacttttagcggaaataaaagttaccctcgaaatcgatggatcgcggtctgaccgaagtagttgcgccggtctgaccgcctgatgaacgtcagtctgaccgatgtagatcgatcggtcgaaccgccgagaaatcctgccgccgattcctgtcgccgccggtctgaccgccgtgtgcccgccagtcggaccaccgagatgcctccggtctgaccgccggtgcgccgccggttagaccgccgaaacccggtgaaacacaaatcgaagaactcttaaagtggatgacgactttattgattctctctgtgtttacaaagtgcaccaacaacactccttacaaaaatttcgactaaactcgaaaccctaactcaaaacttaactatattgctctcaaaagcgatgccgggaatcctcacgctccctctctatttatacgtgaggtaggtagcctaaagccacgaaccaaactcatactaggagtcctaaacaccttaggaaaccctctagtacaagaaagaaactttacataaccaaacgtaccaaatttggactccttccaaattcgactccgcatcccacacgcacacaataactctatcgtatgccatatggaaactccatcaaccacgtgcatcaactctagcctaagtatcccgcatgatctctgaccaccacggacgtcgtcttatccccaagccgactcccggtccatcaccgcaaatactctcccgagacatcgagtcacctacacatggaacaaacaaagaaaccatattccaagaccaagctatctccaacttgactcattagcagcaaacaatagtattacatacgtatagtatccatctagaagtcataatcatggaataaactcggatatccaaataaacaacacgaaaccgaaaccgacacagtgtcggccggtcagaccgtgggctgaccggtccgaccgctcgatcaccgccggtctgaccggctaccagagcccggtctgaccggtccgcacaaaatgataaaatcctgcagattcatctatgaaatccaatcatctccaaaaccacttgactcattagcagcaaacaatagtattacatacgtatagtatccatctagaagtcataatcatggaataaactcggatatccaaataaacaacacgaaaccgaaaccgacacagtgtcggccggtcagaccgtgggctgaccggtccgaccgctcgatcaccgccggtctgaccggctaccagagcccggtctgaccggtccgcacaaaatgataaaatcctgcagattcatctatgaaatccaatcatctccaaaaccacttcgtgaataaattccaaatatcaaaaccaataatctccaatgcccaattgttcatcatagaataataatcaaaaacacctttgattttacaaaggcttccggactcctgattcctactctattcctattccaccagctagatactagtaaactgaacttgagagaaatgagagagatattgcttgaggtgtgtgagtgaagtgagaaggcgaagtctttttataggcaggtatgacggttgtaaccgctgcaaaatgtctgaagtgccccgcaaccgtcatcaagagaagatctggagcgtcactgccaaccccacatccaaggccagcccaacctagcccaaaatcggcaggtggcctcctccgttgcttcacttcgtagacttgtgaattttggcccaattcatcgtgtcaattctgagttctttgcccattcatgcataagtttaattctcgacaccgtccgattgatttatcgtctatgttgatgtcgattctcctccactttagtgtcattctctgcaaaaggttggtatacataatactagtgtaatattattattctaacatatttatgcattgcaagtatcactagttctcctctattttggtaatattgacggtcaaaactgattgataacaaccatcagcaacatatttcaccaatactagtggatacgattagtaataatccctaccactaagttggataccatattttattccattatatgcaagcattgacggtcagatatcatgatttaagaaccgtcaacacccgcgtcaaacacttggcgagcgtgcagacggactttgtcttcatcgagaagaagacgcattacatttgggccctcctataagactcacaacttacatgtcatcccttttaacataaagactccacctagtagagagttatactcttttttattagcattagtgtaatttcttgccttgccctatccctctcgcccaggcgcccaccctttgacctcctataagactcacatcttatatgtcatcccttttaacagaaagaccccaaatttcatgccttgccctatccctcccgcccaggcgcccacccctctctttctattgctctcgtgttgctctttgtcctctccaatcatggatgatctcaaccattactagactatttcttagcagaggattttgccatgccttgcataccgcaagctttttttaggtttgtgtatattgctgcccaaaccacgccgttgcccatcaccctgacacaaatacggttttggtcgaaggattgatcaaactatcctctattttttcctctctatgcgccatcttttggattaacattgctccatgcgctatctttattggatttatattttatttatttatttatttttgcttgttcacatctagtcatgatggagagttttcccgcccttacgcaccaacgggatgagtatgactgtaaccacgttcagagtaccaaaaatgatgcaagatgttccggagggatatgccgaatagatcattgtccgtgtttgagccttatttgatggacttagatggttcttgtgtgcgatttattgattgaactctgagtcctcatttttagatggacttagacgattttttttgttatgattcttgtgtggaatttcctcatacgaggaaaacttgtgtcgttgcagcactgggttttgtatagtgcgttaccaagatttactgtctcacatggttttatttgtatttggtttggatcagtggcaggtttggattagtggcatagggaggggagaagggagaggcctggtctcccataacaaaataaaattgtaattatcaaatatatctacttaatcatcacatgattaaattagcagtaagtgttttaatcccctatagtgacagaaaatccaacacccctctagtgacaggaaatccttctaatattggaagataattggctgtgttttaatccctctagtgatatagtgtatatggatgagcatggaacactggaataatcacgttttatggtcgaatcatgagtttgattactaatgcgataactgcgttaatatacctacttcctcgcaaagtttggatcaaagtgcctaattccctacttaatttcttccatgatttggttgatgtctgctgaattccgttgtgtgacatgagagcgtgactaaattatgtttgctgtttttttaggtatcggcagtacaacacggtcgaaggtggcaattgtcaacgtaaattttaatcaacttttgtgtggagtttttcgagccagcactccttgaaatatatgtcccaccacccagttgaataggaaattaacttttagagataactaattttaaactatataatataacataatatatacttatacatagtgaaagtcataaatcagttgaacaatatttatagcgcactatgatcatcagatttacaacaaatgttacttaccaattatatatatattagttaagagcattctagatgatatttaagaaaaaatatctctcaaattctaaaatctaattaatcaacttggaagcatacagtgtaattaatatgtcacggtaattactactaactcctgtaaaaattacaaataatataatacaaagcatgggcacacaaaccaactggcagtgtttattggctaaagctatcagtatcatcatcaataataaagaaaaatgagataacaaggagatggaagagtggaagaataccatgagaaaatttcatttttatcctacattgtgctaaggaacaaattcgcgttaaaaaatatgaaaatttaataatattagtaaatcattgatgagtatattatacaatgtctttctgaaatatatgacatccagccagggagtgtgagcttgtcatgtgagttgggcacctctttttgctgggagcctctctttattgcgattcaaagtgcttaggttgaggtagttctctatctactgcccctgtaacatactatatttttcagggtaatttttttacgaaaatctttaaagtcgttgttctttgttctttcgaattgaagcctcccaatccttacattccttttgtttccttttaattttccaactccctcgtaacttcgtttagttttccctccaaaccaaatccaagatatcacaaaaaaaaattcccaaaaccatccgaagagctcgtgtttatttttaagttctcgtgtttatttttaagttagcccgaagtcatcatgcaaatattctaagatccccaatcccaaagattcctattcggaaatattttacaagaattcgattaaaaaatctcttcaaaaatttaaatagatcactatgattctcctcaggccgaattctttgcaatctagcccatattcccaatttactttccattgctcctctgtattgggctgttctaacccatctcccgcacaaccacccagctagcagcccattgccgttgctggccgagcctccaactgacacgctgctcgtttcgctcgctccagccaccgctcgcgttacgcgcgtttcgcctcgcacctccctgcgccttgcttgcgcccgctgcccgcatgcgcttggcccgcgctagccgcgtgccgcctcgcacctgcctgctctgctccgcgtgccgccacgcgcacgacacacgcgcttgaagtcgctcgaaggaactcgatcagatggtgccgacgttgtcgcacaaatcttaaaaccgagcaagcaccactgctaccgtcaatctcccgctgcccaactatttaagcaggcaaggtagctgtgctcatccttttcccaaatcactttctgtcttcaatttcttcaagccacgctgccgtggtcatccgccgatccgccgccgcaggccaccgatcgtcgtctgctcgcaccaccagcctctttgttgcttcctgcttctgcaaaattgaccatgcatccatccaattataggccatgtgaattaaatcagtgggatcatttggaagttttttctcaaagcaagctttatttctacatttccatttagaccatatcacaacagcaatcccaaccacaatgagattttttatgaatttgtcagcattcttaatctaggaaccaaacagttcatgcctgttcaaaacaggtttcaaatttagagcacaagaaataatcttccaaatcaatctagccgtgggacaagcaaagaaaaagtgttgaattgtttcttccttatcacaaaactgacatttattatcacctttcctccagcccctcttgaaaagattgtcattttgtcaagattttattattggtaaagagccaaagaaacactttgattttcaaaggtacttttgaacttccagatttttttatgagggtaattcacttgcttaattttaagtgcattacagaaagatttcacagtgaatttcccatctttggacaaggtccatcagagtttgtctctacaattttctttcaaattcaactcttcccagttgtgtataatttttctccaatatctcagtttggctccatacagatcccttctgaattttatagaaccaataccttttttgttcaagtcagcaatggtgatcttttttttttttgtcaaggctatgttatgaatctcagggaattgcaaggccaaaggtctaccacctatccagctatcttcccaaaaaaaaaagaagaatattttctctatttcccacttttttattcacagactgaagaaaacatctttcacctctataatccattgccaaaaatgtgaattaccaggtttgagtttcagaccagatagtggtttgtttttgtaatatttctcaataatgatctcttgccaccaaccctcttcattctctaatttccagatccactttcccagcaaagctttgttcattgcttacaaatcaatcaccccaagacctccttagtctctgggtgaacaaactaggggccaattaactagatggtactttctaataccttgatcttcttgccatagaaatctttttctgaagtaatccattctatctttcaccccttttggcagttcataaaaagagagcatgtacataggaacactacttaaacttgaattaagcagcaccagccttcctccaatagattgcagcttacctggccagcaacccaatttatgctccattttgttctcagccaccttccagtccttgtttagtattcttttttggtcaatgggaatatccaaatatttcagaggtaaatcaaccacattgcaggtgaaaatattgctatatacatgttgtttttccttagcttcccaaagcaaaaaaaaaaaaaaacctcactttatcttaagtccagcaagttgctcaaacagacacaagatgtacttcaaattttttgcatgctccagattatcatcaataaggaaaattgtgtcatctgcatattgcaagata

SEQ ID NO: 6914 - DNA, 19901 bp, Oryza sativa
  unsure (1)..(19901): unsure at all n locations
tccgaaaagcaacaacccttgatcatatcgtaactctatcagaaaagtctgagcagctaaagaacaaaacgcctgaacatataacggaatataagaagagcttgtacaagaccaagtttcttactgtgacacaatatattggatacgcattcctaagatttcaaaaaaaaaaaaagagtcataatgaccgcatacaactttaagtaagtctgataaatttcaatgtatatatctgtatttttttggtttgtgactaattgaaccgtcatagcgatcattacatatgtttattgctctacctgaagtacggaccgataccgtcttggacccccttgattataatcacatgtcgtgcagccaattcctaaaaatctgtcggcacccagggattgaattcccgaatacctggagcgtacactgtactagtcccatgatcagtgcgtagtacacgcatccacaatatatattgttaccacatccataccatgtacatggcacacaagtaaaaaaaatgtagctcttataacttagcagtgtaagagtcatgcaaagtggttaggccaactgaccactgaaatgagtttaaaacgcagcggaaaagatacataaattgttcagtatacccatctaccaaatgacacaggcaaccgactaataatcaccctagaaagaactatccaaggaaacgtcggttagcagcgcaaacacccgattcctgtaaacaagactaaaaacaacaatgagcggtgggtcaatacacgaggtactggcaagtcctacccaaaccttgggaaacctaggactattgcaagctgagatcaaaatgagcggtgggtcaatacacgggggaatttactatttgctactctctcaaaatgccagtgctcaaatgccactctcccaaattttcattcccaaatgccacccaggcccacatgtcagcctcactcggtcatggggtcccgcatcacttttgtttgaatggagagtgaggctgacatgtgggtccggatggcatttgggaatgaaaatttgggagagtggcatttgagcactggcattttgagagagtggcaaatagtaaattctccccaaagatggctatatttgtagctcattttcagtgtaaaacaatttttgtttcgcaatataaatataacatattgaaacggaatttttaaatcaaagagtaaagcataataatagtaatataagtatcatcatatcatccttgtgccccctccatggtagcaagtaatcattatattatcagcccacaccaggcaaaatcatcaccattattcaccatacccatatcgcaattcatttaacaaatcaccaacactatacttgtatcatttcaccaagtcgctcatgaccgtgagcaccggctaatcgattagttttaaactctgcagagtttgtacaactttacccacatgatgtgatagaagccaaaaggctacactctagttgtttcggtacccgtcggtaacccacactctacacattgagcacggtctagaggtcacaacgaagccgttacattgcgtaaagtctagccttgcatgagcatggagagtgtttctccacattggccatgaaccaatgccgctaggaaaggtgggccccatcctaatactaatgttgtaacacatctattccctcaacaaggcactatccattatattggatatgcttagatgcccatgccatatggagaacacgatcgttcccatagagggtcacatgggtagctcctatgagctatcgctcagactagtccctactacaacggccttccaatgcaatgctaaacagtaaacaacttagtaagccaaggttgccccataaccgacagatgtggttgcacggtaagcttagttggtgacacatagttcggtccttaattgactcgggcgaacactccccctatcagcgtagaactatcaccatatgcacaccacttgccgcccaagtttgaaatcatcattttcagtttccaattttcacataataacagaggcaaccgctctgtacaacattttaaaataacccatttgaaagagttaatatcatgtcatttataaccatagcaaattttctaagcatggctaagcaatagctatagtagtagctcgaatatacccatattggtgcttggataggaccacaacccatcctaggtccatcaacaatagggtgatcaataatcaaggtggataatgcaacaattaggagttgttctaccaaagtcccacatttttgcaaacaccgcatgcaattttaaacataataaagcatttgcgaaaatatatgattcaacatgatcgaaggaggaattgatctaatagtacttgcttgctcaagagttactcgaatatttcttgatcctgcacactcccatcaacggcaacaatcgatctgtcctctatttaaatttaaacctatattcaaatgaaaatccaataaaactccaagataaaatatcatgcacggtgcatgaacatgttcagtgtatagatgatggtttaatataaatttaggagaaagattcgcctaaatccgatgttgaatgtgcaagttatcacgtttctaagatattaaaatacggtacgtactattcgaatttaaattagtgaatttttttacaacagtgattctaagtttgagtgtgcagtattaaaaagagagttggaaactaacaaaatctggttcacctcaatcggagctaaaatgaattttctatgattttccaaattttcagcattttatagtgcataaataattaacagaaaatcttttctcagatttaataatttgtttataaaagaaactaaagggcactgcttgaagtacgttttcctatagggaagagaagacgcatttctgttctgtatatctctactctacttttatttaaaaaattcgtagtggtgatggtgaagcacatattttcccgacatgcgatccaacataatgtacatcgacacgcttcagagcggcacactactcctccgcatccctctgcaccacccacgcgcgattcctacggattgctcgcaatccgcaatcagcgggaaaaaaaaacacgctagcgccgccccacatcgccgcgccgttcccccttcgccacggttcatcctcctcgtcgcgagtcccctcggcctccgcaatacgccggggaaccacacctccttcccgtcccgcacctcctcctagatcgccgcaccgataccgcgtcctccaccgtcgctgaatcccttttgccgcgcgcccatcattggatcgagcgttgtcgtcatatccacctccaccgttgtggagtcccccgccccacatccccgtccccggcgtttctccaccccgcatcacctgccgtcgacgctcatcgtttaatctgctcctttccgccaccgccagcgcccggatccacgcctgcccagatcacgctgccgacgccactccccgatctcaactgaccaatgtcgtgcccttacccccagcgccacatcccaccctctcctccccttttggccttcgaggcttcgcttcggtcccacaccgacacgaggtaccgcggctgcagcgccactgctgttttctcagctatgatttgggatcctgtgtgcaaggagtggctgattactccatcctcaatttgttgatttagactttggaggcttggtctgctttgctttgttatttaatttgctgttccttatttttttaaatagatccattcctgttcagaggaggcatacggggcagaatattgttcattcatagagaggcataatgcacagttaatttcaatcactttccattttcactgtaagttttaagttgttccagaaaggccatgatgatattactattagaatgttagattaaaaatgcatgcccagtagatgtttttattaaatgcctctgaaacaatctggatgtgatttcagcatacgtttgtgcaaacagaccctttaatttgattgtctaacagtatcaaatgatgatttttcaagaaaatccactgaggaattttcataatttatttgcaatccacagatgaaattgtactcttcaatctttataacaactaactataatcttttgcccaggggtatttcaatccttacactaatctatttactgtcaattagagaatgtaccaaaagaatttttgtttttgttatcaaatgttgcacatttgatgataatctatatttcttaatactgtctgcaccttttgtttgcaagctccaaattctataaaaaaaaaaccttgactgcaagcttgtttacaattgtttggccagcacagtaggagcagggtctgatcgggtgctccctgtgcataactgctattggttcactgctgttccaaagtgagcaatagtaatttggaatgaaaatataccaatataagaggtttccagcctcgatattcagatgttcataatatatctgaccaaagtagagacaagtttcaggttcatatatctgatcaaagtagtgcccttgccaaattcagttccagagcaacatgcaactcccactaggtgacccaaaaatttcattgtggttccactacaaccaagttaaacacgtcaaagtgaatttcttcttcatgttcggacagaagtgcatagctagatcaagataagctagagagcaacccaatagttagatgacttgaacatagccttataaatagcatgcaagcctataggtatatataatttgattggttttcctgaaaatactaaccaaaatactttttttttgtttttatcaatttggttaattattttacatgataatatttccacgttcggtcatcaacttatggttgttgcacccctgacagaatggctgggcagacaccggtggctcttgggtgaaatgagagcaagtcaaccgatcattttcatgaagagatgaattagacggaacaacagagcctcatgggtatgcaacaaataactagttttttttcctaaacaatacatgatttttcattatgacttaaaacctactctagatgggtcaacaatgggattgcatatttctttacttggtctcagaatgaactgaaatgtttctcttttttcatttaactatattagaaagcacatattgtttgacaatggtattagttgcatattgtattttcaaaatttgaagaactaaagaggttgacatactaaaatgctttgcatgaacattactatgacttttacaccttaagctcaaagttgtcttatttgtccagggactcaaacttttgagatatgtatattggcatgaagagaaaaggatacaaatatatgaagcctctgacttgttgggttgttgtatgtgttagttcctggcaatgcagagctagcactgtaaggaaatgactgtgttgaggcaagtgtcaagcactaacttcttccacaacaaccctgtcttccatggtaaccattccgttactccctccttcccaaattgatcatcacactatgaaattcaagatttctcaaattgatcatcatataaccgcatggacacggatttcatcagaataccattaatacaacatggaagaatgtgtgcatgctaaggtgtaattggcatggtgttaatcgatgcatgtattgtgggagaatgtgtgcatggtatcttgattgatgtgatttaaattatcattggtcttggtgcataaacatatatgatgatcaatttgggaaggagggagtatttcttttgctatgtaatgagaaccattgtgtagaattttgtaaacaactttaaccattgcttctctgcatgcaaatgcagatccattcctttccaaaaggattagttaccatttcttttaatttttacacatatgattagcaattgtctataagcattaggaatgagaatcagatgaaactatagacaaactttccaaagtagtatcaatatgtggccaataatgtgctgttccattcattaattttgttatatgtggtactagcatgtgaatactataaagatgtgaaaattataaatatgtgacgtaattattattagttctatattaagattttttgttacagccgatttacactcaatgattatttaacatcatttcacacggttgtattcattttaaaactgtggggtccatctctcagtgaggggcactcctctaaactttcagccaagcactaaagttttcataaattacatataagtcctaggcctaactgtcagtgtctggcgctttgcagaaagaaccccttttaccctaataacaggactaggtccttcttcttcaacctacaggcagctcgataggcagagaggcacaacggctcgggaatggctcgccggcgatgagcggtggaggggatggctcggcctaaggccggggaaggctggagtcggcgagcgccatggccggtggtgccagcggttctagatgacgggcgggcggtgtgccacggtctatggagattcgattaagggataggggatggcctaaggaaggactactaggagacttaccctgtgcagtgctcggttagagttgaggcggtctgaggcggcgtgacgacgagctcccatggcggcagaggtcggtgacggtggtgacatgacggcgctctagagagggggccctataattagttgatgaaatgggttgaagggtctcctagggtcattctggcgcaaggagatggaagggaaatcaccgtggtggagatttgattggcgtgggttggggggcggtgctctgttcggcgcagaccgtggtggtggtgcggccgttcccggctacccagaggggtttgagcttcggctatgcatggtggagaacgagtgtggtgtggggagttagctggcgcgcttgctcaatttataggcgagggaggagccagaggcggatgcggaggctgttgtgacgcgttcggcgccatccatcctaaaataacaaaccaaactctctcaaacaggatccacctcgtgagttcttaaatgcatgagttcttacaaataaataaatataataaaacctcacccctgcggccctacccggctaccctgcgagtgcgagtgcaaggcgagtccgagacggagtccgtctccagcttggtgctggagtcctattcggaattgtaactcgtgtactgttgtacccgttgcaacgcacgggtattttttctagtaaccttaaatattcctgcatgtgttgtagccgccaccgtctgctagcttctggactgtcccatccgccatgttcaccgcgaagaccgccattggcctccccaacggtgtacaccaccgtaccgctcttctcaccgaaccaccggagctcgatcggggtcgtcctcgccggcctgaggtctggtactcggacgtacacagtgcacgtacgtcgtgtctgtactctccatgcatcagtgtcgtctaattgtgtcttcaacgagcagaatacaagctgggacactcggcgagaagtccccacgttgatgtagcgcaactccgtcctgtccgccaacacccccaagtatgcggagaaccggccagtatcccccataccaatgttcaaaatagccggctatagccaccgctatagcgggctatagcgtttgggcagggttggagctaggatagttagccttttgcgctaaacgattttttccgctcatagcggcaattaaccggctaaatccgctaaactgcagatcatttagcgccactcactttgtagtttagctcctgggccaaaatcagagcaggccttgggccttcgccagtggcccaaaggggaggtagaagatcaagccagcaatctgtgttgtctagactgtaatgaaggcatgaaagaacacttaatttgtttcagtccgtgattttttcttgattccatgttcatatgcataattgttgactgatttctgtctggcaattacaaaaccgctaaatagggttagctgggctatagcccgctatagcctttcttagcctccctagatactagccgctaaaagccttagccggctattttgaacattgccccatacgtgtaaggcaccgaacacacgtccatggctgagtccgatagcgcgcgccgacgaacgcctcccagtggaagggccagtaggccacgccgccgccaaggcatggcctagccgggcgcagtatggtttccttcgttccgggccccagctactgtcgtcagacgagtagcaccgcatagccgtgaagccggggcggttgtagatgatgagcaggcggaagaaggagcgcgatggcggcgtgtcgaggtcgtcaccggtgagtattgcgcacacgcgtagtactgtagtagcctggacagtcgccgccggtcatggggttggagacgacgagcgtgaggccgttgctggcgcgggcgcgcgtcgcgccggagctccaatgacgcggccgttgcggccttgcgggacgccactggctgggcgtagtcgagcagcaaggcctcgccgtccgggagctagaacgggcctaggaaccgcgaggcggatgccgccggaaagaagcgcggctgccgcgagctcgaagccgcgagccacttccgcccccacgcgcagcggccgacgtcgttctcctggtggaagcagccaagggcgaggcttgggaggaaccgagtggggaaccgagctggccgcggcagtgcgcgggagattgtagcggcgtacgtgcgtggccacgaacctgccccagctagcggggacacgtcgacgcgaagcgcgcgacgtcggtggcgtcggagaacacgcggtctggcagagtggtcagaagcgcgccgtcgtttcggcctctctggtggcaacgccggcgcgacagccacccgccggtgtacggcgtggcgtcgcgacgtgcgcgggctcgtcgcagcggcggcatgactagctagagcctggagggtttccccaattgtagttgtgcctgctaaaaggatgcgcttcgatcgttaatggatgacgtacgtgcatgttagggtatatatataggccggcatgtcgagtccgaaattgtgacaatttgtgagtgtgtatccataccagcacaacacgtcgactatcacgggtcacggcaccgaatgagcccgacgcagcgaatccggtcttcagctgcgacgctgcggaggattcttttctcttttcattattatcggtcgacgatctcagccgttggatgttgatcaaacgacttccacatcgtcttcttcctctcgcctcttttttctctctctctattttcgttctcctgctagggcaagctcccccatctctcgcctgacaagtggcaactcctgtcctcgattggcaggacatcgctcaatccatgcaccagcaccaccacaccggctatcttacacagcaccgcgccgagcggcgtccccatcaccgtcttatgcccacacctcctccccatcggccgatgtcaactctcctttaagcccatcggatcaaatcctcgccggcagcacccttcccctaaccccaacaatcaaaaacttagtgtcagcaacccggcctgcttaggaagcgcgtgttgtttgttccatattgtatttgcactcgtattcaaatccagtcgcacagaggcgcgtcaagcgtgcgcacgcgcgataggagggaaagcaactaaggaagcggagtccttggcagtcgcatcgtgcagatgatgctgctacggacgaaaatcaaagggtgacggaagtaaaaatactaatcttttaattcttactatcaaaatgcccgtgcttcgcacggtgtattaaaactaaaaatatttgttcttaaccgaagttattttcgcactgcttctgtacttttgctcgctagaaaaagtatcaaatgatagagagaaatatagtagctcataataaattattattctgaagaaagggagataaaaaaagacaaagccggtttgatttccacctttacacgacgcgagtcaacatggactctgaagatataggtagatctatggggtggctcagtagcacgatcgactagcaaatcagcaagcacccttagaccaattgacggccgaacgatgaccgtagcatggtaggtagcagccgcgtctggctgcaacggacgaagactttggtgaatgaggcttgaagtttgatgttataagaactcgaccgggatcataaccatatcagtgtgtactacggccacgagccacacatacggagctgatcagcacaacaataattaatttacggtgctcggacatgaccacaaagctggagatgaggtgtgtgcaatgccgtgatgatgcgtttggagaggtgactccaagatggtggtcggcgtggtgtgtgtgcgcgctgagagtgtaaggagatcattgagttgatcaacgaaatgggaacatggttgtgtgaggcatgtgccgtggctgaattaaagtggtgcacaatattactgccagaagccgatgcccatgggtatgacgcgccaacctaacaagtgctctggttcctacaacaagacgttgatcatgggcaatatatattgataaaatagcatgccacgagttgctacttgatctaatctcctatacaagttttagttaatttgatttgtacggtcgatttagttaatttggatgtagaaggattcaatttggactttggtggaggggaggggctgctgatgggctttggcctagagcttggacgtgagacatattataaacttttgtagagattgattgatctactgggcttggccaaatgaaggaagagggaggctatgtggactttggaaattatttttcgagctgagcggtagaatggtgggtcccacggagatggggttagagcagtgggtcccctggtaggtcccagtcccaccgtttttctctctttccttttcctcttcttatcttctctctcacactttcccttccttctctcgcttttttcttctctctcggctgcttgcaggcaggagagcgccggcagcgatccaaatggcgtaggcaggagggcgccggagggcagggcaccggggtgcgccagggtagagggagggagctccggcacggttggggatgcgacgagagcggctgtgctcggcgggcgcggcaacgataggaccgcggtggctttgggccggcggcgcagcttggttcggcttcggcgatggcgtggtgcgagctcgacgcacgcgtggcgtccaggagccagaaggaggatgggggcggcgtcgggcggctcggcggcgctcgggaaggaagggcgtgacgttggcgggcagatagaagacctccttccccacgccacttcttcgatctagaagtggttagcatcgatctgcaactggtgggcttggtgggcttgcttgctgcacatgattcgtggatgcaccgctattccaattttatttgtgcgattgaattccaattgggattttttcgggggttgattgaattccgattgggatgggatttgggggtgttgtgacggacaaattttattgggtggattggagttcctcatggatccctatgctgattttattagggtggattagaatttgattcctggtttctcccatgaatccgtctactgattttgtttgggtgaattagagtccgattcttcgaaatttctgaatcggacaccggcattgcaggcgcggtgatgaacgacgcggtgatgaatgacggacgaagaagtgacggacgaaaaatcacgtgggtgaaaaagatgtgacgaaaaatcacgcgggtgaaaagatgcgacgaccggaaaaatatattactagcaaaaagtgtccgtgggttgcaacggaaagtgtacagactagaaaattaagaaaaatttaagaaaaatttacattatgtaattaattaaaatacaaatttgctaaaatatttggtatttttaagtaggtaagtgtataattaaatcaatttacaagtaaagccagtgtgagaaataaaatgacattgttaaatttaattttactaaattctccacgattagttacgctctttgaaattttattggaattatcaaagcttaattgctaatgtttaataatacaaacatcatttaacaattatttaattggaaaaagaattaaaatccttcattctaggtttgggccgaatatagaaaagtttatattttctcccttttgtctattcaatgtgcctggcctgtttcctttttccgttgaagtccattttgtgtcctccattcggtggcccaatatgccggcggcatgacccgggagcagctggagccgtccgatcgaatggacggtctagattaatcctaacctaaataaatacacctaaaccctaaccctaaccctaggattcatttttcccctttcccccgcccccaatctcctcgagcggaggcggcggcggcgcccaccaccctccttcccccgagcgactgcggcgacacggagcaacgaccggcgagcggcgcccccctccccctcccccgagcggcgataggcggctatataccaaagccgcaactctagagttcatccgtaagcgcacagatataccattgtagcatttcacccgagagtattccaaggatatcgtatttattttatcccgtgggaagatcatgtagagagaacttgactaataatttatatattacttgtgataatcacattctaagcaggggttaagataatccaagggtagaatgacacacaagcatcaactactcattatcataatatattatctaagctaagtggatggaaaagagaaatataatctattcctatacttctaatatacatagtatacatacattctagttaaccgatatactagctaagaccctctatccgatgccctcctggtacttcgggaagtcacccctgactgccgagttccttacgacagcccgtcatgaccatacaaacgggactaaatacgaagaaataccctccccagggaattaacttaggattatataccggcacggaggaatacccgtactgagctgtcaccatcagcggcccacctctcatccgcaatatataaccccaaataataatatcccgtaagctagacaccacgtctaaactaccagatactactctaatatcatcgtcatgacatagagtaattgcatatgcaaacattatacccgcaccaatgcatctcccagataagctagctgtatattcagtataacaagaacataatgtaaagtaggtacttatatacttggaaagtatttcaataccataaatgtatttagaagagtattctaataaaagtacaaagcttacaaaagagaagagaaaagctactagagccatacccgaactattccgaaggctgtaggatcgaatcacaagaactaagccaaccagatgggggttgaatggttggtatacccaaaaaccgaaaacttttagcggaaataaaagttaccctcgaaatcgatggatcgcggtctgaccgaagtagttgcgccggtctgaccgcctgatgaacgtcagtctgaccgatgtagatcgatcggtcgaaccgccgagaaatcctgccgccgattcctgtcgccgccggtctgaccgccgtgtgcccgccagtcggaccaccgagatgcctccggtctgaccgccggtgcgccgccggttagaccgccgaaacccggtgaaacacaaatcgaagaactcttaaagtggatgacgactttattgattctctctgtgtttacaaagtgcaccaacaacactccttacaaaaatttcgactaaactcgaaaccctaactcaaaacttaactatattgctctcaaaagcgatgccgggaatcctcacgctccctctctatttatacgtgaggtaggtagcctaaagccacgaaccaaactcatactaggagtcctaaacaccttaggaaaccctctagtacaagaaagaaactttacataaccaaacgtaccaaatttggactccttccaaattcgactccgcatcccacacgcacacaataactctatcgtatgccatatggaaactccatcaaccacgtgcatcaactctagcctaagtatcccgcatgatctctgaccaccacggacgtcgtcttatccccaagccgactcccggtccatcaccgcaaatactctcccgagacatcgagtcacctacacatggaacaaacaaagaaaccatattccaagaccaagctatctccaacttgactcattagcagcaaacaatagtattacatacgtatagtatccatctagaagtcataatcatggaataaactcggatatccaaataaacaacacgaaaccgaaaccgacacagtgtcggccggtcagaccgtgggctgaccggtccgaccgctcgatcaccgccggtctgaccggctaccagagcccggtctgaccggtccgcacaaaatgataaaatcctgcagattcatctatgaaatccaatcatctccaaaaccacttcgtgaataaattccaaatatcaaaaccaataatctccaatgcccaattgttcatcatagaataataatcaaaaacacctttgattttacaaaggcttccggactcctgattcctactctattcctattccaccagctagatactagtaaactgaacttgagagaaatgagagagatattgcttgaggtgtgtgagtgaagtgagaaggcgaagtctttttataggcaggtatgacggttgtaaccgctgcaaaatgtctgaagtgccccgcaaccgtcatcaagagaagatctggagcgtcactgccaaccccacatccaaggccagcccaacctagcccaaaatcggcaggtggcctcctccgttgcttcacttcgtagacttgtgaattttggcccaattcatcgtgtcaattctgagttctttgcccattcatgcataagtttaattctcgacaccgtccgattgatttatcgtctatgttgatgtcgattctcctccactttagtgtcattctctgcaaaaggttggtatacataatactagtgtaatattattattctaacatatttatgcattgcaagtatcactagttctcctctattttggtaatattgacggtcaaaactgattgataacaaccatcagcaacatatttcaccaatactagtggatacgattagtaataatccctaccactaagttggataccatattttattccattatatgcaagcattgacggtcagatatcatgatttaagaaccgtcaacacccgcgtcaaacacttggcgagcgtgcagacggactttgtcttcatcgagaagaagacgcattacatttgggccctcctataagactcacaacttacatgtcatcccttttaacataaagactccacctagtagagagttatactcttttttattagcattagtgtaatttcttgccttgccctatccctctcgcccaggcgcccaccctttgacctcctataagactcacatcttatatgtcatcccttttaacagaaagaccccaaatttcatgccttgccctatccctcccgcccaggcgcccacccctctctttctattgctctcgtgttgctctttgtcctctccaatcatggatgatctcaaccattactagactatttcttagcagaggattttgccatgccttgcataccgcaagctttttttaggtttgtgtatattgctgcccaaaccacgccgttgcccatcaccctgacacaaatacggttttggtcgaaggattgatcaaactatcctctattttttcctctctatgcgccatcttttggattaacattgctccatgcgctatctttattggatttatattttatttatttatttatttttgcttgttcacatctagtcatgatggagagttttcccgcccttacgcaccaacgggatgagtatgactgtaaccacgttcagagtaccaaaaatgatgcaagatgttccggagggatatgccgaatagatcattgtccgtgtttgagccttatttgatggacttagatggttcttgtgtgcgatttattgattgaactctgagtcctcatttttagatggacttagacgattttttttgttatgattcttgtgtggaatttcctcatacgaggaaaacttgtgtcgttgcagcactgggttttgtatagtgcgttaccaagatttactgtctcacatggttttatttgtatttggtttggatcagtggcaggtttggattagtggcatagggaggggagaagggagaggcctggtctcccataacaaaataaaattgtaattatcaaatatatctacttaatcatcacatgattaaattagcagtaagtgttttaatcccctatagtgacagaaaatccaacacccctctagtgacaggaaatccttctaatattggaagataattggctgtgttttaatccctctagtgatatagtgtatatggatgagcatggaacactggaataatcacgttttatggtcgaatcatgagtttgattactaatgcgataactgcgttaatatacctacttcctcgcaaagtttggatcaaagtgcctaattccctacttaatttcttccatgatttggttgatgtctgctgaattccgttgtgtgacatgagagcgtgactaaattatgtttgctgtttttttaggtatcggcagtacaacacggtcgaaggtggcaattgtcaacgtaaattttaatcaacttttgtgtggagtttttcgagccagcactccttgaaatatatgtcccaccacccagttgaataggaaattaacttttagagataactaattttaaactatataatataacataatatatacttatacatagtgaaagtcataaatcagttgaacaatatttatagcgcactatgatcatcagatttacaacaaatgttacttaccaattatatatatattagttaagagcattctagatgatatttaagaaaaaatatctctcaaattctaaaatctaattaatcaacttggaagcatacagtgtaattaatatgtcacggtaattactactaactcctgtaaaaattacaaataatataatacaaagcatgggcacacaaaccaactggcagtgtttattggctaaagctatcagtatcatcatcaataataaagaaaaatgagataacaaggagatggaagagtggaagaataccatgagaaaatttcatttttatcctacattgtgctaaggaacaaattcgcgttaaaaaatatgaaaatttaataatattagtaaatcattgatgagtatattatacaatgtctttctgaaatatatgacatccagccagggagtgtgagcttgtcatgtgagttgggcacctctttttgctgggagcctctctttattgcgattcaaagtgcttaggttgaggtagttctctatctactgcccctgtaacatactatatttttcagggtaatttttttacgaaaatctttaaagtcgttgttctttgttctttcgaattgaagcctcccaatccttacattccttttgtttccttttaattttccaactccctcgtaacttcgtttagttttccctccaaaccaaatccaagatatcacaaaaaaaaattcccaaaaccatccgaagagctcgtgtttatttttaagttctcgtgtttatttttaagttagcccgaagtcatcatgcaaatattctaagatccccaatcccaaagattcctattcggaaatattttacaagaattcgattaaaaaatctcttcaaaaatttaaatagatcactatgattctcctcaggccgaattctttgcaatctagcccatattcccaatttactttccattgctcctctgtattgggctgttctaacccatctcccgcacaaccacccagctagcagcccattgccgttgctggccgagcctccaactgacacgctgctcgtttcgctcgctccagccaccgctcgcgttacgcgcgtttcgcctcgcacctccctgcgccttgcttgcgcccgctgcccgcatgcgcttggcccgcgctagccgcgtgccgcctcgcacctgcctgctctgctccgcgtgccgccacgcgcacgacacacgcgcttgaagtcgctcgaaggaactcgatcagatggtgccgacgttgtcgcacaaatcttaaaaccgagcaagcaccactgctaccgtcaatctcccgctgcccaactatntaagcaggcaaggtagctgtgctcatccttttccaaatcactttctgtcttcaatttcttcaagccacgctgccgtggtcatccgcggatccgccgccgcaggccaccgatcgtcgtctgctcgcaccaccagcctctttgttgcttcctgcttctgcaaaattgaccatgcatccatccaattataggccatgtgaattaaatcagtgggatcatttggaagttttttctcaaagcaagctttatttctacatttccatttagaccatatcacaacagcaatcccaaccacaatgagattttttatgaatttgtcagcattcttaatctaggaaccaaacagttcatgcctgttcaaaacaggtttcaaatttagagcacaagaaataatcttccaaatcaatctagccgtgggacaagcaaagaaaaagtgttgaattgtttcttccttatcacaaaactgacatttattatcacctttcctccagcccctcttgaaaagattgtcattttgtcaagattttattattggtaaagagccaaagaaacactttgattttcaaaggtacttttgaacttccagatttttttatgagggtaattcacttgcttaattttaagtgcattacagaaagatttcacagtgaatttcccatctttggacaaggtccatcagagtttgtctcaacaattttctttaaaattcaactcttcccagttgtgtataatttttctccaatatctcagtttggctccagacagatcccttttgagttttatagagccaacaccttttttgttcaagtcagcaatggtgatctttttttttttttgtcaagggtatgttatgaatctcagggaattgcaaggccaaaggtctaccacctatccagctatcttcccaaaaaaaaaagaagaatattttctctatttcccacttttttattcacagactgaagaaaacatctttcacctctataatccattgccaaaaatgtgaattaccaggtttgagtttcagaccagatagtggtttgtttttgtaatatttctcaataatgatctcttgccaccaaccctcttcattctctaatttccagatccactttcccagcaaagctttgttcattgcttacaaatcaatcaccccaagacctccttagtctctgggtgaacaaactaggggccaattaactagatggtactttctaataccttgatcttcttgccatagaaatctttttctgaagtaatccattctatctttcaccccttttggcagttcataaaaagagagcatgtacataggaacactacttaaacttgaattaagcagcaccagccttcctccaatagattgcagcttacctggccagcaacccaatttatgctccattttgttctcagccaccttccagtccttgtttagtattcttttttggtcaatgggaatatccaaatatttcagaggtaaatcaaccacattgcaggtgaaaatattgctatatacatgttgtttttccttagcttcccaaagcaaaaaaaaaaaaaaacctcactttatcttaagtccagcaagttgctcaaacagacacaagatgtacttcaaattttttgcatgctccag

SEQ ID NO: 6915 - DNA, 5639 bp, Oryza sativa
gggggggggtgacgaaccgaggggcgcggtcgtagtggcgcggagctagcagcgagactggactggaggcggacggccacgaccccgacgaccccgggcggcgcaccacaaacagcggtggagagagggcagggctagtgtgattttatatctcaggctagactcgcttgagctgtcttacattagtgtctttactttcgtttcgctaaccgcccaaaagcaggtgcgcacacacaaatgctaggcgagatgaggtcgggcggcagtgatggagctccatggggatcttgagccaccgagccacagcgcgcctgccttcacccgagcaagacgccaagacccgcgtgggagggaggggacgtcggatcggacgcacattcagtgacattccccgtgacattctcggtgacattgactcaccgacacgtgggacccacatgtgtctggatccacgtgggtcccacacgtcagtgactcaatgtcacggggaatgtcaccggagcaatgtcaccgaatctcaatcccatcggatccgccatcgcgccgcctttagctgcgccggatccgcctcgctgcgaccagatccaccgccgcctcgccgagcctccagtcacccaccaccaccgcgcccgctaatgccgcgcccatcgccgttcggcggtggcggaggtggagccgccgcgcctcccgcccgccgacgccgcgcccgtagtcacttgttgccccgaaccgctactgccgccgctccttctcaccgcatgacaaactgcatgcctccgccggatccgtaaaaagtggagagggaggggaaagtgagtggacggttagattcaataataagctatttactccgtaaatgtaggagagggaggggcgcagcccgcaggtgggcttttgggggaggggtggggggtaggcggggagggggtgggatgtgagaggaagcgttttagttattacgcaccccaggtacggtatagtatgtgtgtgtctatatatatatatatcactattataaaaattgaatatgtttttgtcgggattttggtacgtcatccgtgttagaaacggttttaattttatgtttcagttttaatctatatctatatctctataaaaacaatttccgtcttctgtaaaaaaagaaagataaaagtccgactaaaaaagaggtaaaaaaagaaagaaaaaaatgtccgactcaatgagcgattaaaaaaaaaaaaagcttccgtcgtcctcagtaaaaaaaagagaaaaaaaccatctcttgtccgactcccatacaaaaaggaaaaaaaatctcccagtaaaaaacgaaaaagtctgtttgttttttttcaccggtatttttttttccttttttctttttctttgcacgcaaaagagttttctacgttttctctttgcacacaaaagagtttttttatgcgcacacgctaaggcttttggttttttttaatccgatcggttcaccgtgcacctcccgtgcgcttttagttttttcgtcaatctttgttgtcatcggtttttctcccgtgcgcttttttttttcttatctggttttataatcccatatgttcaccgccgttatatcgatcgtgcgttttctcccccaatttgatttcaaaaatcaattccccactcctctctcatcattttctctatgattttcccttcgattcggctttaattgccggatttaatctctgttttatagttaccgatgatgacggtgatcttccccggtcatttttatcccgagttttatgctctgattcagggaaaacggaaggagtagctcaagtggataaaaaccctcgactaattttggctgaccaagaaagatttagccaaatttgatggggatattttctctggcaaacgtacgggcgcggacacgggattatcttcgggagattgaagatggtagtcatagtcgggaagttgaaggtagttgggtcgaagagaagaacaccaaatgaaggaaggtagcggactagcgtagggctgacaaggaagaaaggctttcggctgaaaacccaggaaatattttcattaccttttcttaattataatttatagcgatcccaatattaagatttttattaaccttttcaattatagtgtatactgaatatccaaatatttcagctgtgtttagatttcaacttttccgtcacatcaaatgtttggacacatgtatggagcatcaaatgtggaaaaaaaaagaaaaactaattgtacaatccgactgtaaatcgcgagacgaatcttttgagcctaattacattatgattagccataagtgctacagtaacccacatgacggattaattgggctcaaaaaattcgtctcgcagtttacagtcggaatctgtaatttgttttgttattagtctacgtttaatactttaaatgtgtgtcaaaaaaaaattggccaaatttttacagcatctaaccacggccttcaatttgttactcgactcttagtatatcattgaaaaaagtctttacccgttgcaacgcacgggcaacttttatttgataatgtgtttgtttgagcgtccgtttctatactatgggcctgtttggtagagctccaactccaaaatttaattacatgagttaggtctggagtcaagttgtggagctgcccaaaccctactccacctctctagttaattttgtgagagctccatccagttccactcccattttaggtggagctgaaactgtttggctgacatctaactctaggagaggtggaggttgagctggagctgtgccaaataggccctatatttcattgacaaaattaaatgccttgtggcttgtacaacctaaccatcacacatataatcgtggcttgtgcaaccaaaccatcacacatataatcatcctcaccatcctacccatcagagattatttatagctttttgccaccacatgtagccaccactaagacaaataataatatctggccaccaccataatatatatatttccgggtgaacagatattgtcacacctgaaaatacggcatcgtcttcacatgctctgaacttaggcatatgcctagcactagtacacgattgattttcctggacgctgcccccttttatttccatgcgattggtaagtaaaaccgcacgagaaaatcgaaaaccggtgccaagctaacgcctgcacgagaaaatcgattttcccgtgcggtcccgcacaagaggaccgcacgggaaaataaacagattttcccatgcggtaatatcctcttttcccacttatccacatcgaaatttcctcggtaccctccctctcctttattctctcacgtgtcacgtgttaaagcagacagcgatgtgtcaggcctcatatcctctcctcactcctccctcctctcctccctcagcgacagcgacgagacagcgtgcggtgggcataggcgactgcggtggtgcgcggcgacagcgtcggcagcgcgcatctgccgtggaagcacgggatatggtgggcagcggcgacgacgaggtggcacgcgacggctgcgtccgatccagcggtggccaccccacgcgcggatccggaggcggcggccacccccacgaggattcggctgcatgacggcggcggcggccatggcaacggccgccccccgcgtggatccagcggcggcaaccgccccacgcgcggatccggcggcggcggccctgtgccccccacggatccggtgacggcgtccgcccctcgcacggatccggcggcggctgccgcccctcgcgtggatccagttgcgctacggcggcggcagccgccccccgcgtggatccggcggcggcgtccacccccgcgcggatccggcggcgcgacggcggaggcggtcgccccacgcacggatccggcagcggcggccaccccacgcgtggatccggaggcgcgacggtggcggcggccgccccccgcgcggatccggcggcggcgacgggagcgcgacgacggcggcatggccacggcaacggcgacgacgacgggaaggcggcgatggtggcgacgggtagggttagggtttcgttttttcaattttgtttttttttcgattttttgtttttgcgtgcgccacccgcacgcaaaaatattgattttcgtagacgaattgctccagacgggctgaagctgcacacgtgaaaatccaaatcaacagcacgggaaacgatctgtgtagtagtgtagtctccttgaggaagatatatttagtacaatcctatactactagcaacaagattcatgacgattgagcaagatttagtacaaccctacaagcaagccagacatgtacaactagaatatgcaaataatgcacatggcaagttaaaacaaaaaatgcacaagacacaagtaaagtaaggcacatgcatgggtgattttgcgtaagggatcgaatagttttcaacaattcaagacttctacaatgcagatcagtttcaaacacatagtctaacctagctaataagtcataattcaataacattatcttggtagtgtttggtttggggacagggtgggatgggttaggtccatccctgttttttggaatgggatgatcttgttttttgtttggttacagggatggaacgagcactgttttttgtttggtttgaggtatataatgggatggaatgatcctatacattgtttggatggagggatgaaggtgggatgcttgatagggttacctattgatattagttggtgaggttaccctcaactagtcatgaataccacacagtgcaaaataatacttactcatgaacaccacactatttgaaaatgaccattgtgaatctgttcgcaaacaatatagctccataggttattaaaaagatttaataaaacttcatgtatgccgatactaattgctgcaacagtaggcttcacagggcacatataatacaagccacccataataatagcaaattttagtcttacacatattagcaaccgaaggtcttacacataatagcacattttaattcttgcacatgatagcaattttaagtctagtaagttctctgcctcaaacatattggcagtttaaagtcttacatataataggtaaataagccaaccaacaacacataacaccaaaagaactatccaactcatccaagaagcctatgttgatccagggaacttttcactaatgaacatagcaaaccaatgcatcttgttttcaaatggaagtccatcgaatgctctagcaatatgagggttggcaaccaaatgagcatagtaaaatgatctatggacctcctcaaaaccaggaagggttttcaatgtgtcaaataaaccttctggaagcttattgtccggctcggcgacctttagtatagcagaggcaagcttgtcaccaacactagtgaatgcaccaatcagcccgtcatcttcattctcttgtgtttttgctttctttggcttacttgcagatgatgcctccgcacgatcatcagtagtggcaggaccatcattttcttcatcattgtcatcttggacatcctctgttcctaggactgaacttgagtcctttgcatactttcctgtagtgatgaactacatgctgacgatgccaatctacttctctc

SEQ ID NO: 6916 - DNA, 9226 bp, Oryza sativa
tgggtaggggggcatgtgaggggagcattttagttattacgcaccctggatatttttttaaacaatcataattttacaaaacaaagaatctaccgtcatataacaaagaaacttcctttcaaatattgcactattttaaaataaattttacacatttatattctgtacctattaaacgcactcaagccgccaagtgatgctctaataaaatagagaaaatcctagaaattctaagaaaaaaacaaaacatctaccccttgattttcacttaaattggtgagtccaatattatacaccattagatatatcgatcttaaaacaaactaaatatcatgggtcccacctatcctcctcccgcgcgttggtaggtggcaggtggagtatatacgtacgtacatgtatgtatgcttcctttcttttcctttttttcctttttacatttatatatatataatggatatattttttaaataatcataattttacaaaacaaagaatctaccatcatataacaaagaatcttcctttcaaataatgcactattttaaaataaattttacacaattatattgatatgtacctattaaataaacaatatctatattaattaatttatacatgcacataaactgatggccccattacataaatcatcagatctacttttcattaccttggtctattattcactgtttcaaaataaggtctacaccattatattgtgtacccattaaattaacaatttaaaatctatattaactaatttaacttacactagaactggtggacttattattataatcatcggatctattgtttgctaataaataaagtgtccgaaattctctttttgcccgctgcacaatacacgtctgcacctttgcctttcccatgtgtgacaaagtgtagtgtctgagacatataaggtgatcacaaccgctgtaaagcttccaccttgccacaaatcaaatcatatatggagatgattaattttgttataacatgaaaagaaaattaaatgtgtgatgcagtgagagaataattaagtaccatggattgtgtttttctcaacactaattagctctatttaaattgaaaccgagagttgattacataataattataatgtatctgtgttatgtcgtatttggattttgtactatttgttcgtataggtgaaaggaatcattatgttataaatatgagcgcaatattgacgaatattaatagaactcttactacgacaagggtgataaagggagtttaaggccctctctttttttcccgattccatattttggaattttgtttgcatgctttctaagtttctaaatagtgccttctttaaattaacaacattctaactttttagaagtcaattcattcatttataccctcaaaaaaaatatcacataaattatataattcatcaatttcaaaaaaactatcacataaattatataattcatcaatttcagctatcctaaaccttaagtactacatattttttttcatgcgagtcatggtgataaattattaaagtcgtaagatgaatatgtaagagttactctgaacaattgtaaataggtgtcaaaattaattgctattaattagacatctaatggcttgcaagccacaaaattaatttcactctacatgtatataatcatggacgaagctggaacaaatattaccatatgtcccatacatatatattgcacagttaatattctaattacatgtgttaagtcatttaaaatttcttaaaatgctctcaagctgcgacgtggtgctctaataaattagggaaaatattagaaattctaagaaaaaaacaaagtatctatttcttgattttcacttaaatcggtaggtccaatattacaaaccgttagattaaattgatcttagaacaaactaaatagtacgaggtcccatctctcctcccgcggcataggtacgcacctacgtgcatgggtacgtacgcttcccctccctttttcattttttctccttcttcctttttttcccatgcatatgcttccctctctttattactatatcatgcgccttcatgagacgatttaatcaaaagaattttgagtatcttgcactcgtatttttcatttgcggtcgtactacacggtatgcgtatagatggattatatgataattaactagcaatagttttttatttactcgagaaaaaagaaacatgattcaaaaatcgtaagtacttaatccatctcctacttaagtttgtgaatggttttttaagatacgttaagaaaaatagaacccttaaattattataaaataacattatccaaactttagtttgcccttaatctatgagacaaaatttctgaacaaacaataatcttaccttttaataatataagtgcccgcgcatacgcgcgagccaccttcctagttgcaaaaaaagttgcatgatagattctgttccaaacttctcctgtcacaattctatgctgatgtgaattggatgctgtggatttgtgactggaaggagcaataacaatttgaaatttttatctgagctgaaattatgctacattgtcccttgcagccctgtaaaagatgaaaggttaggggacatcggaacagttctgaagaagaataatgtttctcttgatgttgttgaatttggtgaatctgaaaactagaagctcttgttgctgcagttggtggcaacagccacatagttcacatcccacctggggaagatctttgtgtcgtcctttcgaagtgaacatctattatgttatctgctggttcttacccaaattcctagtgctagaatatgctatcactaatcagtaataaccctattcctttcaaaggtcaccaataattactggagatgaaggagggggtgctgcgttactatccttattgagatcacctctgctgtcaaaaaaggattatgaggtagattacaagaaggaggcggaatctacctcagatacacctactgacaatgagaaggcaaaggtatgctactgcgttactatccttattgagatcactggctttctttgtgcacaagtttaactactatcagatcatgaactctgtgactgcagaattccatcagggatatatttgtatttgtggtattgtctatctgtttattgcttcggagcacccatccctcaaaatatcccaaatcactgttcacccttgtaagttagtgcctatagctacacactatgaacttcactaacttaactgcccttgggagtggtagtcctgtcctgtctagtattctccaggacaaaaaaaaaaaaaaacaacaacaacaactccagcaacaatctatttccatgtcaatttttagtaaatagtaactgaattatatgaatatgaataaacaggaactgcatttagacttgtaatcttggatctgtttagaattttatattaacattttcttatctgggaacttaattttcttttgaggctggccttgaatgtgttgctaggaacctgagccacttcctcatttgttttcttcaccttctaacgatgcaagttgtcttgaaaaaagatcggaatgatcatgatactaaccatcattatttgattgcttttgtgctattttagtggcactgtggcaggacaacgttaacagtgtaattggtgagataactataaatattattatcaatgatttttaagctttgaaatctataacatatggttatcaccatctttgtaatatgcaaaatgtagtaacactaagtcaggattacttttatggcttccttgccttttattttttagataatggaagctttattaagactcagttaaatacatcaagatgatacattccaactgagtccacccggggcctctgcatagaatgcacacagccaaaacactggatctaagaagacttccccatcacaaaacacaaaaactagtggctatcaatccatagactagatcgccacccatgctcctgggtaaaaaattcttgtaccacctagtccaactgttgcaataccaccgcaatagtatcccgaagtcccggtttgtggaggatggcccaggtgcgtagccaccgggtgactaaagtagtaacctgcaaaggagaagacaacactttgttataaaaaattaccccgtttctgcttagccatatggaccaacaaagagacgttgcacacatcaaaagcagatttctcatgtctttaggaacacaagtaacccaatgcccaaacaagtgagtaatattttgaggaggttgtatgttcgaagccatatgaacaacataccataccaagcgagaaacactacattgaaagaacaaatgttgaatggtctcttccttgtgacaaaagcaacattttttactacctttccagtttcgcttggctaggttatccttggttagtattactccccgacgtaagtaccataggaaaatcttaactttgagcggtatttttaccttctaaatacgtctattgatatttgggatcttttgtgtgttgtgaggttggtggtgtaattttgttttatcttctattggtcgttacaatgttatcaaacaagctagttatttatgtcatgcatgaagaagggctccatacgatacaagaagctctttcaaggtttgaaaatgcagaacatgcaggaatatccgacgattcctcatccgggcaggagttggaattaggttagttattggcttatactacgtattttctgattttacaatatcgttttcctcttcagccttgctctcttggtgctatatacgttggaatacgcgtaggctacgatagcataatcaaaatttttctactgcgtaaacctggtgtttacacccaaatttggcacctatgaacgaaataggggaaaattggcaaagtttggaaagtgacgggtttacttactcgagaaggcaggtttcgtgtttcctttggtttctatcccgagttggatgtggagaagggcctgtagagggcaagaccaacccctatttaagggacaaggccggttcattgtaaaaccctccgaatacaatatacttgaatcgttcttttactatgttttctattttaccctagtttagtccatctttgtcggtttgcgccgtaaaccgtccaccgccgctgcgagagtgcgacacccctttgtaggtttgtcctgaaaaccttctgttttgcccacgagacgggtagttatcctcatatcgacttaaatcggcctagaggctgattttgatctctaaatcggctccgctagctggtttatcttttctttttgtaaagcccatcttgatttggccctttggctagatcgaggtggttagcgactccatatcaccgcaaggcgtttaggtgttgcgatcgtgcttgtcgacttgtcaaaaaagttgccaacaccaggaaccatacaagtattagaccatagatcgttatcactcgacgtgcgaccctataggttcatgtacactcggctgtaacctgaaaactccttttcggtccacgtgtcaacaacggcccctagcagaacgtattgaccaccgggcatacataaagattatatcgcctaaacctctagtgcatacttgtatgaactcctttgcctcacgatatcgattaagctcaaggctagatatgtgccatcctctattagctcaatcattcactcgaacctatgatagattatataacttgtgatagactcatcaatcacctttggcatggccatgcacttccataatctatgacatcgaggggcccagagatatctctccataggaggggcaaatcccatcttgattattcatatcccattacatgtttcatagcataccccaaaactacttttatagctacccaattacggagtagcgtttagcagtccctaagtaagctactacaaatgttgggaaccatgataatctcgggtctaagaattcaacaccaacactaaatgagatcactgatgacacaacacatatggctcttgcagtgtctcatgttgggtctatccaacaacatgttccccaacatgtgtccacattatcaatttggtatctctataccataatgcatgagacatgatcatcaattaatacatgtgctgatcatttaaacattttttgttccacatattatatttgatcagggatcctttagaaatagtaacatacaacataaagagtctcatgaaagaatcacatattcattaaccaataatgagttatctatttcaaggaacaatgttggataaatatgaaaacatagtatgtgataacaatcatctctatgattgcttctagggcatatcaccaacaatatattgagcaagaagtgaggagatttactaccatcttctttctctcctctctcttctcttcttgcactcagctctcgtcctctcctgtgctatatatctgcctcctttcgttccgattctacttcagcaagatttcagtcttgagtgcttcagtagattattctgttcacattgcctgagtgacgtatgtgggctctgctgcccagagcacgtgcccacccaccatgccgacgggaatgccgtcgttattgaggtgagtggatcaagagcgcttcttgtcttcaatttactctttcttgcttctgaattgaccttttttgctttcttagaaggtacatatggtggaaggttcctctgctctaagccaccacacggtcaggagtaatggacttggctataactggataaaaatacggagagtagactatcaagataatacgtgggtcatgatcggacaaggccgaccaagaagcactcgctctagcatgagagggtaatgcaagggatgtcatggtcttatttctctgaggaatgaatattgtagccctgcatgcaaggtaataccaacacagatgatttctatcgcagtattcttgttattgagttgaacactaacgaattgcagttcagtttttgccggaaaaaataatttgcattgtctatcgcattattcttgtgattgagtcccaaatttcagtttcattggttgaagttattgttgagtctacagaggagtcataaattaaatttccattgtatgacactgacagattgttgtttgctttaagtaatggttgtataaacctgccgtagcaggaacataatgcaaagccttgtgagcattgacttccatggttcacataccagagatagattctgtaccatttgtttgagagcattttcatctgaaaggtgtctagaccactcaatgcatcatcctgttgctgagcaaccgaacgtttatgtccttcacgttattcgacgtgatggatggcttctgataccatatcaacaactaccttcagacatgataattgggattagggtaagtacccttctaatgctatttgtgcttgaaattgagataacttctactattgtatgtatgactaaaattgatatttgctaattatagaaggtacaactcgaggatggaagttttggtgtaccactaaggccacgtctacccccaattcaagatggagaatacatatgtagcagattggattgtgaagagggggtccaatttgctgctgacatatgtagcattttgtgcaagcatcatgtcccagattaggacgtcaaatcactgatgatgaaggacaacattaacattctcgggacttatcacaagctgtttatctgattacaacaagatatataatttctctctttactctttaccgtcaggaattagcattgtgtgcaaatacatactcaacttttgaaattctgaatccaaatacatacatttcaatactattaaacatttcaatactattaaaagcacatccttgaacagatccagtgcaatctcaggccaactctcgtgagggtatgtttgagaaaacttattgtaatagatgcaagaatgttggtcacctaaatagagattgtgttgcttttgtgttttgattaactgccaacacataatactgaggactgcatctttgataaacaacctagacccataggaaaacttgtgggatatggagctcctgggttatattgcatcatgattcagaataccaaacctatctctttaatggaacactctcaatcatttctgatggagagatgtccgatcctatggcttatatcaatcatttctggtggggagctagacatggaagatttcccaataggttgagatttgaggagctctctaattttgatcatttcactgtaaaatggactaatgtgtatgagagaatggatttcccaataggttgagatttgagtagctctctaattatcatttcactgtgaaagggagaatggacacaacaatgctgtgcatttagtttgggttaatgtgggtggaatccctaacgagatgaaaaattaccaagctctttttaaaatagattcaaatttggggctggtaatggaagtaggtttaaatttggggccagtaatgaaagtagatatgaagctagcaataccattagagtcaaagtaggaatgatggagttgggtgtgctagctttgaagttggtgcttacaaccctaaaaggttttttttgtattaatctgtttttactctgaatgaagtgttagaaaaaggatggttcaaggatgaatgttttgaggagggacatacataaaggaacttcaaacataagacagaattagagagaaggtaagcagccagtcaatgaggagaataagagagaagacaagcagccagtcaataaggattgtgacatggatgcaagaagtctcagagtatatatatgtcagggagggaggttacttgcgagtctgttccagaactgatgaacaaataaacagtgaaagtgtgtgagatcttcagacaagagtggctatagattgtaaaagcataacataaggagcagtcagaaagtttgaatagacagaagatgactgaaagatcccatatgcaagataaaatggaaacacatggtagatgcatgatgggtaaggaattcagtcacaggacatggtgagaaaaaggttctgacatgcaggagacacacaaggatataaatattgaggttagtgtgcaaatgaggaagacagagaaaaggtagattttggggagagtgaggtgtttcttgatttacaagattctgaatataaaactaactctgaacatttctggcagtagtagaaagaaaaacaaaagagaaaaccttgaaattat

SEQ ID NO: 6917 - DNA, 31035 bp, Oryza sativa
gacaacgccattgaccaggggatcatccgccaagcatttgactttaacacttgtaaggtgctcacatgtaaatgatctttcttcaagctcgccaatcattctttgtgatgtttttccccaacgatgctatatataccaagaaaaacaggtaagctatattctcctgatgacatgtgtgcttgctaaaaatctttcaagttggatcagtatacatttagagggaaagatttaccttttcaagttccagatttagcttctccagtattggtgagttccgaagaaaaacaattaatccatagaaatttgcatccagacaccattgaccaagagtcaagctgacaagattgatgaattttggataccgttgcaaattgttttcaattgtcagctgcacaatattgaaatgactatgttgcagaaggccatttataaacatgattacctaaattagaaacttgaaaacaaaattcagagcactaacattatgcaataagtattatatttgcggtgcaggtacaactataacttcaacatagcggatcataaaagaccactagaaaaagaaattgcgtcaacaaagaatcagaataaacaatgctacacttgtttggtctcaatgaatctctttagcacgtgtggattaacagtcaagatgcttcagatgcaagttaattaggtagctacatcagcttaaacacaatgctatgtcaaaaattttaaacacaacgcgaatctatagtgaggtagcagcaggagtaagactttcaattgctgaagcatatttatcttatttttcaattttatatttaataatgtcaattgaagttaagcaatcacttagatttctgaaaagaagaattttcagtggccaacccaatattgcagccacacaagaacatgccagttaccaaatgggaaatggtccactttcattgtgaaatctaacagcgaactaagataattcaggtctgcttgaccaaaagtcttatttatgtataaatgagctgaatacaatgaaatagattgcattggatggttgatggcatcagtcatgatttcatgacataagaattggttatgccacgcttagttgtgccggtacaggtaactaatatagtggaattgtgaagtgtcaagaagaaacagcgtgcttaagttttattatttttcatatcaatacctatattaagatgcatgcatataataagggcaggggggatatatatctaagatcaattgcaatacctttttcccatcataatagaaatggcaggtcaaatttttagcagcagaaaggctcctgagattttggcagaaatcactagaggcttgttcgacatgaagtaccagcaatgaattcactagtaatggcatgttattgaacacaattgtgccgctcaaaggccaccacaaggaaaaaatggtaacactcggggtagaaatagtagtcttgtacttccaggggaaccaagtatcaatgatgctcaaaaccttcagtgtctgagaggagatgtgtcactatccacaatgatgcattcatctaaggagagattttccaacgatgggcagcctttctcgagttgcttgaagaaaccttgcttcatagcaacactaacgaagttgattgctgtgaggaagcggcaagcaaacgcagaatagtggtttagctccagtttaccagacaacacaacaatgtccagaactcgggcatatgcttctgcaaagcgtggctaatccatctgctcatatcttccgagttccgaggccgaggcaccttcgattctggtcaatctgtagaacttgaagcagaaggtgcgtatcgacgcggcggggtcgcgtagcttcagcactttgtcaaggaaactgttgaacgacaactccatcttttgatcatacttgataaagccggtttcgttccgcccaaactcatggatgtggatgttgatgcagggcacggtgcgtcagaggttgcgccaccgcgacagcacgcacgtccgcacggcctggcgcgtggtcaggaaggtcatgatgtggaggacgatgtcgtcggggagcgcgctgaaccagtccttgccatcggcgtgcgccggagccatggccgtgagcccgtgagcacacgcgcacgcccagaggcgtttcgtcgaacaggtggcgtgcgtggaaactgcacagtagaggaaaaacaaaatcaaagaatcaagaagccatgaatccgcggctcaaccgtgagcaaagatttgagaccgcggcgctcgagcagagattgaagattgaatccgtgaagaacatcgatagaagaaagatgcgagaagagatggagttgaaggtgatgggaggtgtacctcgaaatcgcgaatggtgttggcgtctcaagcgctcgattgactgcttgtttttgttgggacgctgggtgtatttgcggttttactttagtccctctgatggaagatggatggttcagattaacagaaaatggaggagatttccctttggaccgacaaccaacactttagttctttctttcttgcttgtctcaggtagttttgggtatactgtcgtggttaaatttttaacagtttctcctcaaaatatcgatgaaatttggccggctaatcctttgtcaacccggcaaaaaaaaaactttcaaaagtctagaacaacattattttgtgactataagaggaatggatactgtactcctataagaaacaatatttatgctaatggtgaaacgtcccatcgttggaccatcacgcctgcaacatatatatggtgtcatcccataggcatttgtagatcactatgggtcaatttggagaagcttatggaaattgcattttccctaaaatctttagctgctagaagctttctcaaacagtttagatttttatccaaattttgagaatttgtagttatggaatctagaaaatgaactaaaagtcaaaatctaggttgggtttcatagcttctctagattctcaccagctgtatatcaaaatcttaatctccacaaacaggtcttatgtctctctcaccacctactaactacaacaatgctacgatcagtcagcggcagaaccaaaatatttgcgggcctagggctgatttaacacgttagaaattatatattttattttttttatataatttctaaaagatttacatagagttttgaagcaagcatggtaactcaagccccttataactagtgtttgagccaacctattagctatatggtcggctggccccacaactatttcacaaacacccttgagagtcttaaaattttcatgtgtaaatccattaagatttgcataaatgatcccattaaaatgtgaagtattaatagtcggccccacatgacaaaaattcatggctccgccgtttgctatgacagcttcgctgaaaatcttatcagcttgctacgacagtttgcgacattttctttcaaagaatacaacgtgtgacgcagcagattccataacaatgtgtgcgagtgtgacagttttcattttcataacaaagatataactgcattaaaaaaaataacagttttgtgatgtttcttgttttccactgatataaaaattgttgcagctcgttgatatataaccatgttcattatttctagaaccacctaaaattaagatctcatgtgaacattagaagcatggaaggggatagagccagcagagtcataggagtgtaacatcatgtcagtaaaacataaaggccaaatagagtacccaagcatgtacatgcagacatgcagtatcttctgtacaacagaacatcacagaaggatgcaagtacaggaaccaatacatgattgcttctactgacatcatagcaccaaacaaaagcagtaaacatgtctatgtgctttctgactcaactggaatcaacgaatgtaactgcaagagagcgatttttgaatggaatgttcagagaatgcttgatcctttttgacgtttcatatctcctcagaccagaaaattgcaggtcacgcatactcgatctagcaccagcgtatgatctgaacctgagcagaggtcagtccactattaacaaagaagttgaccacatctttgaccaggggatcaccctccgagcatacaacttcgacgcgggtaaggtgctcacatgtaaatgatctatcttcaagcttgccaatgattctttccggcgtattctgatgatattatagaaagaaaacaaataagctacatccctgattgacatgtgtgtttgtgaaagatctctcgagaagggtcagtatacatatggatgaaacgatttaccttttcaagttccagagttagcttctccagttttggtgcgttctgaaggaagacaaccaatccatagaagttcgcatccaaacaccattgaccaagagtcaggctgacaagattgttgaattttgggtacaattgcaaattgttttccattgtcagctgcacgatactgaaatgattatgttgcaacagaaaacccttgccatgttatagacaaaatttccaacaaaacatgaaaacacaatccagcgcactaacattatgcgataaaagaccataatagcacatgcgatttaattgtcaggatgcttttgatgcaatttaagtagctacgccagtctaaacacaacacaaaaaactattgcaagactttcaacaattgcggagacatttccatttgtatgttgactttgaggttgtcttgattttcaaatttatgtgcagtaatgacaactgaaattagacaaacactcagatttctcaaaatatgaatatgaatcttcagttgacaacccaatattacagcgaacaagaacatgtcgagttaccaaatgggaaatgctccagtttcattgtgaaattgaatagccaacttagatagttcatgtctgcttgaccccaacagcttgatttatatacaaatgaactgactacacgaaatagctagattgcattgatgattgatgtcatcagtcatccttacaacacatcatgatttcacgcataagaattagttatgcaacgcttagttttgccggtgctattgtgaagtgtcaataagaaacaccatgcttgagtttttcctttttcatatcgacaactacattgagatgcatggatgtaataaggaaagggggatgtgtgagaccaataaccataccttcctcccaaaataatcgaactccaatcttttagcagcagaaaggctcctgagattttggcagaaatcactagagtcttgtacatcataaagtactagaattgaagtcactagtaatggcatgtcgttgaacacatatatgccgttcacaggcctccacaacttcagataagtaacactcggggtcgaaatagtagtcctgaacttataggagaactgagtgctcttgatggtcaaaaccttcagtgtcctggaggagatctcaacatccgcaacgatggattcatctaaaaagagattttccaatactggacaacccatctcgagttgctggaagaaacctggcatcataagaacattgatgaacttgattcttgtgaggtagcggcaggtaaacgcagagtgatcgagcttcaatgcgtcatacagcacgagaatatccagaacccagggctgcttctgcatagcgtgggtaatccatctgttcatatctgcctcgtccgaggtgccttcgaatccgtccaatctgcagcacctgaaccggaacgtgcgtatcggggcggccgggttgcggagctccagcaccctatccatgaacatcttgaatgccgactccctctcttgatcatactcttcccactcagtgtcgctccgctggaactcgccgacgtcggcgttgatgcagggcacggagcgccagaggttgagccaccgccgcgacagcacgcacgtctgcacagcctggcgcgtggtcaggaaagacatgatgttgaggatgacgtcgtccgggacgtcgctgaaccagtccccgtcgtcagtgtgcgctggggccgtgacccccctcctcttgctaggcgacccctccatggcggccgagcacgcgcgcagaggcgtttcgtcgaacaggtcgcgcgcgtagaaactgcacgagagaggaaaaccaagaatcaagaacccaacaacccgcagctcaactcccagcacaagaatcgagatcgtagcacaagaaacgacgctcgagaagaaattgattggtcagggaagaacatccagagaaggaggatcgatgcaagaagagttggaagccgtacctcgaaaccgctcgggcaggcgtttcgtcgaacaggtggagcgcgtgggaactgcacaagaccaaaagaatcaagaagccatgaatccacagcacaactccaagcaagatttgagatcgtaacacagcaaagcacactcgaggagagattgatccgtgaagaacattctaggggaggggatcgatgcatggagagatggaagggaggagggagctgtgtgtacctcgaaatgtcgaattcgcgattcgcctcgcgcgctccggggaaaggttcactgctccctcgatggaaacatgggcggttcaggttggataaatgtgtctgccggaatgaaatactctgtccggttaaataatatggactccgtttcacaacgcaagtcattctagcattttccgcattcaaatttattttaatgaatctagacagataataaatctagatagatatatatatctagattcattaatatcaatataaatatacgaaatgctaaaatgacttacatggtaaaacggaggaagtccttggagtaatgtggttatagaatctagtctactccataagtcccaaaaagatcccttatagaacaacgaatctgagctaccatttatccagatttgttagttttttttggacggagggagtatgtaattcctccatttcatattactaaatcattttgactttggtcaaaatcaaactactctaaatttaattaagtttataaataaatatagtagtatttattacaccaaataagtttcattgaatctataatcgaatatattttcatgatataattgttttcggttgaaaatgttagtatttttttttacaaatttgaccaaacttgaaacatatttactttgatcaaagttaaaaatgacttgtaatctgaagtagagcgagtagtcaataaataaattttgatcataatagttagggttaattggatccatgccactgcaactttaccaaattaaaaacatgccattactattcgttgtataggctacatgccactggaaatttctaaaattgaaaccatgccactcttgtcacgttttccgtctcctctctcatgtcgtttcttttcctccagtttaatcgtttcccctcatgtttcctctcctctcctctcctcttcttctcctctcctctcttccgaccaacctcccaccaccacaccgctcctcctcctcctgctgttgctgcaaccgtgctgccctcgagaaactaagtctttgatcaccgctggtaaacaacaaaccaaataaaaaacccttcttgcggtggtttctgggcagatctgagagagaacaaaaagtgattaggcagatccttttccgatggcttcttccccttccttttcctcctcctcctccccttccgccaccagtgccgcgccggcgtcctcctactactggtgctacagctgtgaccccttcgtgcacgctgcccctcacgaagactccatcgtcgcctgcccggactacggcggcgtcatcctcgaggagatgggtgtgcccccaccacgcaccgcctgccttcgccacccgcgcgcgcaccacaccaacgacctgcgcatgtgacggacacgctacgctgccgcagcagcggcggctagcgaccgctcgccattcaaccccgtcatcgtgcctcaccgctcccccgctgccgtagctgctggcgacgacgacggcgcgggctccggcctccgcccgctcccggagaccatgtcggacttcctcatgggctatgccttcgagcgtctcctcgactagctcacccagatcgaagtcggcggcctcgcccacatgagggagaacctaccggcctgcaaggcttccatccccatgccgcggggccgtccactcacctagctcaattgttggagaggagacagaaaaagtgacgggagtggcatggttccaattttagaaattttaagtggcatgtgactgatatgacgaatagtggtggtatttttttaatttggcaaagttgcagtggcatagatccaattaaccctttaaacaacatcaaatcaaatctaaaatcaagtttgaaaaatttaaaaatgtaacttataagcatacaaacataagtgaaactaatagggttatatatatatatatatatatatatatatatatatatatatatatatatatatatatatgtctccgttaccacctaatactactacagtgctacgacagcttcacccagaatctgataagccgatgccactgcatcgaattcttcaggtgaaactgcaccgccattacacgagtatctgaatcgacgatgttggtaccccatgtttctgaaattttggatcaaagaatacaatgtgtgacacagattccataaccatgtgtgtgacagtggtgtttcataacaaatatataattgtatgaaaaaattaacagttttgtgattttcttattttccactgatacaaaaaattgttgcagcttgttgatatataaccaattaaccatgcaggttacacatccttgatctacatccggcgtatgatatgaacctgagcagaggtcagtccactattaacaaagaaggtgaccacatctttgaccaggggatcatcctccgagcatacgatttcaacacgcgtaaggtgctcacatgtaaatgatctatcttcaatcttgccaatgattctttgtgttttttcctgataataatatagcaacaaaataaaataagctatattctcgattgacatgtgttcttgtgaaaaatctttcaagaaggatcagtagacatttgtaggaaaagatttaccttttcaatctttagagttagcttctccagttttggtgaagtctgaaggaagaccatcaatccatagaagtttgcatccagacaccattgaccaagagtcagtctgacaagattgttgaattttgggtacaattgcaaattgttttccattgtcagctgcacagtattgaaatgatcatgtggcaacagagaaaaccttgccatgttatagacaaaattcccactaaacatgacaacacaatccagagcactaacactatgacaatagaaagaaatgatgtcaacaaaaaaccagaggattgcaaaactcaaagggaccctaaacatgacaatgcaatccaaaggactaacattgtgccacaacagaaagaaattatttcaacaaaaaaccagaatatacgatactatactagtttgccttcaccaagtctctcgatgcaagttaggtagctacactagtcttaacaaaatgcaaaaaactattatgtggtagcaggagtaagactttcaacatttgctgaggcatttccatttgtatgttaactttgagtatgtcttaattttcaaatttatgtgcagcaatgtcaattgaagttagacaatcactcagatttctgaaaagatgaattttcagttgccaacccaatattgcagcaaacaagagcatgtcgagttaccaaatgggaaatgctccagtttcattgtgaaatcgaatagccagctaagatagttcaggtctgcttgaccaacaggttgatttatacacaaatgaactgacaacatgaaataaattacatcgaatggttgatggcatcagtcattcttacaacacatcatgatttcccacataagaattcgtcttaatttgccagtgcaattctgaagtgtcaataagaaacaacatgcttgagtttgttttcttttttcgtatcaatacgtacattaagatgcatggatataataaggaaagtgggatgcgtaagaccaataagcatacctctttcccaatataattgaactccaaacttttagcagcagaaaggctcctgagattttggaagaaatcaccagagtcttgcacatgataaagtaccagtaatgaagtcactagtaatggcatgtcattaaacacacagctatccacaggcctccacaacttcagataagtaacactcggggtcgaaatagtagtcttgtcactggagaacagagtgttcttgatggtcaaaaccttcagtgtttgggaggagatctcaacatcattaacggcgcattcatctaagaagagactttcccatgctggacagcccatctcgagttgcttgaagaatccttccatcaaaacaacactggtgaactcaattcttgtgagatagcgggaagcaaactcggagtggtcgagatacaatttgtcacacagcacaacaatatccagaacccgtgcctgcttctgcacagcgtggctaatccatgcgttgatatcttcagggtccgagatatcatcgaatccttcatccaattcaaatttgcacctgaactgaaacgtgcttatcaaggcagcagggtcacggagctccatcaccctctccatgaacataatgaacgccaattccgtcttttcatcatagtatccttccgagtcggagtcccgcgtgaactcgtctatgtcggagttgatgcagggcacggagcgccagaggttgcgccaccgccgcgacagcacacacgtctgcacagcctggcgcgtggtcaggaaggacatgatattgagaatgatgtcgtccgggacgtcgctgaaccagtccccgtcgtcagtgtgcgctgggcccgtgacccccctgctcttgctaggtgaaccctccatggcggccgagcacgcgcgcagaggcgtttcgtcgaacaggtggcgcgcgtggaacctgcacgagagaggaagaccaagaatcaggaaccgaacaacccgcagctcaactccaagcacaagaaacgacgctcgagaagacattgattggtcagggaagaacatatagagaagaaggatcgatgcaagaagagttggaagccgtacctcgaaaccgcgcaggcaggcgtttcgtcgaacaggtggcgcgcgtggaaactgcacaagaccaaagaatcaataagccatgaatccacagcacaactccaagcaagatttgagatcgtaacacagcaaagcacgctcgaggagagattgatccgtgaagaacattctaggggaggggatcgatgcatggagagatggaagggaggagggagctgtatgtacctcgaaatgtcgaattcgcgattcgcctcgagcgctccggggaatggtttttttactgctccctcgatggaaacatggacggttcaggttggataaatgtgtctgctgcaatgaaatactctgtccggtaaaataatactaatgtggttgtagaatctagtcgtacttcgtccatttcatattataagtcattttgtgttgcatgttataagtcagttttactttggttaaaatcaaactactccaaatttaatcaagtttataaataaatatagtaatatttgtaacaccaaataagttacactgaatctataatcgaatatattcataatatatttatcttgggttaaaaatgttagtatttttttatacaaacttgaccaaacttgaaacagatggactttgatcaaagtcaaaaatgacttgtaatctgaaacagagcgagtagtaattaagttaattttgatcataataattagggttaattggatcatgccactgcaactttgctaaatttaaaaaaaaacgccactactatttgtcatatcagctacaatgccactcgaaatttctaaaattagaaccatgccactcccgtcacattttctgtctcctctctcacgccgtctttgtcccccctcccccagtttattcgtttcccctcatgtttcctctcctatcctctcctctcctccgaccaacctcccaccacaacaccgctcctcctcctcctcctgctgctgcaaccgcgccgccctcaggaacctaagtccttgaccaccgccggtaaacaacaaaccaaacaaaaatcccttcttgcagtggtttccaagcagatctgagagagaacaaaaagtggtttccgatggcttcttccccttcctcttccttctcctcctccccttccgctgccggtgctgcgccggcgtcctcctcctactggtgctacaattgcgaccccttcgtgcgtgccgcccctcacaaagactccgctgtcgcctacccgaactacggcggcggcatcctcgaggagatgggtgcacccccaccgtgcaccgcctacctccgccacccgtgcgcgcaccacgccaaagacctgcgcctgcgacggacatgctgcgctgacgcagtggcggcagccgatgaccgctcgccgttcaaccccgtcatcgtgctttgccgctcccccgctgccgtagctgccggcgacgatgactccctcgccacggttactagcttcgagctcttctacgacgacggcgtgggctccggcctccgcccgctcccggagaccatgtcggacttcctcatgggctccgccttcgagcgtctcctcgaccagctcacccagatcgaagccggcggcctctcccgcgcaagggagaacccgccggcctccaaggcctccatctccatgccgcggggccgcccactcgcccagttcaatcgccggagaggagacagaaaaagtgacgggagtggcatggttttaattttagaaatttcgagtgacatgtagctgatatgatgaatattagtgataattttttaatttggcaaagttgcagtggcatggatcgaattaaccctttaaacaacatcaaatcaaatctaaaattaagtttgaaaatttaaaatgtagcttataagcatacaaacataagtgaaacaaatagggttatatatatgtctccctttaccacctactcctacaacagtggtacgacagcttcacccaaaatctgataagccgatgccactgcatcgaattcttcaggtgcaactgcaccgccattacacgagtctctgaatcgacgatgttggtgccccatgtttgtgaaattttcgatcaaagaatacaatgtgtgacacagattccataaccatgtgtgtgacagtggtgtttcataacaaatatatagttgtatgaaaaaattaacagctttttgattttgttgttttccactgatacagaaaattgttgcagcttgttgatatataaccatgctcattatttccagtaaaatccactccttccgtttcatattcatataataagttgttttgactttttttaaaaaacatttttaaacttgaccaagtttgttggaaaaataaaaatatttccaacgcaaaatataaatatgttcaatgttacatttaataaaactaatttctagatgttattcaatttttctataaactttgttaaacctaaaaaaatgactagtaaaaaaaaagtcaaaaacaacttataatatgaaacagcggaagtaattttttatttcatgtgtacattacacaaaaaggaaaaaaaatctaatgagtcgtactgaaggggatagagccagagtcatggattgggatcccatgcagtttgaatagggactgcaagtttagcagtcttatatcttcagtttagcagtcttatatcttcactaccatcagatcaaaggtttcaacggcctggatttaggagcaatactgtttgtcagcattggtgcgatctgagtccttgttatttgatccaaagatggttatatgactgctaaagttacagtcatacaagcaaaggtgatctcaattccagtcatggtgtataacatcacgtcgggaaaatataaaggcaaaataatagagtactcaagcatcaacttgcagtacgtcttggttataggacaatagaacatcaacagaacaaggtgacagacctttcacttacatagtactactaagacatgattgtttctactcatatcatagcaccaaacaagagcagtatacatgtttatatgtgctttcggactcaactggagcaacaaatgttatgatatgaacctgagcagaggtcagtccactattaacaaagaagttcaccacgtctttgaccaggggatcatcctccgagcataagacttcaacacacgtaaggtgctcacatgtacttgatctacacccggcgtatgatatgaacctgagcagaggtcagtccactatttacaaagaagttcaccacgtctttgaccaggggatcatcctccgagcataagacttcaacacacgtaaggtgctcacatgtacttgatctacacccggcgtatgatatgaacctgagcagaggtcagtccactatttacaaagaagttcaccacgtcttcgaccaggggatcatcctccgagcatacgacttcaacacgcgtaaggtgctcacatgtaaatgatctatcttcaagtttgccaatgattctttgtggtttttcctggtgataatatagcaacaaaataagatgagctaattctcgattgacatgtgaaaaatgattcaagaaggataaatatgcatttggaggaaaagatttaccttttcaagctttagagttagcttatttttggtgaggtctgaaggaagaccgtcaatccatagaagtttgcatccagacaccattgaccgagagtcaggctgacaagattgttgaattttgggtacaattgcaaattgttttcaattgtcagctgcacaatattgaaatgattatgtggcaacagaaaaaatcatgccatgttatagacaaaatttcacactaaacatgacaacacaatccaaagcactaacattatgccaaccaaaaaccagaataaatgatactatactagtttgctttcaccaagactttcgttgaaagttaggtagttacactagtctaatcacaatgcaaaaaactattgtgcggtgcagcaggagtaagactttcaacatttgctgaggcatttccatttgtatgttgactttgagtatgtcttaattttcaaattcatgtgcattaatgtcaattgaagttagacaatcacccggatttcttaaaagataaattttcagttgcgaacccaatattgcagcaaacaagagcatgttgagttaccaaatgggaaatgctccagtttcattgtgaaatcaaatagccaacttcttgcttgaccaacaggttgattggtatacaaataaactgacaacatgaaatagattgcatcgaatggttgatggcatcagtgatccttaaaatcatcatgatttcacacataagaattagttatgcaacgcttagttttgaaggtgtaattgtgaattgtgaagtgtcaataagaaacaccgagcttgagttttttcctttttcatatcaatatctacattaagattcctggatataataaggaaagtgagatgtgtaagaccaataagcttacctgttttcttctcccaacataatcgaactccaaacttttagcagcagaaaggctcctgagattttggaaaaaatcaccagagtcttgcacatgataaagtaccagtaatgaagtcactagtaatggcatgtcattaagcacatatgtgccattcaaagggctccacaacttcagataagtaacactgggggtcgaaatagtagtcttgttgccataggagacatgagtattcttgatggtcaaaaccttcagtgtctgggaggagatctcaacatcctcaacgctgcattcatctaagaagagacctctcattgctggacagcccatctcgagttgcttgaagaatccttgcatcaaaataacattggtgaagtcaattcttctgaggtagcggcaattgaatgcagagtgattgagctccaatttgtcacacagcaggacaatatccagaaagtggctgcttctgcacagcgtggctaatccatccgttgataacttccgagtccaagatatggttgatttcctcattcaaatccaatatgcacctgaaccgaaacgtgtgtatcaagggggcggggtcgcggagctcattcagcctttccatgaacatcttgaacgccaattccgtctcttgatcatagtgctcggtatctctccgcttgaactcgctgatgtcagcgttgatgcagggcacggtgcgccagaggttgcgccaccgccgcgacagcacgcacatccgcacagcctggcgcatggtcaggaaggacatgatgcggaagacgatgtcgtcggggagggtgctgagcctgatcttgccaggcgacccctccatggtggccgagcacgcgcgcagagtcgtttcgtcgaacagatggcgcgcgtggaaactgcacacagaagaggaagaccaagaatcaggaacccatcaacctgcagcttaacttcgaagaaatatctgacaccgtaacacaagaaacaacggttacaacgctcgagcagtttttccgtgaagaacatccagagaagaaggatcgatgcaagaagagttgggaggaaggaaggaaggaaaggagccatacctcgaaatcgctcgctcaggcaggcgtttcgtcgaacaggtggcgcgcgtggaaactgcacaagacccaagaatcaataagccatgaatccacagcagcacaactccgagcaagattcgagatctcagcgcaagaaacaacgctcgagcagtgattgatccgtgaagaacatctagaggagggaggggatcgatgcaagaagagatggaagggaggagggagctgtacgtacctcgaaatcgcgattcgctgccctcgagcgctccggggaatgggagatacgcttccttcgccactgctactgactggtggggacactgctgtatatcatagtaaaaaaaagggaccggtccggctgttgaaccggaaaaactggaactggtgaccatgacggctcggttcagcacaaagaccgtccccgcagtcggaccggtaaaaatcggataaaccgggtagtttttatggaccgctgaaccggtgcggttctgtagaactgggtggttttgtgtttggacacacaatacccttccttttgcttgccttggtcgttggtactatgaactcaggggtaatattgaaaaatggataagccaccctagggtttttgacatactgtagaaatttggaccgtcatccagatccactcaacctctcacattctcaatttctctaagctcaaactcaattgctgaagaaacctttttaatctcggtttgtaacctccagtagtcccgattatgcaaccgggactaaagattttcatctttaatcctggttgaaataacccggactaaagatggatttttagtcccggttggtaacataaggcttttttttccctattttacatatatcgcgctcgatatctcctaatcattaaaaaaatatcatctcccaacatcccaaattatccacaacaacattctcaaatcaaatcatccacaacaacataatcattctcaaatcacaacaacatactcattctcaaatcacagatcgactgaacaaattattctcaacaaacaatcattcacaaataacaacgaaaaaagaaaagaaaaaaaaaatccaccgcctgccgccgctgggcgtggccctcgcaccggcctccaccggacacggcggcctggccgggcgcggccccgcagggcgccgcgtctgtgacttagagggagagggaggaggaggaggagggagagggatagaggagtgggggaggaggagaaggactgaaggagtgggcgttgtgcgtgaggagataagggagagagagagagagtgcgtaaatcgtgggggagagattatttagcccggttggtgttaccaaccgagactgacttaagttcgttgggggccttccaactattgaaccgggactaaagataaaaaaaatagcgctaggcttttaaccaggactaaaaatattttttagtcttggtttttttagcaaccgagattattgtggaatttggccgaccgaccaaagatgatttctacagtagtgtaagacctacccctactcactgctgctcaagttttccccggtgcgtcgcgccttgtcgccgccacctcgcgatttctctctcgacgcagtgtccggcgacctcacatcaacatgccacaacagtagcgcggcaagccggtagcacgaagttgccgaggtgccgacggccgtcgcggcgtcacgccggtagcagagcaagccggtggcaaggttgaagggcacatcattgcgagttgcttcgtgttctagcctcaagaaatatatgtgcatgtgtggttgattagcttattgcaccagatctgttgctagctagttagcctagctgcggaagtgcaggtgtttgatttgctctgttgatcacccaatctagtctaaaattggtattacatatacgatgaactttattggctaccgatttgttttctaatccattagatttgggagttgtgacctgatgtttatccatttgcagcagtgaattctttatccactccagaatcactaccaccagttgtgccggttagattaaccacaatctcaagaggattgctctgctgctgaaactaaacaagaaatccgttccagtaaaaggtcagagggaagactgatcctgcttgggaccattgtgttgaacttgtccccaaggataaaactaaagcaggaaagccaaaacttttatttttacatacatattcatcaatatctggtgtttctgtatataaaataatacaaaacaaatataatattaataaataaaaaggcagcggttcgaccagtgacctgatggttggaccggtgaactggtgaaccagcaacttgaggggttcgatctccggtttggtatttttactatacttgagatagagatggacagttcaggttgaatgaacttgtctgctgcaatgaaatactccctccggttatctctactacttaaaaaaagcctagtggtggtcttgaatagggtttcacttatcgtgtggtaaccgcgcgattaccgcggttatcgcacttaccgtagggatacggtacaggaaaccggtgatatggtttggatgaattttgaccaaattcaaaattctggaaaaaataaaaaaatgaaaaaaatcatggatgtaatgccaatgatgatgaatttttttgaaatagggtaagctaaattcaaatttgagggcgaaaccgaaaatagtttacaaattagaaaaaaaggaagacaatatcggtaagaatcctacgtattcttccaattatcctcaatttctagttttctacacatattcaaccgtattttcgatttttttgcctatttatttttcatttacgtgatttcagctgcacagcccgtgataactgtgcgaatatcgcggttaaccatgcggtaaccacagcgaagccgcgaaaccaccgagttttgaattcgaatttttggatgcgattttcggcggttaccgcgctactgggtgtgtgtgtgtgtgggggggggggaaggggtaaccctggcccaaacgataaggtaaatcttggtcttggatcctcaccctaatagacccatcgcccaatcaacggctcagatcgtgtttcagtcgataaaaacagtactacctccgtttcataatgtaagtcattctagcattgcccacattcatatagatactaatgaatctaaacatatatgtgtgtctagatttattaacatctatatgaatgtggataatactagaaagtcttacattatgaaacggtgggagtatagaagaaaataatagactgatattttgtttagcacagctctcctaatcggccggcactggcatatagtatatcggcaaaagtaaacaatagtttgacataatcatatctggtcccacacaaaataagcaaatcttaactgaaaagaaaactataactaataagatcgggcattgcacgcgctaaataatcagctgcaaaccgacaccaaatcgccatgcttcacgcggtcttcacgcgcatgcacagaccggttgcatccaaattctcctctctcagcaacgtgaaatccttctgtgcatctcctgcttcttctttttaaatcaccagcaaacctttgactgcatcgatcaatgcatcctcacagtccaagattccaagtacatagctactccctccttccctaaatatttaacaccgttgacttttttaaacatatttgaccgttcgttttattcaaaaacttttgtgatatgtataaaactatatgtatacataaaagtatatttaacaataaatcaaatgatagaaaaagaattaacaattaattaaattttttgaataagacgaacggtcaaacatttttaaaaaaatcaacggcgtcaaacattttgggatggagatagtactaacttctcacataacaccaaatgataaaatgaccctctaacttactatacaaacaaccatccagtacatcacaaattcctatacaaataaattgaggccctctttgtttaggcttataagccaacttataagtcgaaaagtctaagcctaaacaaacaagtagcttttctgtttggcttttttgaagccataagccactctaacactattaagccaaaaactaggttggagaagtgtttttggcttatgtgaggtagatgtgtgattcaactactaaacttaggacattaaatccaccggcttataaatcatataagccaataagctgacttaaaagtctaggccaataagtttaagcctaaacaaaagggcctgagtagattttccaagtaaatcagttgcatcatgcatgtattctaaaataatctcgcctgcacatatacactactcctagctgccaaggctatatatatacatgcacccatggtcatcatattgatcccacgaacagccagcccaggcaacaaccctgtagatatgacactcgacacaatgacgataggcttgccagtaagagaaggtgtgagcagcgcgaagctcaccctcatcgtagcgtgttttctgctaccgtttcttgtcgaggctgaatcgcgggcaccggcgccactctccttcagcttcgacttctccaattcagccagctaccgcctggaggacctcctgttcgagggcaacgcaagcgagcccagcaacaagctggtggacctcacctgcaacgagttcgcggagacgatccacaagtgcaaggggcggatgtcgtacgcccacgccgtgaagttctacgacgccaccacgggcgaggtggccagcttcagcacgcgattcaccttcgctatcgccatcagaagcgacatcagcaacccgacggacacaaagggggacgggctggccttcttcctcgctgcttacccatcaacgattccatcgaattcagatggaggcaaccttggcctccttgccaccaatcattcgaaggcctacggcacagaccggttcatcgccgtcgagttcgacacatacaacaacatctgggaccccaataagacctacgaccacatgggcgtcgacatcagcgccatcgagtcggctaacacgacaagtttgccgagctacagcctgaatggcacgatgacagcctccatcagttttaacagcagcacccggatgctgcttgccaacctgcattttgatgatcatccatcgtttcaaccggccgaggtcagtgcgattttgccggatccggtcacattgcttccacaagaggtatccgttgggttttccgcagccaccggcggctctggcagtgagctccatcagatactttcatggtccttcaactccactcttggtttggccctctactgctaatccacgcagaggtatattctccatcacaatatacattttttgtctctatttaaataactaattaagcactcaatctagttagaaggaaggagtaaactactggctttcatgtcttacatcctcgttaaatatttatacaaacttgtatacttcaggctgaatccaatggaatataatggaatacttaatagctgaatgattcgagacacaaacaaatgaattaactattacaaaattaaaaagcggattaaaaatagtattttacaatattcatatgtacgagtagatagtatttttcatataaaaaaaatcacactatttaagagcttgggaagcttgcatattcttgtttcattccgttatggagaaaagcacactcgagaacaactgtcttcagaaggtcggaagctcaaaggtgaaatacatgaaacgactagcagagtgcatgcatgtgttagcaaatttatggaataaatgatgaaagaaacgaagttttagcgaccttacaactaaaccaaaataagtataatgccacactataaaacacttcttacctagcttgcttagattgataaatgtgtcctttgttgagccttccattgctgcacctaatatttacgcggaatgtgtatactatgacgagagaacaaatataacgtactgtagcagcaacaatatatataatagcatatatatgatcatagaatgattaaattgttctaacatccagattaatgttcttacttctcacttggcttgcttctgtaacacgttctatggatgggaacccaacaaaagaacttcaaacaatatatcacaataatcaaccctacatattaattctaaacctggtatttatctcatgtcctttgttctagacattttttttctgtttttttttaaaacaaacctgaggctaaaggcctcaaaatatattactaatagaaatttgcaagctgagaggacagctagataagcaaagaagcccctaggaactgtgcaaattacacattgagcaacaaaacagcaaagaagggcattagagaagaaactgaaaaagcaatcaggttcctaactctgtttcctccacggcaccagccgaatcgacgacgatggcgatggcgagaccagtaaatccatggcaaactgcaaaaaaaaaaagctaaaacacgaaaacggaggaggaaaaaaagggacggagtacggactaaggagtgcggttggaaaagaaaagttgggtggggtgggggtgggggtaggttgtgaggggagcgtatatagttatggatatggagatacgatcgactatatagtgtattataatgatttgcggggatgatttcatactatatatagtactaatgtgttagtcaagaatatattaagaagcgttcgcgaaggctacaacgtacggatgcttaatgaagtgccattgtcgacctagtggcctactgggggattgcaaatggatgattgaaaacgctcaaggccttcatctccagggaggttggtagggcacacccgctctagctttgtgacatgcatgcatatgtatagatgcatactgtatattgtatatgttaccaccagtaattagtagctagggatatactccatccgtcctataaaaaaactaacctagtaccgaatatgacatattctagtactacgaatctaaacatatataatattacatctgattctagatacgtttttttagggacgaaaggagtacttaaaaacagtggtagaggaaggaacttataaagactagggcataattattaatgcaatttgttgaaccttcaaacttcctacaaaatttaaaagtattttcaagagaggagacaagcacaatagcactgttttttttgaacgcagagcacaatagcacttttaactctttaaactactactgcatatatttttactcctttcatctgaaataacttatttttttatataaaccagaatatcaagctaagttacttttaggacagatggagattttacgctaagcgatggaaaacgatttgattttacgcgctgaacctaacggtattttcttctcgctgtacaagtcctggtaggacgtcactcatcggctccatgggtcatatatcggcccatcaaacggctaccggctacgcactctgcttactgacatgaatgccagtcacaggtcacagccacgtcagccttttccccttcgtgggagacaagatgagaaaagttgttcagcaattaatttcaacaaaagtcaagacctcaaccttagggtagtccctcccttcgtaaaaaaaatcaacctagtagagaatgtgatctagaagagaaaaatgtatgtatgttcaaatttattatactggaagagatgaagtaggtcgatcctaactcataaattattgtataaatatggagtttgtataaaactcagtggatggtttattcaaaataattttttatctaatcacctctcttaattatctcttctttcattcacctatccctttgtctttgttcttgcttcatgcctaaagttattttcttgatgagagatgatttcatcttccttctctctccttgttaactcttttgccactttgtttttttatgtgacaaacatacaatactaggagaagggtttttccgtgcggttgaaactgattttcgcatgcagatgggcggcccgtatgcacccaagggtctacgaaaatcgcgattttcgcgtgcgggtgcctatgtcgcccgcatgggaaaataaaaatccagaaaaaaattcaaaaaaaaaaatccaccggcagcgccaccgcctccttgtcgtcgtcgtcgtccgaagacgctgcccgcgccctcgtcgttgtcgccaccggcttccgcgccgcacgccgcctcctcgtcatcgtcggccggggatgccgcccgcgccctcgtcgtcgtcgccggcggcctccgcgccacctgtcgccggcatccgcggtcccctccagccgcaccgccgccgaggcccctcccctccgccggatctggcgagggaaggaaggggaggggaggggagccggatccccaggggggggggaggggagggcagggcggccggccgctggatccgtgctcccgtcggcctccaggctcccctccggccacaccgccgccgacgccgctcccctccgccagatctggggaggaaggaaggggaggggagtggagcgggatcccacgaggagagggcggccggtagccggatccgtgtggggacggccgccaagcaccgtcaggactcggggagaggagaggacgacatggaaaatgaggagaggagtaaaagaggagaggagaaaaagaggagaggagggaagaggagagaaagaggggaaaatttaaagtgggtaggagggaaagaaagggtgggtatttttgcatgcggctttcttaataggtccgcacgtgaaaatgggccctattttcccagacgcgaccagttatggtccgtctgcaatctaaatgactctatatctaggaaaatcttttgtgtagtagtgatatatataatgttatactaaacactacgtgacatggagagttgggactacccttaggcttagaggatgtgccctactacctccctatcaaaataagtgtattaaggggttatttgattgatgactaagtttgtcacatctcacgttaccacaagtgtgtatcacctcctatcatatttcttttcatttacctctaattaacctctctctcacttcaaatcacacccttatttaatgtactttctctattccaaaatataagtatttctaggttgttaagcagatgttaaggttaagaagaaacaactttggtgttcctcaataaagctagaaatgcatttactatgacatagagatatagtaggttataaataaataaaaatattcataagaataatgatatattgtaaagtaaaaaaatatctttagaaaatgttgtccaagcaatacttatgtaaaaaggtttttgagaaatcatacttttgaaagtggtagtaataatctatattatctacataattaagttgtttagaatagggcacaaggtagcaccatttgatacacttagatacataatatatgccatgtgttcttaatttataattaacctaagacattgagttgccaaagtttgaaccctagtttgtcatcatcatgcatgtgagtacagtacaggccttgcttgtgtcatgcaagagaggtaacttgcacaaaagaaaaaaaatggctgatcagaatgaataagaaaaacagaattcgttgtacaaaatgtacaattttagctgattgaaaaattatgaaaattaattagatccctgaaatctttttttccctgaagctacaaattaatcaacacgaaaactataaaacctctgtgaaagacctctgcatgtggatcaagatcctgtgcagttgttattataagtgtaacttaagcagttatatgtgtatcaaatgatctagaatggaaggtcaggatatgaagcggtactgtagcaaaaatactgtagcagggatgtactatattatgcctttactgtagcagtcatctagagccgctagatctgaaaacgaatggccacgattgtgtgcagttgctattgtgcagttacaatagcaactgcatttgatctcaatcctctgcatgtactacatcatccccaaaagacctcatttctcactgtagacctcatttttcactatatgaatatcggaaagaaaatgttcgtctagattcatagtcaaagttgaagtgtcttttgaggacaaatgaatggcctgtttggcacagctctagagctagagtccagctaaacaatttcagctccatctaaaatgggaacggggatgggtggagcgctctcacagaataaactagaggtggagctgggtttttttaggctgttccacaactccgatccactacagatccaactcctggagctaaatctaggagtttgagctctatcaaacagacctgaaagtatataatacaacacttgtcattctaggttgtttaggataaattaaggtttcataagaaaagactaaagtaacccttattgattagaagcggaaggttggttgaggatacaatagaaagaaatttgaataagatgtgattgaggggacgattagtactttacagtgacaactattctggcaaagaatttgcaatataactattttagaacttagggattcatacgatccaacatgcatgctgtgtatgaatcctttcttcatgaatcttggattcttggaggtgatcaggtcagacatatgttggcattcacccttgaataactattacgttccaaaacctgcagtactgccacatgaatgcagacatatacccctactatatggcatagtactatatggtattgtcacttcgattaatttgtaccattccttgttttttcgttttttctccttttcccctccgttccccttcttttcctttttttcctcatgcactctgttattttccttttttccttctctttggagccacgagtaaatattttactaacaaattactctcacctaatcttcttttagtaaataattttttttctttttttcttcttttttttctcatgcactcgttattttccttctctttggagccatgagtaaaaatttgactaataaattactctctcaccctaatcttctttcagtaaataaattatgggctttcagtcacactaagtatctaccagcaaatcaattactcacgagtatattgttatagaaaaaaaatattccagtgttatctcaataaagaaattacttccgatagaaaaatctactctggtcttcacttattaaataatttacttcacacaaaatctactgcatcccttatctcagtaaattaattactcataaaatttactcctctcagtaaatggattacttttactataaccattaatttttctggctttttctcactcttataaaataatgcctcctgccttttcccaataaataaacaagaagattgactccggtattctcttagaaaataaatttctcccagactgcttagccacaaaatttactccaatcttctctcattgaaataagttacttcccgactgctggagtaaaatatttaccaacaaatcgatatagccaaaataaattacaaccatatttttgtcgactataaaactacagacatgtttacaaagactcaggggcacaaacacatatgattctacaattaaaaaaagtagactcgctgctccagttgcatctgcaaaggacaaatagtagccgatgatgacaccggcaccgacaaccttagaagttctgtgcggagttatgggcaggacttgtgtttggaggtgggtgttgggaacccatctcccatacacggaaaacagagcggtctgttagcacgtgagtaattaagtattagctattttttttaaataacttttgtatagaaacttttttgtaaaaaatacaccatttagtagtttgaaaagcgtgcgcacgaaaaaagagagggaagtgttgagaacttgatcttgcagacacacccgttggcaaccacaacagattagctacaggtagaaatcgatggaggaggccaatgacagctggctgtagctagctcatgcacgagcaatccccatcaagagagggatccgcaaaataacaatgaatcacaggggcttagaatgctcacaacaatgaaaccatgatcacagaaactaaattcaaacatgatcgatagaaatggtgaagtagtgagactttgatcttatcgacaagaacaatggttcgatccagtagataatgttaggattttagaaagaagaaaaaatgggatttttttaccatgctattcttctactgcaagtcatccgttatcctccttcagctgtgcaaccaagtttgtactcctagcctgcaatcaatgacattgtgcaataattgtatatagaatctcctcttgttccagttccaaattcctcaacactgcacagaccaattgacaactaaaaaaataaaatttaaacaggaaaagtaaggaggtgttgaatgcatcctgcaggaatttcattgtggtcaggcttgttgttagactgctggtaggaagtcagagagtcagatacaaaactgtagtgcataaaatataatctaaatgacccagtgcataccttgaaactgaatttgttatccagacaagcatggaagtcagattccttttccttcaaacgaacatgatcatgaggcctgaattcactatggttcttggtttggcatatattatgaagtgcaactagttggttgctgaaacaaatagtgtgcactacacatctaaccaaaaagaactttaatagtgacaggttaccaatctcaagaagctcatggttttgttttagagtcaattaagcaaactgctagtaaatcggttaatatgagacattatatttgtgtgtaggcaccaaacatatatattgaaggacaaatccaagcctgtaacctgacaatgcaggcaccaaatccattaatatcttttggagctcaaattcgaaattctggccattgttcatttgtttttatacctgccaaaagtagaatgatgctatttgataacatctgaatatgtactcccatctgttccaatttaatgcactcaaatttgacccaaattaatactgataaaactaggatttcttaataaatagatgaactctagtttttgacatggaaacaagcagcgctttaacacccatgaatttgatcaaacaaagaaaatagcacaaaatgtgcataatggagcacgtgcacattaaaaaaacacaatactaaaattttgagattaaatcactttgaatggtttgtaatgagatccaggcaattttagcaagaattatatagtgtggatagacatatacagatgtctaagaaaatcagccacacgattgcagtggaaaacatttgagtagtttagaatcaaactgcaaatatgaaactattacaaacatgaagcaagtaaaagcgggatgttggcactctgaaactgcaaaaaacctgaaacgcttctattatgtgcttgttgactgcaaacctgaaacggtggagatcgaccgagaggcgacgttgccgatggagacgagcggatccagacacggcatcgattgttggttgctgtcgtgcatgtatttcacctaggatggcaacaaaatcatgacaacaataattccagctgaacaaaataactacagcaaaaatgatttggaatggacgctctcagccggcgcccggcggatgtgcaggcgcgacgccgaaggtctgacgctctgaggcagagctcatggagactggatcttggggcgtcgttgagcctgaagccgaccggcagaggaggggcgtcgaggcggggccgcgggggggggggaatatttatacaaacttgtatacttcaagctgaatccaatggaatataatggaatacttaatacctgaaagattcgagagccaaacaaatgaattaagtattacaaaattaaaaagcacactaaaaatagcatgttacaatattcatatgttcgagtagattgtatttttgatataaaaaaaaccacactatttaagagcttgggaagcttgcatattcttgtttcattgcggtatggataaaagcacactcgagaacaactgtcttcaaaaagtcggaagctcaaaggtgaaatacattaaacgactagcacagtgcatgcctgtggtagcaaatttatggcataaatgatgaaagaaacgaagttttagcgaccttacaactaaaccaaaataagtgtaatgccacactattaaacacttcttacctaacttgcttacaatgagtaacgagtacttgtgtgagccttccattgttgtacctaatatttacgcggaatgtgtttactattaagagaggacaaattttacgttctgttgcaccaacaatttatattatacg

SEQ ID NO: 6918 - DNA, 28541 bp, Oryza sativa
aaaagaaaaatggtaatttagcaagccctagctaggaattaggatgcatcaatctctagtagttcttgaagctgcagctagtatagctcccaaccatttctcctcttccttttctttactaatatgatcagcatttcattaagatttttttgtatatagtatagctacctacattttctcttgatctgattatgccaagtactaattttctgtccattttactgatgatgatctggttcaattccccatgtgtatatgtactctcaggtggcaggtctccagtccgagctgaactacctgcaaggtcacctctcgacgatggagctgccgtcgccgccgccctacgtcgccgggccgaccctggcgccgccacagccacagccactgatgccgatgaccgccgccgccaacttcaacttctccgacctgccatcgtcgtcggcggccaacattccggtcaccgccgacctgtccaccctctttgacccactgccggcggcgcagccgcagtggggactataccagcagcagcaacaccaccaccagcagctgcatcatcacccctatgaccggatgggcgacggctcgtcgagcagcagaggcggcgacgacgatggcagcgacggcggcgacttgcaagcgctggcgagggagcttcttgaccgccatggacggtcgtcgtcgagctccaagctggagccgccacctcacacacagtgatcctcctcactgtgtgtgatcatcaattcagcttagctagctagctcatggactaattgatcaggtgttaatcattcatgaatgcattggttgaggcaagaagagaatttaatcccaatggtgaaatttttttcaccaaatcctccatgtcgttgaggcgaaaaatcgaacgacgacgacgacgatggcgaggaagacgatgatggtgatgttggggatggagatggtaggtaacaggcattgcccggttttcgcgtatcatctttgttcttgggctagggtgcaaggggtgcccacttgcaccattttataatgcttgggagtttgctccaaaagaggaagcttggggatgagttcttgttagcttagctgtagccctgatcactgttccattgcaacagttctaattgcaaaaaacaaaacctggtctaatttagttcaatatacaaaaaaaaaatctttgtctcatcgcagattaattacggttgtgtttgaagtttgtttgatttctgtttcaaggttctaactgaacatctgaagtgaagtgtagtcagtcttaatttgggactttctgatctctctatgacaaatgagctttttttttttgccataatatatacaacagctagcaagtagcaaaatgagcatttttggggttaatggtaactgaacatatatgtatggtggcaactgaataaagtgtgaacatatgtgagtacttggaggctagagccaggtgttggtttccttttacttgcttcgtgcttctacaactacaataatgcaagtattcatatggtgcaaccttagtcttagattcagtctggctagctagctagctatttctaatgggacacagtacatttaaaacaagcctaattaaactagtttatttctctatgaagagtcgtggtatatctggggctaaatgattggcaggggattatattttagagtttgatatatagatgagtgagagacagacaggaagcatagctttggtgggacatctttgactaagaccatgcagcatgcacacaacaatgttttctctccttatgtttcttgaagttatatcatatgcccttgtattcagggactcctttgttatcaattgttggaaaatgacaagcggttgggatatgaataatatgatgccataggaaagtacatgtttcagtttagctagctctttaatgtgtccaaaccgcattgaaaagtttcatgattactactagtccatgtaggtaactaattattaccgtaatgaacatgcatatgcatatgagttaattttggcatgtactctaagctaatttaagatgatgtttctgtggcgaccggccatgcgtgcaaatacatggtactatatatgcataataatagggatactgctactagttaagtaagttaattatgtgtctctacattactctttgattcgttaattaattagacaggtcttttttttcttaaggaagatcgtcactaccgtaaattatcaaagcagggtaaatttgacatgtaactatggtaagttagtaactattataactagctggtacctagcatcaataatattccttgtaacaatattatttctgcaacttttgcacaagtaagaatataaacattaataggaaacaagtattatttgtacaaactaaagaatgtaataattagttggatcattagtaatgcatttaattagctttcttagaaataagagcattaatcaacagttgtcatatatgcaatgaatcgtgtcattaatgtgtacattttgcgtgcaaggatcgcaaaagttccatatagctgttactattctttgcaaatttatcgtgcgtgatatcaaatgtattggattctcctactattagaattgatacataagcgacaccatcacacatgagaacgtcttttcttaatatatataagcacaagatattagctagatgccaaattaaatacttgatttccagcacttcatagatattagttacctttctcaagtttggtgtgaaaaaaatgcatatctatatatatttgacagtattttagtagaataatgtgagtagctagctggaaaagaatatatttctgcatgctgcaaatatatggtaccaactgttcagtgctaccctgaactgaagtaaatgtcttattaatgaagagccatcttatgttgttttagaaattctatatgtagtgttggcattgacttgatttacacactatagtgttatatatgcttgtagctgcacaaaagtagcttttagttgctggcatgtcaatttaccaaacagaaaaagagacgttcaatttgtggatgaaaaaaaaaggaatattttttaaagacgcaagtttaacacaattcaaaatgaagcctttcgatgttgagtttaagtaatctttaatttaaatataaaagaataatggtagtcagggttaacactgcacaaaaaagtgaccttggtcctggtcctaatgaagcggtttccttaaaacctgctagtaaccacctcacagttctcaatgctatgaagaaattaaaaagtcggttctaaatcaattaaggtaaatcatggaagaatatagatgtcttacgaaagtaatctgccccaataagcaatagtacagtggtcagtggagatcagagaaataattttgtgatatggagtttaaacattggggtagcggaattaaactactatttggtgtgaaattatattaagtaggtcagaagcatccatacatagtacttcttctgtcccaaaatataaagagtttcggttgaatgggggcatatctaagtattgcgagtttggacaggctacatcccgcatggaaaaaaattgttgtttttcatacctttttgacaggcgggtgagccaaccacgtgaaaaaagtttttttttcgtagtgtatccagtagactgacatgttagcccaatggcgaaatcggccctagagcaaataacgttggaggcaatataatggatcaaacagagatggtgtagcagctagccgtgtgggggccaagggcttttggaggcggctattgcaatttcggtttgaaatttcggatcccaccggcaaatcaatatatcaaccaaaattttcgggatttctcaaatttttgttgcagttggtacaagtttattcaaattcggtcaaaatctatcacaatttccaaaaaaaaaggggtccaaaaaagtaccgaaaatcatgaaatttcataaattttggtcctaccaaaatcgaaagtgtaaaccctggtgagagggtgccagagagacactgctcaagggataacgtggcatctcaaagtgttagacaatatatccatccatgatgcatgatggtcaaactacactcaaattagtgagatcaaggatgcattcacacctgtgtgagtgtgatattatgtgtgtgtattgtggtatgtgtacgtgtgtactaaaattgtcttgtttggactgatgagaaatgtatacttaatataagttgagaataaaaattagactgtaataatttttttgtagaaggactgtaataataattgagagaagaaaagtatactataaaataactgctctataagacctattctccaactttacccgctatgaccaaaacaaaaattttcaggatacccaaagcacctcccacgatgccggtaagagttctaaaatatatatactattaaagatcttccttgtagatagattgaggtttcagaaagcttttagatgcaaccatacttttccgaaacctgatttatttaggttgccgaatatggagtattttccaaattttcggaaatatctaatatatcaagggtgtattctccttccatcataactatttattgacaaactccaaacaaaattttggaatttaaacaataaatataacttagggtgtgtttagttcctgaaaaaagttggaagcttaaataaagttggcagttcgaaaaaaaaagttgaaagtttatgtatgtagaaaagtttttgatgtgatatgatgtgatagaaagttgggaatagggagaaactaaacacggggccttgtacaatgcttagttttgaaacataaaaataataattgttgtaatcttaaacctattattttattatcttaaacaatactccctctatttttttatagatggcgccgttgacttttggatgcacgtttgaccatttatcttatttaaaaatttgtgcaaatgcataacatatactccctccgtttctaaatattcgacgccgttgacttttttaaatatgtttgaccattagtcttattcaaaaagtttaagtaattattaattcttttcctattatttgatttattgttaaatatacgtatatgtatacatatagttttacgtatttcaaaaaaagtttaataagatgaacggtcaaacatgtggttaaaaactcaacggtgtcaaaaatatttagaaacggagggagtacatcatgcttaaagtatttttcgtgattaaacaacttacaacaaaataaatagaaattatgtaaaaaagttttaataagataaatggtcaaacctatattcaaaagtcaacaacgtgttagtatatcattataacggttgtaacataagagattagcgtgaattaattgtgcctccttgctatttagtgaaaaaaatacaattggatgcacctctgatgtttttttttcaatgaatttttatattccatcccttcttattcaacttttcttaaagaataattttgtttcagcatttatttaactcggctgagataaaaataatgaatctgaaaaataaattttctttcgatccgcacttggctcaacttggttcacacagtcacacttagcccgaaaaaagtctacttgactccctcaaatatagatctaatctgatacatagtaccattcagccgcaataccggatacctcaacccccaagtataaaacagaaaaactactcaacagtatcctgtacacacgggataactactaccactaaatatctagcatcttatcctcttctttatctcttcccattcctgtcccccccctctctctctctctctgactaccacaacgatggcggctagctgcacgggattgcacgttgggcgtggaggacgctcggcccgctctccttcgccggcgtcggggaaggcggcgccgcgcagagctactcctgccgactcaagaacacgcggtgcggcggtgcaacggcgtgccgcctccccatggcggcggtgttgcgccactgctcgcatccattccttcgatacctgtaggtacccctcgcactaccttccactctgcctgattcctcccccccccctctctccccggtcggcaatgcttcaccgccggttgaattccttttctctttttttggtagatgatttcctttgctgatttttttctccggcttatatggatagtatcgattcccctgtcctatcctcttgaatctctccgattccacatgtaccaggtactacacaccatgcagctggtaccatactggtaccaggtaccagcctgtgatgtgctactccggttgcagaggagtgacgccggtgacgaggtatcacgcacgcctatggtacgtggtatcaggcaggggcggatctaagagggattaataggagggtctgaacaaactatacaaaattataggccctcttctaatgaatatatgacagaaaaatttagtgaggtcttcatgagggatctcatggttacaacacgggtagtgggggctagagaccccacagaccccaccatgggctagagaccccacagaccccatggtggatccaccactgctgatccttgatggtgttgtcgacgtggccaactccgcacaaagctccttcgtggcgccgacgcaatggtggggtggggagagaacgtagtgctggtctcgtgaaggagatgaggcggcccccaccactagcctctcctcgggccccctctcctcataggctgtggagtccttgcggcgacgcagctgacaaggtcctgaacttgagggtaacgtacgagcctggggagaagatctggccaccctggaggagccaatcctagtggagaagtccctgagctgcctcgccttgcccgctgcatccaccgctccccgcggcacctccatcagcatcgccgccgccttcacttactgcttgttggggaaaagatagagaaggaagaagggggcttatatgtggacctcacctgtatttttgccatcaatgtagtggaccaagtcaatgtgtcacgtcaacaaaaactactatcaaaaccgctgagggagtcaaatttcactagctttaataatgagggcagctacacaacgggatcccgttgctacggcatactttaagtgacttatccctttcctttcttctgtataggtgagatttcacgtagtgaacgtgtgctcccttctggtacctggtaccagtggtggatccaccatggggtctgtggggtttcgagcccctactacccctgttgtaacgatgaggccatttccaacccaaaacattagacatagtttccataaactccacatcatcaagaaactagtagtagacaccactcttccaatgcaaacaccactattctatactaaaatttaatggtacttatctcacatgatgtcttggatgttgtgtagaaaccatgtctcatgcaagacatgatttccttctctttcctcatttattcacttgccacgttatttttcatcctatgtagcagcgtatttaatactatggacaacatcttagtcattgggttgggaatggcctaagatccctcatgaaggccccactaaaattttctgtcatatactaccttcatcttgaaatatttgatgccattgacttttttaaaaatgtttgaccgttcatcttattcaaaaaaatttaagtaattgttaattctttttctatcatttgatttattattaaatatacttttatgtatacatatagttttacacatatcacaaaagtttctgaataaaacgaacggtcaaacatgtttaaaaaagtcaacggtgttaaacatttagagaaggaggaagtattcattagaagagggactataattttatatagtttattctgatcctcctattaatccctcctggatccgcccctgtaatgagctactaccgccgacgccgacgatggaggagtgcgagctcatgttgctcgtccaggtcaccacattcgcgtgctgcagcttcgtcatcgggttccggttcagccgcgcggtggcggatgacccgaagtggcgcaatccatggctgtcatcggcaacctcgcccacagcgcggatggattcgccgctgagctcgtgtggggccgcgacgcgatcgcgaacccttgccaccgctgtcgtcagcagcctccccgacccaccgatgccatcgacatctccgccgactacatcaaccacttcaagagccagtacacacatggcggccgtcgccaggtgctcggcgtttgaggtgttgatcaccaagacaccaaggcgtggcagagccggagacgcgcggcggggttcgaggcagacaccaccaccatcaagaagaagacaggaagaggaagaaagaaacgagggagagagagagaatgacatgtgggccacacaggatgacttagcaagataggccggatcaagcgccacattagtaaaactgttgagagagttaaattataaagttttactaatagttagggatcaagatatctgatattacagtttagggttataaagttagattggagctatattgagagagtaaaattggacttatttccgcttagccctctgcttttccgcatgcatgggatggcctggataagttggcccaaatcaacagtgccacctagctcactttgtttctgggccatctcgaattcttttctctttttttttctactgaaatttcgaatcattttccttattaactaaatttataatacatcaaagttaaaaaaagaaacgtttgtctcttgattaaaaaaaagagaattttgttgatagtacagcagtaagcaataaagtgcatctgaataattagtatctcaaatttcatcactgtatttgggtcaaaagaaattcatcactataataacttacgataaagttgttgaattttttattctctaagtctacattgggaaacacgagcaataaacttacgtatttaaatataaatattgcactgaaatgagaaaaaaaaatcttgattgtctgttgtatatataagtaacttgtgttctcgaaaaaaagggggaaaatatacaaaactgaactcggttgcagcataaaactgatattgtttgaactggggcaacacattacattccaaactgttagcacacagagtatccaaatactttacaatcaaaaacttgacagcaaactccaaacttttttcaggttatctgtacagagaactaaccaaccacaacacaagctagcggttaactgaaccttggcaagagaaatctcttcacgctaacaacattaccttctcaatcttcatcgaggtagctaggcaaatttacagtgaggttccatgaggtataagcagtaacagcaacccaaaaaaatccagggcaaaggatggttcttagtactgacggctgacaaccacactgaatatggatacagctaaaatctcaagcaaaaactactagaatctggtaagtgcaggcatcatctacataatacacaaataggtggtaggttttgttggcaaaaatatacacctgcagtgcttgccacgacaagcaaaacaagctcaaaagtcggttagtattcgctcttgctcttcgaaaataaccgactgaaacctcggctctgtttctctgtgaactggttagtaaatgaggaagaggaagaagaccttgatctgtgctttggacgcttggagttgtttggagaagcgaagtaagtgtttccatcaagattggaggggcttttgtgtgttctatatccatttagcggagatacgtttcctgttcccggtgcacttgagaatgtgtgatctgtatcaaattgacctgacagcttcttaaaatgcaagccttgggttgttctagcttgatcttcagaaaacacccccacaggttgttggtttaacacagaacccagtggttctgctggaggggggcgaagagtctgcagctgacggccaagaagcaatattgtctcctggcattctgcaagcttctctgctgctgctgcgatctctttgtcctgccattattttaaccaagaatatattatggaatacacaacatgaccagaaaaaaaataatgtttaaaagaaagaatttgaaggacactgaagcgtttattgtccaggaagtatttattcggagagcacaagggaataaatgtgtaattcatgtgtttggcactatatgagctgatatagtataagagattatcacagatttctaagaaccaattctacgaaactatagatttgggtgcaatgttttgtgcataactatagatttagagcccatgcaacaagcaattggtcttggcactatttggcaccttctaagttttcaccaatttgttgaaatgttggcttgtgcatagcaggctgctgacacagacacacgcatgtcataagtattgggcacatagatcagctaaaaagggtctaatgttgcctctcatcactcaacaccatagacacacatggacacttttctataggctgttggatgcactgggacgcatgatttgaggctgtcagtggccaggtctattagaaccaattgcaactttaacaaggaatattaaagttcagagaaatgagcgttaatagttatgcctgtacatttatgaaatttattccatatttaatttttggggaatacgcaaaagactcgcgtatctttgtattgagaaggaagtttcagcagtacaaggtccccctaactgcaagcagccagctcgctacataggtgaatttctcgtggtatcaatgctcgaccagcttattctatatttaatgaaagaagctggagtaaacaaactacataggtttataatcagttacgaacatgaagtttaggcttagtaatttttacctgctttattttaacacctgcatcctcatctacagatgaagtattcttctcattctcataccttcatgacataaacaaagtcaacgaagaatctgttaaacatgcaacaaactaaaggaaacaagatgataaaatagtctatctaagtcctttcaacaaagaaaaactaaggaaataccaaaatggaaagacaggtatttcacctttcaatcttctccttaagatctctgtacttcgccaaatcgtcctgatggttttgtctttcatcagcaagttcagttctcaaagtatttatttgtctatgcataacttctatttcactttctaatttcaacttgtgtaactcaagtgatttgtatgattcagccatacacttcagctgtgtctcagtcaagctattcgatttctcgcatgcagataactttgacgtaagctcttccatgtttttctccatcagactaaactcaagctttctacattcgatagtttcattgcactttgctaattccatctccaatttcctcttctccgatttcagttgttcatattcctccattgagcacatctgcactgtggttttgacaacaaatgcatccctagaaccctcaaagtcaggatcagaagacgaatgaggcgcaagtgaacaaatatcagcaaggctatctttaattggctcatgatgcactttgttttccaataaggtcactttatcaacatagtccagattattgctctcggtttcagtgatgctgtctctcggcaatgtgagtttaatagcagaatttcctgccaaaatttccggtaatgcaatcaccatttcggcaagagcattttcgtttagcacaactttgtcagctatagtggagaacttttctattttctcaaggattgtgttttggtgggaacttttaccttggacctcagatagttgtcttttaaatggctggaaaaaatcaagaatttccaaaatagcatgtcttagaccatgatccacatccctcaggttcttggattgctttgtcaaagatccattatcagcaagtccattcatgttatcaggctgattcttttttgcactcactgattctgcttcttccttgatatctcttaggatatttctgataccctctaggaccttgccaacattgttctgtggtgaatgagaacctaagagagaagaaattcttgagtgcaattttgaaagtggggagttctcaggcagatgctcactgctggatggtgtatctgggaactgcgaggatggccatgaatctctatcactttcccgtttagtgatggtagtgagagttgtgtgaactttagtggccttcttcttgtcaataaagcttccacattcttttccttcaggagataaacacgccaacctctccatctctagaaagtcatccatgagtaccatctgattggaattttctgtcaaactgcccttacctccattatctttcttgatgtgtgagagctcagatatcaaagcattggcccaagattcggcacaacttgttgcatcatcaactccgtcttcggacatggaagtcagacttggtgggttacttccattcaggctcagtgcaccatcatggtgaacatcaaggtttgaatttgttggattcttatactgcctagcactcaccatatgaacatccatgctgcggagcttgcctgctgtcttagcacatgtgtttcttgacacctgcaactcattattacgctttgacagcgcctcttttaacatctttgtttcatcctccatcgataacaagcgtgcagtcagaaattcattctctttctgcatgtgctgcaagttttcaagagaattatcaggggatggtgacaaaggatgatggaaattagaactccttgaaggggagcgtcgcaatctgttatcagcatggtctctgccccagctatccacttccagcttcatttgagctaatgcagctggcccgggtaactttttccgaacaagaccacgtaacctttggcactccgcttccagttttgatattttcttgacatcctctacatgttgcttggttgctacatcagctgaacgcacactcatgttcttttcttcattgcgaatttcaaattctttggaaagaacatgtagttcatacttcaatgaacttatctctttttcaccagattgaatagtgcctttcaacacttcgatctgagattctgcttgctctttttccccaccaaccttcatcattaagtgttcccgctcttcaagagatcttgagagtgcgtcattctcagcacctgctctaataagctcatgttcaaaagaagctaattttgcttttagttcggccttcatcatctcccactgcttggtttttgcaaagacaacatcttgcacttttgctcgctttcctccttcactgtcctccttgcttcatacattccttgagagcaccatccagatgggcagctctttcctcagcggctagcttagataatgtaacagtttctagttgatgtttcaacgccaaggcctctgcttcagctttctcccaacctacaatgatggtacacgcattaatttacaaaatgctcctggagaaaattcagtcttactacttttattatgggagtcttactactagattactagttatggttactacagattttattgcatcaaataaaatgttatgttgcacacctccagtagttactaaggtatataatagaaatgaccaagttcaagatcctggggagaaatcatgatacagtacaatttactcaatagtctatccaacaaaaaaaaaagtaaagaatagcagcaatcagcttcaaacctgatacagcctcttctgccactttgacatgctgctttactaggctatctttggtagtaatatctgattgtgctgcagatagtttttcattcaacacattcaccttatcacatagaatcttcacttgctcttctgattcagtaagatttgtgtatctttctggtgaaatctgcacaaattttggtacttgttcatcctgaaaaacaggaaaatagtttaagaaaaggataatcaatcaagatgagtatttaaccaccatgttgatcaaacaaacagcattagtttttgacatattaaatgaatggatgtaattgatggcatttagcactaacgataaaatcagtgtaccttaagtctaacgagtaaatgcactgcctgctacttaaagggtaacagcaggcttgaccaaaaagcaattttatgttagttcacaatctaaggtacatgacacattaccataacaaaagtggtacatgacacagacttaaatttgagtacatcagttgggtatcagtatcacataaagttaaaaatcaaattgaaaaagagcatctcttagtaaagtttgtgactagttccctctattttcctatggacaggcaggtgatgatttggtactaatgcaggacaaagctgtgtaaccatagcatattaatatgcagagatactgaaatagaaaacaagtcaatatactggatagcaaataaaaacaagcataattatttgggttgatgcgcaatatattcatttcggaaaaataaaagcatgaaaagtatcaagtagatatataacaaagaagcacaattttcccaacaaagccacacacaccatgtgtagtaggatgcttatcaatttcacaaagtacagagtataagggagcacagtataattctttggaagaaaaagggcagattaaagaagagccatcagttgtatatatgtgtttacaaaaggattcttgttaaaaaaagtgagtacagttggcgaataaatgaaccctttcatagtagccactgatgaccagattaaataaaagaataaaaacaaaatatgttgtttagatttacgaagatcattgacttaaaaaaaaggaagacaagaaagaagctatttttttctcatgagtgatgcatagactgaatgaatcagcatatcaactgatcaagattgcaaggaaggaaagccaaagaatggacacaaacctgctctgcttgaccggaactcttcaacacatctccagctgatgatttatcagaagacttctttttccaaggccagcttcttcgatccatcccccgctatctctctgatcaagtatgttcaataccttcagctagccaaactaaagaaaatgaagatctatcacatgatggcggcaagataacgatgcaggattcagaaggctacaaaagtaagtaaaactaacctatccagtaaccagcaaccaactgtacagaaaacagaaacgaaggaataaacaaccaatgcaactgacatataagtccaaacaagttggcaagcaccaaacaagctactataattttaggcgactcggattctacggaaaacaccgcagcaggaaatcaatttgcatatacaagtccttcagtcaagacctggtttattgctgggcacgcatggcatccaattcactaccatcaagacaaggacatgcagataatcgactcaacaacttctgcctcgtccacaagcatacaccttcagacataggacagatgaccttgcaggaggaagcacacgcatccaaagcagatgtaattaaacaagtggttaatactttagtcaaattgcacccacaatcatatagtacgcctatacatgacaacaattagccaccttcttaaagcaaagtaaccccccccccccccccctaaaaactgatccttaaagcaaacaccatgagcaatcaaactggcaatgcatctgtctgtcaatgtgtactgatccgcggtttggtcacgcggcacggatcattcatttgtcactagtacaccaacaccacactgttcctcctaaaccctgaaaggcacacagagaatgtggcctttaacaacaaaacaagacaggcatgtcaccatcatccagcctaccttaaatcaatttctcaatcgattagcagccacattgatccgatcatcgccacaagattgacaacgacacgagcgtgcgggcattgtcgcgtcaattagccgcaaccgcatcaaagtatcaattgtacaaccacacacacactttcatcagatcatggcaagaacaggctgcatcccacagggaaggacaccatgggtgcagacgcagccaatggaagagaccacagccacagttgccgggggccatggcatggatgagtaaatgtagaacatgcccccatgtgttcctccttgctccggccactttctcctgtacttgcaccctccattactggtgattgctctgctggggaggcaatgcatcaattgccaccggcagcagcagcagcaggaaagcgtaggattggagtaaaacccgcatgtacggccgtcaatggcagggattaatggccatttctggttaattcatttgtcgatttggggagattaacgggatttggcgttgcacttgtatctaacaatcggaagattttcagtaaaatggagggatttcatcaaggtttttgcggagccaacagcacgaaattctgatgagactgaatcaatttcgcaggagagaaaaaaaagaatcggccaagaaactgacacaagaaatcgcataggtgaatcaagaaaagaacctcgaattcaacttcaagaatcaagattgctgcaacccgcaggccgcagctaaacctccccaagaaaccgcgcagcaagaagagcaaagaaaaccccccaagaaaccatcaaaccatcagcgaagaacacggagagcgatgcttaccgcttagcaagcgagcttgaagaagcttcgaaccacccactccgggcgtgcgcggcggcggcggaatgcgggatccgatcggtgtcggtggcgcctcctcccgctttgcttcgcgcgcactcctgctctactctgctctgctcccaatctggggaggaggacgagacgacgcacgcacacgcacgcacgcgcgacggatcgatcaagactggattggattggattccttcactctcctccaccacctttactcctcctctcgctttaccctttttgtccacctgtctcccaccctttcttctccctcttctctctaatctaatctcatctcatctccctaatgccaatcaatcgatcaatcttggtgtgcaaattggcaatgcaatgcaccttcccccaccctccccatctgtctcctcctcaagcttcttgtgccttctctatgagtgataaaatagctcaacagcagtggatggatcaatggaggaggagtggggctcagcggctcaaggaaggtgagagagaaaagcaaggggaaaggtggagagggaaagagagagagagagagaatgcaaggaaaagtggagtgaattgttgttgaagctcaattgctcatgatgatggtgtgtgtggccacatggtcactgactctcactggctttggcactgctgctgctgctgctgatggttggtgattattgctgggttaattgcttgtgggttttacctttggaattttgctgtggtattaggtggtaatgctggttgtgatctcactgtcccattgacattgtctgcgtgtagcagttaagtgtaaacaatatacgtttccattgatacaggaaaaaaaatacaattctacaatctttgaagactatagtcagaaaaaagaacaaggcaaccacactatacgtctacgtctgattctactgctaaaaacaataagcttgttcaataaaaggggaaggaagcctccacatggaagaagtcgtgaatacatgactgcatgtttgcgtccatcataagtacataactttagattttgatgactgcaattagacacactcgggtgcaataacacttgaaatttagaaagtttaaggcttagttcttgttggattacttacttaaattatttaaataaattatctactactctacgctttgaaaaatacattttctcgaaaaaaaaaaattcttccaatataggaccagttgttttatattatttcttaattttatttattaaatattaaattattccccataataaagtagataattcaacgtaacaattcacttaattaataatttatttcagactaaacctgagtcgttaagacaagtttcaaactcggcatcatgactacagaagtattggcaactaggtaaatgcatatagtttaaccagttatataaaaatttcgtaaaatttaataatatagacgatgataatataaaacactttacaaaacatgcaattctaaatgcgatctacacatgaagaaaaaaataacaatttttatctgcgttgtacgggcactattcactatctaattttattattttgtttctctagttatagatcaaatatagtcttgcatgtttgtatataaacttatatcatcacaattagtattacttttttttatatttttataactatttgagtcacatgtatatgatgggtaccaagacacatatagcgaagaaaatcctggttcatcatgactaacaaagttattcctagtgtaaactatttccttggaaggtttgaacaaccatgctatggagtagtacccagattcttttctactcggatttggccactatatcataacaaggaaaaaaaggtagtgagtatgcactcaaagtccacagtaggtccacaactgttaacacgaaaaattccaccacatgctgccatcacaaatcggctactcatgcaagaaacccatgcaatacactgtgaccagaaaagcattatgttagattaagggatgtcaggacagctagaaaatgccaaaaatataaatatagttatattccaattgtgtgtaagtgtgatactgccaaaaaagtaaatatagttatattccagttgtgtgtaagtgtgatacagccgtcagccatgggaggaatttaatcatccatgtagggtgccaaacgactatgacacttcttccctcacgcgtcagcaggtaattactgtgaaatgttgctttactagtagttttagtaagtacggagtactagatttcttaaaatttgtttggtttcatcattaattaattgacaaagtttggggatcgtttaattaagcactaggattgtcgttatcattatggacgaggaagaatcgaacaaccggcagaaaccaaaaatgtgcagctagatgttactcactttaattatattactgaggagcaagctaattaagctagccaacgaattaaggcagctgtacagcatatgtgcacattgcgcttatgccaatttaattcacttcttgtcatctaaacttatacacacaacttaaacttgcaaactaaactgacatagtgtgaatgatggggaatggattctactaatcctcgagcagatattccatgggtatttttttctccaaactcaatataaatatttacaaaaaatttaaaacaattgacaatatagaatataagtggcatctattattttttaaaaaaaacaagtttgagaaaagaaaagataaatttggatatgatgaatttatttttttcactccatatgtgtgagttaattgtcgatttaggattttgtgaagtggtatatgtagtatatgtcatcaaaaaaaatttaaaagaaagatgttttatacttctttaaaagtctctagtagtggtggtggacatgctctcatgtctagatccgttgtcctaaataataacacatttaatcatagattagtgtattatgggccgaggagagtacatatatatttttgctaattttcataaatattaggatggtttctaacaaacgaagcggccaggacatcccctggtcgaatgaaagcgtacatgcatttatgttttcccatgtaattggaaaatacagctgtacggtagtagtattactccctcaatcccaaaataagcgcagccataagtttctgtatccaactgtaatcatccgtcttatttaaattcattttttaaaaaactaaaaaaatataagtcacgcataaaatactattcatgttttataatataataacaataaaaaaactaattataaaaaatggatacggaaacttatggtcgcgcttattttgggacagagagattatttctcaaaataactaatcggaattccccacggagctaactccgtcctaaaatataaacatttgtagcatagtgacaagtcaaatatttttaactttaactattaattgcaaagaaataaaaaagatcaatcatgtaaaattgatgttactagatttatcattaaacaaaatatcataatatataattatttttatttaaaatatcttacttttataaatattattggttggttaggatctaaaaataccaaggaaattgccaatcaccaagcagtcaccatctaccatacattgcaacgtgcatcctgaagctttttctctcaagcttgttgctgctgtgctgtccaccctgcttgcaccggccatggcccatatggtggccagccaggggcgtaatcatgactgctaccacgaagaggggtcaccggcattcagatacgcaggacttgttcactttattattgtttcattcaaccaaacgaaaattttatgttactaagttttaataagctaataaattaaacagatgtccatatcaaaaaattgatagtagttcccaaacttttctctcacaaagccactactccctccgtttcaggttataagatgttttaagtttggtcaaaatcaaattgttttaagtatgataaagtttatagaaaaaaatagtaatatttttatccaagataaatttactaaaaatatatttaattattaatttaataaaactaatttgttaatgtaaatattactatatttgtttataaacttagtcaaacttgaagcagtttggttaaaacattttataacctaaaacggaggtagattttgaaaaggcacagactaaacacatacaacactatcaaaatttaggtaacgtcaaaacttataaaaaaatttggtattgtctaaatttgataaggttgtctctttttcattaagatatggattttatcttagtttccgttagcacgctttttaaactgctaaacagtatatttcgtgcgaaaactttctaatatacaagttgctttaaaatatctgataaaccacttttaaatttataacaattaaaacttaattaatcatatcttaatgatttttattttgttttctaccacctaacctcatactatttcatcaacggtagaaacgaaccccagctcagagcataactaaagatttgcccttgattggcccgaagcgtcttgcacgcctcgcatcgcatatacgcgacgcgcccacacacagctgcatatgctgcacaaagcttttgcagatgcatgtgttggcctcagctttccagggtacggtcgctggctcaccaaggcaatatgcagatctcagctctcacatctagctaactaacttgtgtactacccgtaactgtgtctgtgtgttggtacaatcgtgcatcgcgtgacacgtgatcggatccatatatcggtcgacagttcgacacctacctaatttattgttagcatcggagggggttatacagggacctgtaccgtttaattttgtctctccaccacttgcaaatatacagatacggataagattagagaagagttagtagtagtacaccacctaagctcgttaactcatcctgtgctggtcgcattcttttgccaacatagagttggtggtgggactgtttttaacttcctgcgagagacaatccatactgtggtagatgtgatttctatttgttttcgagccgttttcatccttatctaaaacggtgtttagattcgtgatgagaactgtagggaaattcctcccgtaccaatatagttttcgtaagaaaataatatcgttttttattgttttcatttctagccatatataaatttttttttcttaacttctttcagcacagtattaggaggagaccgtggatcgaacgagagaatgcaagttccactatcttggaggtgaggaggacctgttggtgtgtggctcctcgaagccaatgctgtggcaccgagacttacaacggtgagtagagaggagcagggagtggtgtgcgtttggtcagcgtctatagcaagattcggggcgaggctcaatggtgtaagagcttcaatgtgatgacgcggagccgataataggttatgctcgagccatgtaggtgttgcccaaatagagtaaagctggaaatagaagctgaggcgccgacaaactcctacaacataacagtttgggggaggagaggagaaaggagcatcacgacataagtcaaggagcctccgtctctggttgagggatgcaaactagacttggtccgcttgtgttgacatggcatcccaatcacaaaatagaagtgaggcccatgtgtaagtgactggggacaaaataaaataaaaattatagggcctacttgtcaggctctttctccacttaatatcttttttcccaaatcctcccctctatatttttcccaaatcctccacactcagtgcagctcatgtctagcaccggtggcctcgtcctagcatcgctgcagctgtgggagagggagcggttcgtcatgatggcagatgacgtggtcggtggacacaaacgaacgacgatggtgatgacacgtagaaggagagcgggcgcgagcgcgcaaggcgtggagtaggataaggaagaagggggcaggttccatggtgaccaccacttggcaacaccctggtgagcagaccctaacagccataatcatactgtcgagaagaaaaccctaaagccgcccaacttcctcaagctcgtatttcaccgtggcgttgtgggggtcccttcagtaggccagtggtgacggcgaggaggtaggacaaatcatgctcttgccgacttaggtcgtcaactggcttgaggccgtcgtagattttgtcgtgggcaagggagcaaatccaacaaggtgggcgattggccgcaacatcttcatcatctcctcctccttccacttatattttcctgtcgttatgccatagttgccgaacaggctgtcctcgtcgtggctgatagatacaccaaccaggagacatcacgacacgtcatcgctgttccgccacctctgcagcgtccccatgtgcgacgatgggcccaccacactgtgtcgaatcaagcacgtatcagatgtgtcacgatagccacggtgcatgcggaggaggcatatgacaatgtttgccaccgtcgccctaccgctgctagctgccgcccgtcccacttctccaagaaaagattaggaggggagaagggacctaacaagtgggccccgccagtttttaaatttttcactagtcacttatatgtggaacccactgatattttgtgatggggctaccacaccaacaccggtagacaagtcaacatgcctcgttcatgaaaaccactctcgaaatcgaggaggaagttaaattacaccgattttaatagttgaaggatcaatatatctggtactactgttgagggatgcgtatcaaattgaacctatatttgagggactcaaagtgaacttattcccccaaacaagtatgctgactgccaagtgaaagcccaacagaatcactggtgtttgcgggcagcgtcgagctcggcctagcccacaagcatgcatgccacactagcttagctgtctcatgccaccactaaacatgagatgcatgcttgccgctaggcgctgactggtgacgcctgttgataaccgtagatacgcttgcagcctctggctctccgtacacgtatatatatgctcagatgcatgcaccgatgcgtgccaacgtacgttgcagatggcctccctgactgcacacgcgtacacgcacgtacgcaaggaccagcggatccgaccgccaattctcgcgtggcatgcatgacaagcagctagcaccaccacatcgtatgacacgtagatcacgatgatcgcctcgaaatcccctcctgtactctactacactacgactacccattttcatcgatccatcgcggccggcagccatgtctccgatgaggccgcgctcctccagcgcgagctcgacgtcgccggtggcggggaagaaggagaagacggcgacgaagccagctggtggtggtgctcgcgatccgcccaagggaaggtcgtcgtcgttcgcgtgcagggtgtgcggcaagaggttcccgtcgcagcaagccatggccggccacgaggatcactgccgccgccacgaggatcacgtccgcgaggcagctgctgccaccgccgccgcagtcgtcgttgtcgccaccgccaccgcttccggtggttgctctaaccgtgcaacttgcggtgctcttctggcgtcttacacctgtgcgactcagcttcttgccgctgccgccgtcgcagattggtcacaggtggccgccgggatccctctttccaaagagcagcttgttgtcgccgtcgccatcgtcctcgccgacgacgggtgagccggcgagtgccacggttgatgtgacgctccggctgggctccggtggcaagcgcgggaacgagaagcctctggtcgagtcactgatggtgccggcggcaagcctacacggtcaccgaggagagcagggtcgcgaaggcacgagggcgagggggatggacggctgtgatcatggtaggaagaaggggaaagcccagatggacggattggatctagagctgcatcttcaccgctagtttagtaaagggtttattaccgggagcagattacaaaattagggatttgttagacagctgcctgctgttttttttttttttgcgcttttgtcagctggatttgtggccatgggatttttcttcaagatttgtgcacaagccagcccaaggcgtgtcctcccttcagccacaaacgagcccaagctacagttcaaaaacataaatcctcatcttccaatttctcctgcatgaatgggaggaaagcaagagaagctgtcggtgagagagagatcgagagaggatgcggcgaagcaagaagcagcgacctcgatgttgtcggcgtcttctccgccggttggagctcctggttgtgggcttgtggcgcagccagggccaggcagcagaggtgtttctgttggatctcgccgctgaagagttgaatcttggaccatcaatgaacaacgaggccacatcgatccccaaggtgagtattccccatggagatttatgcgttgaaatttatcacatctgttcatgtgggggctgccggattaatgaaaaatccattaagcaaatatgtttgtgactcactaaattacacaatgatgaacattaacatgtgtgtttattgaactaccgaaaaacgatacgtgccccggaaggaactacgagcttccatcttctgtacacatcggagggaccatttggctggatcctacgaaccgtgcaaaccctccctgccattcactggtggtagttgtatgcggaatagaagggatcactctgtactacctgcaataatctctataggtaaacattgaattcaaaaatagcaccagttgatccatgccagcaaaaaaaaaggaccatatgatggggaaaaataatcaagcttggtttttctggagcttttcaactcctgcctcacatgtacgagagagcaaagaaaaaaaatgcatagggaatagaacttgcaatagaactacagaaataaaaggctttccaagcaatccatggtcccacacagcgcatgactgtagaaaggtttgcaaagttcagaaaataaatggtaaaatgaccacctaattttggtatattctgaaaattagtccataaaaatagtgtgtattgtacttttaagtccctagattaaattagcatggggtggaacaattaattctataagttatgccacttgtacgtaaaaaaactgtgcatgaaaaagagctaaattttaggacgattttcataataatgtgtaaagcttttggtttaatttagagaaaggttaccataactataatgatttaaaataattcgtgcacctaatataattaatatgttttcatatacatagcttgtaacaggttgattagagtcgtgtgaatgctatactatatacaatagtactagagaagttaacaagtcatccatacaaaaatattttgtgaaacagtttctaccggtaccgatgtaaacccttgatgccactgtgatcctccttttgttgttggtataggcctaaccaactgcatgctaacaagttaacaagtagtatgctcgaaaactatttgtatcataataggctttacctgcattgtccggtcagtttatcgtagacggtgccacaggccttgccgacgacctaggacgtgtggaagctgagggtcttgcctatgtcgaaggcctagaagaggtagaagaggtagacggttgttccagtagggggtccgcaaacctgtgtcctgtgggacggtggacttctgatgcacgcctgcacgatgccccccgcataatacgtttgcatttctgtcgcattcggtccagagcagacatcatctcctcaagggacccagctatattgtcacgcagcttctcccacagtgaggttgtgtcagaatatagttcctccgcaatatcgccctacgaaaataaatgttacaatgattacaggttgcggtaagattattgtttcattaaaaatttagtggataatatgttaccgtcaggtgggtaactggcgctgactgcatagggtacagcgtgtccacgtcggctatttcaggaatatatggatcctctattgtcacaaggcatacgcgtgtttatgcgatgtaccaccgcatgtacaacgcgtacatacgacggtcgtacggtctggattcgttaatatatcgaatgttgccctcgaacattgttcgacccaaggggtcatcttaccaacgatatttcgccacacgctagcatctcccttcctcttttctaacaaaaaaactcatcattaggtgttgagttaagtagtataattcggacacacggtaattaatgggaatccaattgaatttaacttataagtgtatttttttggagggggggactgtttcaccaagcaggagaggcacttcttggtaaaggctgaattgcctcattacacgctgtagattgtacgcctcaacggctatatcgtagacaagcatctttttcatcagccagtaagacgagtcacgcaagtagagtatactgaggtcggcaggggcacgacgttgtgtctcctcttccgtgtatggacaccactgaacgtatcctccttaagtagatcgaacgcctcagtgaagtactcgtacacgcttcgagcctgaacgttcgtccactgtggttgcatgttattaaataaatagtaagattatagctgtacgaactaaatgcaaatgtacaaaaaaaaatttctacgtaccggtccctagcaccaacgcatgccataagtaggcctatcatctgtagtgttaccaaataagctagaatatgccacagttccaggcacgtatggtcgtcccaatgggaagcgttcttaagaccatagcatgaacaacaacggacaaccagtaaacataggttgcttaaagcttgtctttgtgcatgcttcacatagatctcggtaagttgtagccaaaactgctgatccccaactccactagggaaaactttctatgttgccctgcacaataaatcttgctatggaaatcattctcgcatccactatgtatccgtgtccacttgtgaacataacccatccaaaaagccatagaaggtaagcctccaaatgcaattccacatggtaattttctacgtcctctctcgtgaaagaaacctacaaaggtacacagaaaatttcaataacaaaacataatatcatcaatggaagttttttgtatgaattagtttttcctcgaactggatgagccagtgtaacgtagggccgcgcgcttcatctttatagaaaagtcctttcatgtctctatcatcctctggaacaatgtaagcatatcttccaataatatcatccctccattccacaggtgggtcggggaggacaattgtctgtcctgcaagtggtagccctataagcatggatacatctcgcagtgtaattgccatctctccacacgggaggtggaaagtgtgagtctccggcctccatctgtcgaccaatgcagttagaagtcccttgtgtataatctatcggcgtgtgtctctagatgacacatcttcatcttcctcgtcagtgtcttcccttttatttgctttccgtcggcgtgcactttgttgtcttgctaccatgtaatcgtaatgccctctagcctgcaacatcctaacaaaaagaagaatgcctgcaacaagacatccttgcataacgagttgttgcgtcagacaaaatttacaataattgcagcaaaaaaattaacaaaaattcatgtaagtgtgtaaaaaaattagttaccttggtaaccaacgttcgtcgactccccacattgggaaagtccgcgttatgaagaccgacataccacttggacgactggaagacattagccatgcatggtgccatgcatcgatgtctctactgagtaacgggtaggattctggaagaca

SEQ ID NO: 6919 - DNA, 13209 bp, Oryza sativa
tggtacagtagttcatcaggaggagagaaaagagcgaagggaaaaatgagaagcggtgaaaatatgtggtggggcgcgagagttaccgcgccgagacaagtgaggcgcgaggcggaagtgggatggcgcggtccgtctctttttcccggatgaatcggtcccgaatattgaaggaatattcccttttagagccatcccatcccttctagcctctcaaccaaacacacctaaaaatgggatgatcccatcccatcccgggatatccctccaaccaaacgctaccttaggttgtgaaacccacgcacaactaggggtgaaagtggttcggatagtttccatccgtccggaccatttttcggattcggatagtttcggtcggaactatccggaaattctcggattcggaaatgaattcggattttttttctcggaaacgaaaacgaatacaataagggtactatccatctccgtcggaatcggaaaacagtcggaaactatccggatttttttcggatatccacagacattgagcaaattttagaaaaaacacgtatatatacataactttttcatgcggaatcaaacggagacaaactttatatcaatattgtagagatcgatgagatctacaacattcttattaactattttattatttgagatcatttaagggtctaaatattcattataatataccatattaatttttacaaaatctcatatctacaattcaaacgacatctgatggagatgtgttccatatcaaagttgtagagctcaacgggatctaccactttgtagtttataacatttgtatttgaaagcatttaaagtataaaacaaacattacaagtttcgaagatgtgaagtaaaataaataacatcttcaatttatacaatggtaagtaagttatacatctagtaaaaggtcttgggaatagaaaatgataatcatatttgcatatggatctctaagaggaatagccatgaaaatcgattttcacatacggttgtgggaccgtctacaaaattgacgatataaatgttggagatgttgaactaaaataataagcgatatctcttactggatccagaaactcaatttgagggttttttatataccagtaaatattcgctaccgtattcgttccatctcgtattcgctccgtatctgtatttgataatattcgatttcatttccgtatccgagttttcgattatgattccgattccaaaaaaaaaaatgaaaacgaatatgataaagctagtttccgtccgtttccgatccgttttcatccctacgcacaacctgcccctcctgcctccaacttgcccttaacccatagacaatagtctacgtggtcggtggttccaccaacgggtggtaaaaaattaaccagaaatagtaaaacggaccgaagaagtgttggttttttcggtgtttggttttgccttttgttttgtttatagtgaagctcagtctctagtttgcaaaaactaaaagccccgtataaaccgagcatgctagcacagtagcacctctctagtatgggcctgtttgggggagctttagattttgagaagcagttgtttggtagctagcttctgagaatccggaaaagctctgaaacccagcttctacaccttctggcttcttagttcatttttcagaatctgtaactacagattcccagaagctgtggactgcttggggcagcttctagcagaagcagcttttgggaaaagctgcagctgggagaagctccccaaacatggccctagccttttatgtgcgcagcccaccaccttgttgaaggctttcagcttgcccacttactaactagcaattaaaccagcacatccaccgttgccttatgaaccctagccgccactcgtcgtacactcacaaagtttacgcaggtggccaagcagccttgacggtgactgcgaccgggggaacagaggtgggaggcagacgaagatctacgtaggtggttttcggtggaactgaacccggaaaagccaaaccaacaatactaagagaatcaatttttctggacgagactccctttaggttgcaggcctgtcataattgctcccgcttgaaaaaatcgctcccctgtagatagtgaccccttaagaggccctcatgagaaaatagattttcgtatgctggcaaaggggagtgcaagtgtccccccacacattttttcccgcacaattttttctccttctcctccttctcaacaccgcacctttttctcttctccatcgcacctttttcccactccctctcttcatctctttgttaacactaaaatttgataagattctttagtggattcggttaaggaaagagcacaatcagtcgatggaaagcttatccagaagagtccaagttcaagaacgaatcataagacttgtatctattaataaggcggagtcagttagtttccttttttgttagtgtctgattaggatttgtatcttttcttttatcttcaggaaagtttgagtcgtgtccagttaggactcttatcggccaataggtataactatgtacacccaggatccctgtaatctatctctcgatcaatacaactactctcggagcatcaccaccctctttttcgagggttttatcaccgtcagaacttggcacctgacacgggctgcatcgcttcgatctccgacataggggtaagtcataagttccgccggccatgtcaattgtatcggttatgttggtgttgtccaaggctgcatcgctttgatctcttggattgctctagttcggttggtatatttttcctacccgatatttcaattctatatttaattacattgtgtttagatatgcatcgtttagttgggactgtctcggttaggtctgatcttctgtcttagccaatatatctctacaatcacaatgtcactttagatagatttgttatatccatcacattatataaatttatcgactcattgagtattagattatcatatacaatttaatgtttcatcagttaggtccaacctgctaaattgttattgacaatctaaatcttgttaggccgataggttcatgctaatgtttcattgtagggttagctgatcttatctgatgtgttaaatttatctttgatggttttactattttggttaaatttaatgcatcattaccatgatcggtgtcatattagcttattcaaatctatcaggcaattatcaaccttatgctgcatcggttaggtttgacctatcgggttgtggttgtaagttagatttttttaagtctttaagcatcaatcattgtttcatcggggtttcagctggtgagttatcttgtcggtgatatgggcccggaggtatcaggtttagagggaggaggctcccccgagggggggagtcaggcccgaggtagggtggcggccactccttcctaaagactggatggaggaggctgccccccgatgccacgtggccctcccccgaggggagtcaggcccgaggtggggcggcggccactccctggccgagactagagggagaaggctgccccaggcgccacatggccctcccccgaggggggatcgggcccgaggtcgggcggcggccgccccctcctgtgactaggggttgggctcccccgaccccctctctaggtcaccatgtacggtgggttaagtgtccacctccaggtgcccacctacccgcatttatggcagcccgagtagtcgcgccgtgccgcatttaatatggtgtgcaatgcactcaactggtctgtgaccggtcgaatgaccgatgggactggggtagtgcgcctgtgcgctgctcgtgtgtcaggcgacgtgcagcctgacatgtcccatcaaatagtgatggtgagaggttctcatcctcctatcccagccggagtcggtcccccgctctggtcaaagcaaggctcctgtttcccagtgtaataggagcccagaagtcctcacccattaaatggtgactgacaggggcaccccccgtgtcaggcggcaagatttgacaggcctcatcatcaagatgacgtgcgcttgcttcccaagtcaagagacaggacatgcatttaatgcaaagattgtaatccttctccactaagttatgtttttgggcccatgtggtaaccccttgagatataaaaggaggtccaggcctagtaggagggggggctagagcccctgatgatcaacaccttctaccccaacaaggagatcttataatttctcacaagatcagctaagcataggagtagggtattacgcttctcagcggcccaaacctgtataaactccttttgtctcatcaccttggagggggataactccctcaagatgacacagcttcgctcaacaaaccctcgaatctcacccgctgccctcggcagaactcacaaaggggggcctcacggttccccggtggaggagttcattctccgacatctggcgcgccaggtagggggcgcgttcgtgatttttgaggttctttcgagtgccggtgtgacgagcgtcgcggcgccaaagcgggggaaggcgcagcctcctcaggagtgtcgcgccaccccaggcagaaggctaggcccccccacatcctcatcgaaaaaggccagcggccaggcttttgtggcgagtcttcgaaatgtccgatggcccccaaagttccggcccagcctcactgagaagtacgacggcggcgtcaacccctccgagtccctccagatctacacgatgatcatagaggcggcggggggtgatgatcaggtcatgacgagcttcttccccatggccctcaggggccaagcgcggggttggctcatgaacctgctgcctgcctcggtctactcctgggaggactcttgcagttgagctccaggtgccgtcgaagcccgggaccccctgtgctggctcttccgcagcggctagctttggtctcgccggctggctacggtgcctgacccggctcaactaatcgtcctttcaagtttcaatggtcgcaggcttcccaaatggttaggaacccatggtgggaggccctcttcgagctaacggtttgaaaggtcgcgacatgcaagcaaggtttgtgtttgcttcattcatacaagcgattatttgctataagtgtggggggctacgattcctagctccatcctagccctacgacgagctctgggcgccgtccacgtctggggccccctgtgctggctcttccgtagcggctagctttggccctgacggctggctacagcgcccagcttggcttgatcgtgggtgaagattgttggctatggaaaatttagtcctcgcactcgtgcgaagataatcgtttgcatagaattattatggcttatatttatctctcatctcatcctcgcggtcccgcggtacccatgtgtcgcgcgctcgtttgccccccttggtaacgaaaagtttgtattcgctttatccatccaaacgattttttgctaaaagtgtggtggctacgattcctagctctatcctagccctgcatcgagctttgggtaccgtcgacgcccggggccccctgtgctagctcttccgtagcagctggctttggccccgtcgactcgctacggcgccgagcttagcttgatcgcgggtgaagattgctggctatggaaagttcagtcctcacactcacgcgaaaacaatcggttgaatagatgaagtagaacacgaacagaggttaacaaaaggcaggggcaagcgaggtacgcgacgtgaggtcgcgggcccgagagaatctaacaacgtttgctgaatgtatacagaaaataagtttacagcctaaggtacgggctggcgagtcgccctcaggctggggcgaaaaaggcgcatgggtcctagtgctagcaaagaaagaagaagataccgggcccacatatcatcagactaggagagtggcatcaaccttgaccacctggggaaagttttggttagggctaacgccgggggctactgtcggtgatatgggcccgggggtatcaggtttaaagggaggaggctcccccgagggggggagtcaggctcgaggtagggtggcggccactccttcctagagactggatagaggaggctgccccccgatgccacgtggccctcccccgaggggagtcaggcccgaggtggggcgacggccactccctggccgagacaagagggagaaggctgccccaggcgccacgtggcctgaggtcgggcggcggccgccccctcccgtgactaggggtcgggctcccccgaccccctctctaggtcaccatgtacggtgggttaagtgtccgcctccaggtgcccacctacccgcatttatggcggcccgagtagtcgcgccatgccgcatttaatatggtgtgcaatgcactcaactggtctgtgaccggtcgaatgaccgatgggactggggtagtgcgcctgtgcgctgctcgtgtgtcaggcgacgtgcagcctgacatgtcccatcaaatagtgatggtgggaggttctcatcctcttatcctagccgaagtcggccctcccgctctggtcaaagcaaggctcccgtttcccgatgtaataggagcccagaagtcctcacccattaaatggtgactgacaggggcaccccccgtgtcaggcggcaagatttgacaggcctcatcatcaagatgacgtgcgtttgcttcccaagtcaagagacaagacatgcatttaatgtaaagattgtaatccttctccactaagttatgtttttgggcccatgtggtaaccccttgagatataaaaggaggtccaggcctagtaggagggggggctggagcccttgatgatcaacaccttctaccccaacaaggagatcttgtaatttatcacaagatcagctaagcacaggagtagggtattacgcttctcagcggcccgaacttgtataaactccttttgtctcatcaccttggagggggataactccctcaagatgacacagcttcgctcaccaagccctcgaatctcacccgctgcccccggccgaactcacaaaggggggcctcacggttccccggtggaggagttcattctccgacatatctggattctggatgttgtttaagtgttgcattagcttataaggattatatacaagttggttttagccgattgtagcgaaggtttaattgattccttaatcatttggaattgatgatattggttttctagccgatgtatgttttaatcatcgagactacatttaatattatttctatatcaacatcggtcgattggttcattagatattttgcttcgttacatctatactggccgattggtacattggatatttatttattactttattattagctgattgtctttatatcattgtttatacaagtatcagagtccacatcggacatatagtcgattgttaaaaaccctatcgatatcagcttgttggtcgatcggctctttgatcatccatttatatatctagtcagttgcatgatcaaactgattggcacatcaacatctcaactataatttaggacatgcacttgagctaaatagatctcccaggcctttgtgtttttcacgtcaacactcttcccctttcctctcccccttatgttctccggcggctaaggcggagcaggctagagcgagctgagtgagaacgagctggcggcggcaggttcggatgggcaacaatgatggcaagcggtgacggcagagctcaagggcggcttatttggcaatgccaccctcgacagttactacggggacgactatagcagacggcgacgacaatagtgagctcgacgacaatagttcctccactcgatgcactatcaattacattacgcgatagtcccttagttaattgatttgccagatttaatttttagccatctggacatagtacaatgctatcactctagagtttttcagctttctgatatattttagtcaacgttttatatgcctagatgatttcatgttattgcgtgatggtataaagatcttctctttccacaatgacgtatatcagcaaatgaggttaagtcaatgggcctgggtctatattatattatactactgccgttctatcttaagttatttgtttataagatactaattgataaaattgaacaaataataaattatatattattatttgttttcaatagtaagttatatcttatgattgttatatatatcttcctcttattaatttattgatttgcctcttattttgtgccatagataccccaaagttattttgctatgtttcttggtgtattagtttgtgtgcatcagttctgtctcatgcaagacatgtttatcattaattttcttgtcaaatcagattaattcaatcatactccattcagtttttaatagatgacacgtaaacttttggacagcaatttgttttattaaaaaaatcgtacaaatatataagatatgtttaaagtacttttttgaaaaaacaacacataccaaaataaataataattacgtattttttaataagacatatagttaaatgtgtgtttaaaagttaatagcgtcatctattaaaaaatataggtaatatgctgtaagctattaattcgtgtagacactgtcattggttccgccttacactcagtggtccatctaaaaaatagtccatagaatttattgttatgcaaagtaagaaaacgctgataagatcaatcgcaatgggttgggttctatttagacctaatcatcatccaaatagtattaggacaaaatatttgttggtttttttttgtgcactattgaggttgggtcctatcctaatactctcttggctagacactgctccctccgtttcacgatgtaagtcattctagcattttctacattcatattatatatgtagattcattaatatcaatataaatatgagaaatactaaaatgacctacattgtaaaacggaggaagtactactttaaggatcttctctatacatgatattttttacctataatgtgtgtcctttgatgtgcatgcatactccctccgtcccaaaaaacctaatctaggattgggatgggacataatctagtacaatgaatttggacagattttcagttcagatcctaactaggttaggttttttgggacgaagggagtatgcttatagcttatttatagcatgctattatagaatgggtctagccctcgtacacagagtacgataatgcattggatggtacatacttgtcttacaagagatattcttgcaggctatgaagcattatttattgttggagtcctagctctagtggtggttgttgtgtagattattgtctcatgttttatgtggacaagaaggagcaatgacgacttagatcttaaggaaattgggggacctaggcagttcatataccgagatttgaatgttgcgactaacaagtttttgaatgtgattgggcgtggtgcctttggcgtggtctgccgcgggtccttaggaggctatgaggtggcggttaaaaccctaataaatggaaggaaggacttcatcgccgagctcagctcaattggtggggtgaagcacaagaatcttgtcaggctcattggctggtgcaggcaaaataggttcaacattgttgatttcatattctggtggaggcatgacaaaaagaataagcttttccttgtgtatgagctggtgagcaatggcaacctttgctaaacgcctacacgagggagtactcgaatggacaacaaggtaactaactaatatacacacacgcatgctttatatatatatatatatatatatatatttatatatatatatatggtacaacttattaaattcttttatatatatgtatattaggttcataataataaaggatatcgccaatgctcttctatacctccatgaagaatgccacccgtacatcttgcatagagatatcaagccagacaacatactcctggacaacaacttcaatgccaagcttgctgatttcgggctgtcaaggatcgccgaccccgacaacaacatagtgaagacgacagcccatgggactaagggttatattgatccactctgcatgagggacgcgaccattgaattcgatcgtagctctgacatgtacagcttcggcatggtcctgctagtggtggcatgcacacaaggcacctccagggaacaagtctggcagctgtaccaggacaaatctctcctgcaggctgctgatgacaatttgagaggccagtatgacgagacgcagatggaaagagtactcatcctaggactctgttgctcccgccttgatgatgctaccaagcggcctaccatccgtcaagcattggcttttctggagcacggcggcccaatgccaggcctggagtcattgatcaaccctcgatcgaatctctaaaaattgatgagcaagatgcaattaatagcacttaattgggtccatggatacgtactttgttatactccatttgcgtaattttacctatgccgatgcataatgtgcgacatcattgtcctcatttgttatggttactcatgcagcttccccttcaggttattctcacaaactagaaaggtatgtgcgcggggcaccttatttaattaatgttacttgaattttagttatgaatacttatgtgtggatgagtatttcttaaaatatttttttactctattctgaacatgtttttatcaataatttgtttgaggttgttgtgaacgtcgcttttaattttcttctaattacctttcaaacatataaattctaaaccaaaattatttaaaccgtgtggtttttaatttatgagatactattgtttcacaacaatagtgctacttcatatggaactattacgtgtaccatgtgtgtgtatttttttttagaaatcagcatatattactttggagttatagatgtctattttatctgtttaatggcagacttctatttacttcttctccctcctcttttttttttctcatatgatctcttatattatgtggagaaaatgaatttagtttgaaataagagcggaaataattagtatgtttagagaatttataaatatttaagcaccatagactaaagtatagactaaagtatacttttgttaagtaagttcttattatgacgtgtatttttaatgcatgaattcttatattaactttagtattgtttatattccataattaaccaaacttagtatatacaaaatacccacacaccatacgtatttaatagaaatcaaaggggataaaacacaacatgtactccatccgttattttacttattatttagggtgtagtctacaaattatacatgatttggtaaatagaattgacattttagattatccctgtatagtccgaatagattggaatccacatgataagtatatttatatgatcatataatccatattgttaatttttatcatgatttgtcgtaattctcaattgccatgcaaggctgtgacttgctacttgttgatattgtaaatctaattaagtcgagcatatttgtgaactgatatgggctgaatagagtgcacactacatagtaagcatatttatgtgatgatattagccatatcattaaattgttttttcacgatttgttataattctcaaatgccatataaagcgcaaagatatgacatgtttctggttgatattgtaaatctaatttagtggtacatattattatatccgacaaagaatatatagtgatatatactccacactgtcattttttttataattttcatgtccgtttggattacacacaaagaataaaaatatgacctaaaatataattttttatagattaaagtatagttaatatagatcataaattaagttaatggtaaataatataatttagtaaacttttttttcaatcatcttagatctaattttagttatttatgattataatgtgatatatgacactataacctgtgtttttcgtgtttttttgtctgtgagatataacacaaatggtcaaatcatggatcaaaataatatttattatttttttctaaataaaaatatagtaaatatggattgatttaaatgtaaagaatataattgtggtagaataaaaaaaattgtatatataatttaaaagttacaatagtttatttattatatttatgtactacatttatctcaaataatataggaaaaaatgagttaaggagagggaagaggggctccacattatctgcaattagtgagtatggctggttagttaagtatggtggaacttaaccacctaggtttaagatgtagtcttgacatgggtctcatatttatggctaattatttttgtagtaggcgacgttcccatcaatagcgaggtgcttgtggtgacttcactaatttgaagatatatcattggctcagtctctcgaatatgttttctatggataagtgcacacgcgtgtatatgaactcttgtgtttgtactatgtttctcttaaaaaagcggcatgcattacccttccaaaatgattatctaaaaaatcaattagcaaatttctgtcggcaaagcacgcagtatcaagatgtctcgactaagtgctcaaaaatcaactgacatcacccaaatacccgatgttagtgaatatattgtccaagagccaagagctttgatatatcgctttgttgtagaagctagtagcaacagatcagaatacgaacaacatcaccaaggagtagtataaaatgggaaaaagtacgaattacacccccgaactatcgcggtcgtctgaattacccacttgaaccacaaaaccgaacatttttcacccccgactatacaaaccggacgaattaccccctcgacccaatccacgttggttttggtctacgtggcgtgcacgtggcagtccagtcagcgttttttaattaaaaaattgtgggacccgcatgtcatacacttcttactctgtctattctctctctcttttctctctcgcgcagcgcgcacggcgaggacgagcgcggggacgggcggtcggcgacagtggctcgcggcggcggcggccgagcaggtcgaggagtaccaccacgccgagcaggtcgacgagcaggaggaccaccaccacgccgcgcagcacgacatgagtagcgaccccgataagctccagggcg

SEQ ID NO: 6920 - DNA, 33649 bp, Oryza sativa
tatgtccaagtggtacatcgcacaaacacatgtatgtcttgtgacaatagaggatccagatattcctgaaatagccaacgtggacacgctgtaccctatgcagtcagcgccagttacccacctgacggtaacatattatccactaaatttttaatgaaacaataatcttaccgcaacctgtaatcattgtaacatttattttcgtagggcgatattgtggaggaactatattctgacacaacctcactgtgggagaagctgcgtgacaatatagctgggtccctcgaggagatgatgtctgctctagaccgaatgcgacagaaatgcaaacgtattatgcgggggcatagtacaggcatgcatcagaagtccaccgtcccacaggacacaggtttgcggaccccctaccggaacaaccgtctacctcttctaggccttccacatcggcaagaccctcagcttccacacgtcctggacgtcggcaaggcctgtggcaccgtctacgataaaccgatcggacaatgcaggtaaagcctattatgatacaaatagttttcgagcatactacttgttaacttgttagcacgcaagtggttaggcctataccaacaataacaggaggatcacagtggcatcaagggttcacatcggtaccgggtagaaactgtttcacaaaatatttttgcatggatgacttgttaacttctcatctagtacaactgtatatagtctagcattcacactactttaatcaacatgttacaagctatgtatatgaaaatatatgaattatattagatgcacgaattgtttttaatcattatacttatggtaacctttctctaaattaaaccaaaagctctacgcattattatgaaaatcgtcctaaaatttagctcatttcatgcacagtttttttaagtacaagtggcctaacttatagaattaattgttccgcctaatgctaatttaatctatggacttaaaagtacaatacacactatttttatggactaattttcagaatatactgaaattaggtggtcgttttaccatttattttctgaactttgcaaacctttctacagccatgcgctgtgtgggacaatggattgcttggaaagccttttatttctatagttctattgcaagttctattccctatgcattttttttctttgctctctcatatatgtgaggcaggagttgaaaagctctagaaaaaccaagcttaattatttgttgtccattagatggtcctatttttttttccgacatggatcaactggtgctatttttaaattcaatgttcacctatagagattattgcaggtagtatagcagtgatcccttctattctgcgtgtaagtacctccagtgaatggcagggagggtttgtgtggttcgcaggatccagccaaatggtccctctgatgtgtacagaagatggaagcttacagttctttccagggcacgtagcgttttccggtagttcaataaacacgcatgttaatgttcatcattttgtaatttagttagtcacaaacatatttgcttaattttgcaggtgtaccttaagttaacatgctcatgtttccaacgggtatgaacgatcagtggtatggagcttccacatacaacactggttcgtacataatgtgtttcatttttgacgatccttatattgcgatattaaattagcgctgcacctgcaggggatctaccaaatgtccataactgaaaatgtacaaccacaaggaccaagctttttggacatgttaggccaaggagattggttgttcagtcaatcacctatcatgcaaccacaaacaacatgtacaaattacaatatactttaaaatattttagctccagtatgttagtgggctacaactttggattccatgttttgtaggaatgtacactgccgaccaaatgataggatatgccgacagcacacagtcctacagagaaccatgtagctacggtgggggtcgtcaacagcactacacgagataggaccgtcgcatattgatgaaccacctccaataactcagctgacccaagactacgggcatgttgatttcagcggtgttaaggtggcacataggtctgtccgcgagtgacattcacctgaaagattatctttgtcaagacgcagacctccagctagtgctagaagaaagggaaagaaaaaggacactagcacatcacgaaattttgatgatgaggctaatgagtggaacgattttatattttgctctttcgaactaatatgtaatgttgtgtgttcaaactttctaatgtgtcagctacatttctaaagaaataaattcgaaatatttacccgctttcccttcacgaacacttacagatatttacctttacacaacacttcagtgggtttgagcgctttgcaaattcacagcattatcttttggtaagcccccaatatgcgccataaatcatcgcgtactcagttcataccacaagatagggcctgtgaattcgcaaagcgcactaacttattgaagcttacaccaatgatagactctacgaatatgaattatatgctatacttgagtctgtttctttcatttcgtaactttcattttataggcactcaacgagtaggctctgtaaccagacgacaacaaacttttggcggacatcccctgaaaaatgctaggactagagaagagaatcactctctcctttatttctggctgagaatgccaaatggagcaagaggacaaaagaactttcggtggacaaaacaactttcgatgcggtcccgcagaatggaggtgcggagtagtagtgcgatcccgcgcgctaggaatgtggcatcgatgccccacgggaccggctcggtgctaccgtttggggctgcgttctgtgtgaccggtcgggccggtggccggtcccgcgtgcaacaccaactcgcacagccgtgacgcgggaccggctcggttccgcacccccggtctgcgcgaccgtgccggtcctgcactcccaggctacggtaccgcgttcccgcgccgtgccctgtgttactatcttactcccgcatttccagcgcgtggaggaggtatatgtttgctaaactttaccacccaggtatataaatgcaaattattaaaaaaagtatatttttaaatttaattcaagttaggatcagctgtaccacagctctcatctagccgtattagttttgtcctttttcgtatgaacagcacctagtttttagcaacaatactttgttttcctttttatttaaagtctagatttgtcggctacctatttcaacatttcactagttcttgtagttttgattaaagtttcagcttgcagttttctaggttaggcactttagattcctgaactagtaaagtattagtagaagcatgtagcagcatatgtcactaagtaccttttaaactaaccgaaatcaacaatgccagttttgtcagtgtaagtattaatccataaaggaagctacgttgtaattggtaattgatgatgggaagcatgacttaaaaggtggggacagtcctcacctatatcgactagtttttttggattgtgtaggcccagcaccactaaagttgtggctagttgggcctgtggtagaacaggcccaatatgatctgggtggcctacggttgatgggtcgggctgcgcattctaacagcttatatagagggcaaaatgtccattgatagccttaacagcacccatgcatggtgattcaattggaatgtctgtggatagtaaaaactgaacaaaacaatccccattaccctcatatgctaacctgatggagaaatttgtcagttagtaacagttaatcaaggttatgttagttttgtcaaccgagtaactaattcttttctacaagaaagtaccacatctgagctgaccattgctaatgctctgaacaaaagacacagaaggctaaagacgatagtcggaagaggacactgcggactggctttgcgggatcgattggagcagcctatcagaatgagggaagaactaaagaagtaaagaggctgacaagcttagtacagtaggttaatttctgtaatgtttgcagatcttctacaaacaaggtatgcttgttgtgtgtatatagattgatccccattgatgttgcttgctctgaataaaaggatgatgtgattaggagacaaggaggcacaggtgtgacgctatcaggtagttgggctaccattttaacgattgtgtgttgatgggcttgttttgttgacgaacaaatcggcaagcctcagaatttgaataaactcgcacaaaagcgtgacgtgcgcgcgggggaggtgcccgtggcagggcagtcaacagatgacgctacttgtttcatcatgtggagaggaaaccgactaaaatagtataggacccgcgcagattgtgcggctagcatcgttatatttttctcatataatagcatatataatttaacattttaaaatggcaatataattttaaacttttgtctcaaatgaccgtggtggcgtggtggtggagttgtggctgcatgactccacctagcagaattcaaatctggtgcctataaatattatgcatatttaagcttttgaaccaaactttagtgtgattagtaaaaaaatgactcaactaactatgatattttgctaatatagtaatttctctgtctataaagcaaacgtgctaggatatgtaagtcatggtatttctttttgtcttctttcctccatcttcatcctattagtatcatcctcttattatttttagtggcatttttcatcaactagataagacatattgtattagtgatagtttatattgtatcaaatattcctcacagtttcgaggaaatttgttgtcacgttagtacagattcgaggatataatcttatctgttagtatattgttttaatgtagattgggaataaagttatttttttgaaaaaaagtatgaattgccccataaactattctagtcgacccaattacccctgaacctaaaaaccagacgtcactcactctaaactttcaataccggatgaattacccccctcaatctaatccaaagcggttttgtcccacgtgaagtacgcgtggcgatctaatcaatattttctttttaaaaaatggtgagacccacgtgtaatacctcctctacccctctttttctctctcctcgcgccggcgcgcacagcggcgcacggcagcgcgcgaaagcgggcggtcgacgcacaagacacggaggcggtgggcccctcggctgccaccgccgctgccgaggcagaggtggagaaggccaggacagagtgggtggccaggagtgcgcggtggtggagggagtcggaggaggtggagatggaggaggaggggatgggggcgggagggagagaggaggagcggagggcggcgcgcggggaggtgtaggggatggggccgcgcgccgctcgacttgcgcccatgccgatgacgcggcgctcaccccatatccctcgcctccttttcctccacgagctcgaatccgagagtttcgattcggcagcgacgacgttggagtgggtggtgcttgaggcgatcatggtgctgcttctgacgctgccagtgctggacaggctcccggtgcgggatgatctccgtggtgcggagcgcgctgaagacgatgatgttgatggtgctcttctgcctcttcctgctgatggacatctactggaagtacgaggtgcggcccacctacaatgacgagcaccactgcaccccgtccgagcacctccgccaccagaaatccatcatgaagccgcagcgcagcgcgctcctcatcgccactgcgctggtcctctactggatccttcttccctgtcaccttcctcgtcgtcaggcttgaccagctctagcagcgtgtcaacaagctcaagaagcaggatgactaactctagctgatcctgctaccccctgattcagcgtgtcgattggcccgaccgtgacccgcccaccgccgacttgcacccgcgccagacgacgcaaggagagagaaagaggggggaattggggaagaggaggtatgttatgtgggtcacatcattttttaaaaaaaagaaaatgctgactggattgccacgcgtacgccacgtaggataaaaccactctaaattgcataggggggtaattcgtccggtgttgaaaatttagggtgagctatgtctggtttcaagttcagggaggtaataattaggtcgaccgtaattgttcagggggtaattcgtacttttttcttatattttatttgatcacctcgtaggactaatgtggggcttgaaaaagcgccccccccccccgcgcgtggccaggccggcccgcacgggcgccgcctccacgaccaccccggcgccggccccaccttttcattgctgccgccacacagagccagccgacgctcagccgagcacggacgcgagctgcgccttgaaggaagaggaaggcggggtggccatgggcgccggcgaggagctcaaggaaggaggagggaaggtcggcgatgaggccggcgtcatcttcttcatcttctgccagccgtcgatttcatttagggagagaagagaaggggaaggaggccggcaacagcccctctctgtcggcaaccattgccgagacagaaagaagataaaagagttggcactatcatctaggacccgccgccgccatgtcgcccgccacctcctcctctcccgcctctccccggcgcctcctcccttgccaccggccggctttgcctagagaacgtgacaagagtgagagagaggaggaagggagagagaaggatgatgtggcatccatacatgtgggtcccacgtgggtcccacgctgactcagccgccacgtaggacaaaaccggggtcaaaaccacagaatgacctattgtgattggttttgattagttaagagacgccggatatctggttttgcggttgggggacgattttgtaactcgatgacaagttgagggaccttcggtctactttttccaagaagagtttgccaagtcctaaagaccaccttttatgattttatctaaggaaaaagtatacttggactccctcaactatcgcccgagtatgattcatgtcctccaaccacaaaaccggtgcaaacaatgtccctaagtggttttggaggtggttttagctgacgtggcgcctacgtggcagtcttgaccgagtatttgtcctacgtggtgcttatgtggcattagaataaaaacaaaaataaaaaatatgtgcgacacatgtcattcacaaaaaagagtattgtgggactcacatgtcatcctccctctccttcccttcttcctccccctctctctcccttatctccctccctctctctctctctcctctctctctctcgggagcagcagcggtggtggtggggacgaggtggaggggaccggtggcaacggtgcgcggcggtcgggagtggcggcagtggaggtgaggacgaggccgaggggagcggcagcagcggcggtcgggagcggtcgaagcacgagctcctcccagaagcacaccgtcctcctcctcctccgcctccgccgcatcgtccccgcaaaaccacctcttctgccttctcctcctcctcctgaccgccgcagccgtcgctcccctccgcctcgtccccaccatcaccgccgcagctaccgagagagagataagggagagcgagagggaggatgacatgtgggtcccacaatacttttttgtgtgaatgacatacgggtcccacatttttttttaacttaggtgattccctgcgctttgctgcggaaattactaagtaacttttatattttgtaataatctagctaaaaataaaaattctattagttattaaaaacaaataaaactgatttgtgaaactatgttaatagagaaataaatttagtagactctgtatgaaatataatattccgcactttgattatatggatgaatatttgttaagtattataaaaataatggatatatatatgttaaaaatattgtgaaaaataatgtgaaggaagatgattggatattgatttgtagaattcaatgaattatagatgatgttgcatgcttgcatgttacactatgataagttttgtatgtattattgctagtggatgatgaggtggcatgttgagctttagaattagtaggttataactctatagtaaagataagatttttgtttttattttaataccacgtaagcgccacgtaggacaaagaatcggtcaagaccgccatgtcagccgaaaccacctccaaaaccatctaggaatattgtttgcacatattttaataattgaaggagttgatatatctaattttatggctggagaacatgaatgctactcggacgacagttgagggagttttatctgacgggccctcgtagtccgagcccacacgaccatctaagtgaacagggcccagagagagagagagagagagcccaaagtcaagtgaagtccagcccacggcggtgctcgcgcccgcggcttcccgacgccacccaccgctgccgctgttagtaataagtctagctgctcagagtagttagtttccctctgtttttacgttgagtcttgcacatgatctgttcatcctgtttgtgtgcatagtgggcttgacgcacgctgcgttcgtgcggagtccgtggtgtcgtgcatggtgtgctccagttcgtgggatggcgcgaagtggcaaggagtgtggcacgcacaattaggaggccactatggccacgtttaactttcttgtaatttgctatttaaggttaagctctaatccagaaaagctgccagttaatgcagcgccaaaatactctgtgttgctctgtttctgttttgccagacaagctacagtttttcgttttgccgctaacaattggtatcagagccttcggtgatcgccggggttcctgatgtcgctaccaacgccacgcgtctcccactcaccaccgcgtcgtcgctggcgctcgccgtctccgcgccgtggccgtcatggcagccgcggccaagtcgtggtggaacgcgtcgtccgcgaggcgaccacgagcagcgtcgtctacccgacactcacccacacaaattaccaagactgggcgctggtaatgtgggtgaacatgcaggcccaaggtctgtggggcgcggtggagccggagggcgatgatctcgtcgactatcggcaggaccggcaggcgctcgccgcgatacttcgcgccgtgcccgccgagatgctcgccacgctcgctgtcaaggagacggcgcaggaggcgtgggaagcgatcaagactcgccgtatcggtgtgcagcgcgtgcgtgaggtgaatgcacagcagctgcgccgagaattcggtgatatcctcttcaaggacggtgaaaccgtcgacgacttctcgatgcggatcggcggcctcgccaacaaccttcgcaccttaggtgataatatcactgaagctgaggtcgttcagaaattgttgcaggttgtcccagaacatctccagcaaatagccatctcgattgagaccttgctcgacgtcaatgaggtgtctctcgaggaggttactgggcgtctgcgctccgtcgagcaacgcaagcagcgcaagactgcggcggcatcgagtcaggtcgacgccaatggccgtctcctcttcaccgaggaagaatggctggcgaaattccgcaaggcggcctctctgcaagacgccgctcactcctccggcggcaacggcgaccaccggggtcgagggcgtgggaagaaggacggtggagccccgaaggaggcccagcccaagccagccaacccgggaggccgtaacccgggaaattgcaagaattgcggcaagaggggacattgggccaaagactgtcgcagcaagcccaaggcccagcaagcttacgtagcccaggaggaggacgaagagcctgctctgctcctagccaaggtgcagctggatccgccgcgtcctcgcgtcgctgcaccgacaaacgtcgtctcgccaccgagcgcgccgagggcgccttcgccgatgggcgaactcgccgtagtcgaggcaagggtcttcgcgcagctagacgacggtggcgaacatgatccggcaatgtggatcctggatactggcgcaaccaaccatatgaccgggtcccgctccgctttcgccgagctcgacacggtggtcaccggcactgtcaggtttggcgacggctcggtggttcgcatcgagggccgcggcaccgtcctgttctcctgcaggttcggggaacaccgcggcatcgccggggtctactacatcccgcggctcatggcgaacatcgtcagccttggacagctggatcgttccggcagcaaggtactgattcatcacggcgtcctgcgcgtgtgggatcctcgagggcacctactcgtccgtgtccgacgctccgacgactgcctctacaccatcaatctgtacatcgaccgtccggtctgcctcgcggcaaggagcgccgagccggcgtggcggtggcacgccaggtacggccacctcaactttcctgctctccgcaagctcgcgcaacaggaaatggttcgtgggctgccgctgctgcaacaagtcactcaagtctgcgatggctgtttgctcgggaagcagcggcgagcggcgttcccgacgtagtccaagtaccgcgctgacgaacacctggagctcgtccacggcgatctctgtgggccgatcgaacctgcaacgccggctggtaattggtattttttgttgcttgtcgatgacatgagccgctatatgtggctaaccttgatcaggagcaaggatgaggccgcgaacgccatcaagcactttcaggcccgtgcagaggtggagtccgggcgcaaactccgtgcactgcgcacggatcgtggcggcgaattcacctcaatcgaatttggggaatactgcgccaatctcggagttggtcggcagttgacggcgccctactccccgcagcagaacggagtagtggagcatcgaaaccaaaccatcgtcgccactgcccgcagcatgttgaaggcgaagggtgttcctgggcggttctggggagaggccatgtccacagcggtctttctcttgaatcgttcgccgacgaaaagcttggacaaccaaacgccctatgaagcatggtatggccaacggcccgctatgcatttccggcgcactttcgggtgcagggggcacgtcaagatcaccaagcccgggctgaagaaactcgatgaccggagtgcgccaatggtgctcctcggctacgtgcaaggctcgaaggcctaccggctctatgatccagtcagcgagcgcgtccatgtgtcagggacgtggtgtttgatgaagacgccgcctgggactggggaccagtgacgcccgatggtgctccccagctcgagccgttcaccgtcgaataggtggtgacgaccaccatcgggacggcacctgcttcgttgccgactccgccctcgccaccatcgccggctccgtcggcccccacgacgccggcacctccgtcgcctccgttgccggaggcggttgagtttgtcatgccgcctacccaggattccatcctggacgccgacgcagatgacgacgtcgtgcctcgctaccgcctggtggataacctgctggggaatgcctcaccgcctggacacgctccgcgggtgctggaatagctcgagctccatgttgtgagcgccgacgaacctgcttcactggctgaggcggatccaaactggcgtggcgccatgcaagacgagcttaacgcgatcgtcgacaacgacacttggtcgctcactgacctaccccatggccaccgtgcaattgggctaaaatgggtctacaagctgaaacgtgacgaacagggggcgatcgtgcgctacaaggcgcgcctcgtcgctaaggggtacgtccaatgacagggggtggacttcgacgaggtcttcgcacctgtcgcccggctggaatcggtgcgcctccttctcgccgtcgccgcgcaccaagggtggcaagtccaccacatggacgtcaagtcggcattcctcaacggcgagctgctcgaggaagtttatgtctcgcagccgctgggtttcgtcgacgacaaccacaagaacaaggtgtatcgcctgcacaaagctctttacggcttgcgccaggcgcctcgcgcgtggaatgccaaacttgatagctccttgctgtcactcggctttcaccgcagcagctccgagcatggtgtgtacacacgcaccaggggaggaagacgactgacggtgggcgtctacgtcgatgacctcatcatcaccggcgatcacgacgacgagatccgcagcttcaagggagagatgatgaagctcttcaagatgagtgatttggggcactcagatactacctcggcatcgaggttacccaggacagtgatgggatcacgctggggcaagccgcatatgccggcaagattcttgagaaggcaggactcaaggactgcaatccctgtcagactcccatggaggtacgtttgaaattgagaaagggttcagattttccacttgtggatgctacattgtatcgcagcttggttgggagtctgcgctatctcgtcaacacgcgacccgacctggcattctctgttgggtatgtcagtcgcttcatggagtcacccagggaagatcatctcgcagccgttcggcgcatactgcgctatgtggcaggcactcgctgctggggaattcgatttggcccaggtgcacggtgcgctttgccaatgttggttggttactctgacagtgatctggctggcgatccagatgagcgaaagagcacgtccggccagattttcttcgtcaatggcgggcctatcacttggcagtcctccaagcagaaggtggtggcattgtcctcctgtgaggccgagtacatcgccgcagccgccgcaacatgtcaaggagtatggctcgcgcggctgttagcggaggtgctgggcgacgagatcgccgcaccgctgctgaaggtggacaaccagtccacaatatcattgataaaaaatccagtgcatcatgaccggagtaagcatatcgatgtcaaatatcattatatccgggagtgtgcagaaaagaaactgatcgaaatgatgttcgtgggaactgcggagcagctcggtgatatattcaccaaatctctgggcagaaccaggtttcaggagcttcgtttaaagatcggtgtctgttctcttgacaagagcggtcagacttaagggggtgatttgttagtaataagtctagctgctcagagtagttagtttccctccgtttttacgttgagtcttgtacatgatctgttcatcctgtttgtgttcatagtgggcttgacgcacgctgcgttcgtgcggagtccgtggtgtcgtgcgtggtgtgctccagttcgtgggatggcgcgaagtggcaaggagtgtggcacgcacaattaggaggccactatggccacgtttaactttcttgtaacttgctatttaatgttaagctctaatccagaaaagctgcctttctgttttgctagacaagctacatttcgttttgccgctaacagccgcccactccaccactagtccactgcctcgactgtaccgccgcccccacgtggccggcgccggcgccaccgaccgaccgcccgtgacgccacgccatccaatccgcccgaatccgccccgcaagattccgccgccgaattcccccgccataaatagccgcaagtgtgactgtgtgtgagcactgcagcagcagcagccgccatcacagtctcagctcactcgctcttctccagaggaggcggcggtctctcctccccccctcgccgtctgccggagatgaagtgggccgccgccgccgccgccactgcctcggccgcggccaccgccgtcgcgtccgccgccaccgccgccgccaccgagcgctgcgtcaccccatgctccaatcccacggcacgctccatcccgagacctttgttccttgtggctgggtgtggattgctcacgctcgcgcgtgtttgtttgttacttctgcaggggtcgccggcgtcgagggggaatgggcggaggagcgcggcggaggaccggttcgcgccgcggttcgacgggctgcgcttcatcgagaccctcgtcaccgctcaccgttgaaccgccatggcagagcaggattcatggcttagttaggtagctagattagcattcgcgaagagcagaatggatttcagttagcctcaggatgggtgaaagatgaacgaattagttactactaccatcattaattgactgtgctgttcttcctgcttaatctgagtttgaattttgtgcaaattttggcaaacgttttttttcttgggcaggtatattgatttggctcgcgtcgcatttcgagtattcgatgcctagtagaagtactgctgcctactccctccggtcaaaaaaaaaaaaaaaaaaaaaaaagacaaacctccggtcaaaaaaaagacaaacctggttttcgtgtccaacgtttgaccatttattttatttaaaaaaattataaaaaaaaataaaaagacaagtcacgcataaaatattaatcatgttttatcatctaacaaaatgaaaatatgaattataaaaaaatttcatataagacggacagtcaaaattggacacggaaacccagggttttgcctttttttttacggagagatacggaaactcagggtttgtttttttcggagtaattacttaaagttgactttccgctaaatgtcaggcttcaagtacacatgacatggtcgcctcgcctgctagtaaagtgaatactactcccgtccgttcattataaaactaaaaagatgctcactttattaaattaactatttcttattttatcagcttctaatacatttattatttttattttcactaactttaatttactagtatttggaataaacagaagaagaaaaaattaaacaacttagtactatttggcaagagagcgagtaatactaatggtaacagtgtgaaaaataaagtaacccaaggtgaaaatggatgtggggcatctcgcgccgaccacgcaaagagagccaaatcttcacaagtgagtgtgaacgcagacagattctctgccccgtgatccactgtattcctatgcctctttctctgtccacgtttgcgctgttcccaccactggaactctgcaaattgccttgcctactttccccgcggttcttctccacacgaatttggaattcagggcgagtttggcacagctccagctccatccctcctagaactggagctcagctaaacagttttagctctatcaaaactgggaatgaagctgggtaaaactctctcacaaaatgaactagagttgtggagctgggtttaggcagctccacaactccactctatacccaactcctggagttaaatttaggagttggagctgtaccaaaacagcctctcagtttgtttttgggtggttcttcgaatttaggattgaaaaaaccatagaaactaaaagaacaacatataattttaacagaaatacgactataaaatagagaaatagaaaacataaaaaattacagaaataatatttgagtatatcacataaaaaatgaaggaatcaaataaaagggatagactttaaagaaaatttttcaaaaggtaccagctcttactgatttttctctaaaatttttatatgattgtctactgtaaaggaatttgaaaagaaaaggataatagttgtttgctcaagtcaaagcgagcacacctattttcctcgcccgtaatagttgttttcgacaagtctttcatcgacaattagaaattaacagcagtacagtgatgattatttaatagtgtcatgttacttaatctaatttattttcctaccaaataaagttgacattaacttagtattgattagttggttatctagtatacatgcctatactaatattttttccatgaatttagagaaaccgttaggttcagtttttatgtttaatggttttccccggatatttttctagttatacatgaataacatctggttgaatcttatccctaatctctggatatcctaaattggatatagaaccggcggatgcatatgcatgtctaatcagttcgaccatacataagctagcgatgacaatgtacacagtatccaattatccatcacaacgcatcacaaaggtgcaaggcgatcgatcgaggtgcaccatatattttggataattcatcccaacacgcacttttgaatggacatatagcatctctcatgcagcctcatcttgtttttcctctcctttaattaatctagtactccatcttttgcacataaaaaatgtgtacaggaatgcattttggagggaggtatattctcgacgcacacgcactgcccctatctccgaaaagcacgtccaaccaaaccagaaagccgacgagggagggacagcatgacggaacaacagcgacggccccggttgatcgatgcatgatccttacatatttatattcaacaacttttaggctctgtttatttcgctagacgaaaagttttggcgtgtcacatcggatatacagacacacatttaaagtattaaacatagaaaaaactaattacacatattgcgtgtaaattacgagacgaatttattaagcctaattaatctgtcattagcaaatgtttactgtagcaccacattatcaaatcatagaacgcttaggcttaaaagattcgtctcgcaatttacatataatctgtgtaattagttttgtttggtgaaaagattttgtttgtaaactaaatagggccttaatttcatttctttatgattattaggtcgttcatttatctagccatgatgcatgtgtggtccactcatcaagcttgaaaaaaaatatataacaaaagcgaaagaagctaaaactgaaactgtatataaaaataactcccatggaactggcaatttggatgaggccggttgtcacaatccgtggcgacgcaagcgcttgcgtgaggcgccgggtgaatggatcaatcgaatggaacggcactaacattaacataacggggaagtatgcgtatgatgcaaatatggagcatatctactatcggttgggcgccttcctcggctggggactgctttctccccacgcgatgctcccagccatgcgtacattccacggcgacgacgacgttacttcccctcgctttccccgtcttcttttttctccgaagatgatgttcagctagcgggtctcactgaactgtggcccatgaaacatgctaaattgccaattgccgacatcctcccttggtctttgaggttaggcgggtctgctgtgctatagacatattaattacgctccccttctcgaaatataaggaattttagatgaatgggacattatctgtctagattcgtattattaggaaatgtaatcaccgacggatctgatggatggtctggtggtccccggaccacctaaaaaattgccgacccaaggcccatgtaggtaggtacggcaaaaaaaaaatcccataaaatatattgccgtatcatgtgggttgctaactggcgcgcgcacgtcagcaacggaggtctcgcgcgccctagctggtaccttctgtttcttttttttttcccttttgtgattttcacttttttggtgtttttttttattttttttaatcttcagcacatgtatttttagatctttgggttgaaagtttttagatttgaagttgaaagttttcagatctggtttcgaaagttttcaaatctcgagctgaaaattttcaaatccgagttgaaagttttcaaaatttgtgttacaaatttaaatttcgagtttgtcgagggaagacccccgatcgcggggagtcgcgtgacccccctttcgtgagttcggccgaggtcagagactcatctctccgaagtcgcgtgttcgtccctccgattcccggttagaaagcacacaagtcgattacccaggttcaggccgctctggagtgtaacaccctactcctgcgtttgggattatcaatgaacttttttacaaggttccccttgcctccttctcttcctctctctctagcccccctcttttggtgggcaaggtcctccttttatagcttaaggggataccacatgcgccgtttctacccttcccctccatcggagggaggggagggggcccttctccctactgccaccgggtttcaacccgtgccttttgctggaagctaagcatcggtcggtccttgagtggggcccagcgccgtctcccgcctgacacggggggcagccctgtcattccctcataaatgaatgaggacttgcggtagccctgcatcgaccgacgcccggatgtgacggggcgtacctaccgccactccgcggagacagaggcgacgtgggggcacgaccacccgttcaatcgaccatgaccggcaatagactggtcacagaccggtcgcatccgactgacaggagtcggtcgggcacgccgcacgtctgccctcgccgcattgaatgcagcaagggacggttggggcgctgcacatttatggccgcctagcctggactcccctctcacacttccccccgagagagggcctcgggctaaaacgacgagagagcccgagggggtgacgtcacccccgaggggatgtcgtcgacccccgaggctctccccatcgccttagtgactcacgaggtatacaggtgggaccagctcgcagagccacgtggctggaaagggaagcagctctcctttactccgcatactcctttactccgcatacccccgggcccatatctccgacagagttgaaaatttttaaagtttgagttgaaagtttttaaaatttgactttaaagtttaaatcttaagtccaaaattttcaaatctaacttgaaagttttcaatttgttagtaaaaaatttctccaaaaaaatagtatcctcttaattttgtcattattcttaactaactaactagctacttaactcatcaaaatgcgcgttagcggtgcgtgcgtgcgtgctaattagcttttccgcgtatcatctgctcgcctcgcgtatcggcctacttgttactgttagggctcctggtggcctggttggcatgcctgatccttctcggtgaccagcgtccacgtgcggtgatcggggccgacgatcgagtggcgacggcaaggccgcagcaaggggtggccacgcgacgtgcatatgtagaggacaacggcggcggcggcaagccggcaccggcacgggcgcacgtacggtggttggccggcggaaagtggcaccgagccaaggaagcaaggcagggcagatgattaggccttattcgtttcgaaggattcctaaaggaaatctcaattcctatgcaataagcactatccatgcattcggtttgtaggattcaaagaaaaattttccatagaaacgctatgccaatcctccaaaaatcctccaaaatatactaattccacagaaatgacaacatccactccatccttttttgtttagctaagtataggaaaaatttctgtgttccaatcctttgttttgcacgtgcattcctaaattatttttacgtttttcatattcctatgattttaaaatcctgtgaaccgaatagacccttattgattagccgattagattttctcttctattcaattcatctcagctgggatgcgtcacgaacgaacgcagacggcgagcggaggcggggggcagtcagtggcgtcggaaaggtaggacggcgagtgaaggcagtggcgcgtcgcagatggaggcggtctccgctttctcttccttaccgcacacattcaacttcttcctcgagcacttcatccatttctgccatttgccgctcccgactttggcatcattggatccaacctaatatgatcgatcacttgatcagaaataggtatgggtttatcgaaaaccacagagaagttggtcacggacgttagtttctttccattcacaaatcactgatcgaagtagctccagtccatccctgtctctccaacaaaaaaaaaaaagtctaattcgatccaaaaacagtgatggttccattataccctacttggtcctcagaccaaatacatgtttaaagcccacaaattttcaatgtttcaatgtatcgtgcaaacaaacgacggtgtttgagaaagattaagggaaagataaactaaaaaattattaaggcatgattaattggattttaactaatataaatttaaaaatatatttatttaatattttaagacaagttttatatagttttcttttaaaaaaaccacatcatttatttgaaaagtataataacacaaaccgaggttatatcctagtctgaaaaaacttgcaacatcatcttttcgcttttgcttatactaatcagccaaaatttaaattttcacccttaaatttaaagttaattttgggatttttcaatcatagtttattttcggtctttgctttaagatcactaaaaacacgtatataaaagttttattcataaattatttttttatttacaaatataccgtttcgcattttcctccagtatgtcaaacgatggggctgttagggtatcccaatagaagccacacctatcagtggcctcacatgggtcatacaagctgagaccacacatgagaaacatatctcccaatagaagacactccaaatgcccctacaaaaaatctgaggcaagtgtccgaagacacactagcccacaatgtcccacaacgtgtgttctctagcccatggagcccatgtgcattttactatcctacccctacgttttattttagcccggcctctttttctccgtcacccgtcgcctatctctctatctctttcgccaccgcttgcctctctctccagccgctcaccgctgtctctctccctcctcacaacgagaggggcgagcggtgcacgaggtggctggcagcgcggggtggctgacagtgctggttgctggttcccttcttcctccgccagtcaccgcctctctctctctctccacggttggtcgggaggctggatctagtgggttgctgcgttgtcgctaggttgtcgctgttgcaccgcctccagctcgtccactacctcaccacctccggccaagggtagaagggaaagatacatatgcggagcagagaccatgaaagacttagccacgacatcgtccaacatggagcctagctccgtggcttgatgaaaaggggccgagtagcacagtgaggtgtgtgtctcatagagaagtcgtgcccctcttacgagagatggatccggtcctaaaagaaacgttcgcatggacaaccttatagccacagtacaaagggtaacagtacaggtggaaagatttttcccccgaggcagagctcgtcaacgcgaggtgggagtggacgagcagttgacccaacgaaatgtacagtacagtacgtggaggagcagcaaatgcagaccggccgtggcgtggcaggcagccatcacattcaccgaggttccgctccgctccgctcgtctgcggatcgccgctctctgtctcaaccacccgcacagacgagctccgggcgccgagcgggtgggccccaccggacgcgacgcggaaaaaactccaatccgattaattcccccaacacgccacatccgcccctcctccgctataattaaaacgcgactagccgacggcgcactccgccatttcctcctccaccgcctaccgcatctcctcgcgttcacaccacgcacccgaatcttccgcgcctaccggacgccggtgggccacgccgcgcttcggtcggcgcgtcgccggaggaaggaggaggagccgtctcgttgccatgaagtgggggatcgccgccgccgtcgcgtccgccgccgccgtggccgccgcgtcaggggccgagctgctcgcctgcgactgcgccgatcagccgccgcagcagcaggaggccgccgccgccgccgtcgggaggtgcgacgccttcctcgtccgccacaaccaggtttgcctccccgatccccttcttcttctccccctctcttcttcctcgatctcctctgatccccttttctccttttggctcgtcagggttcgtcgttgtcaagggacgcggaacgcgcggcggcggcggcggcgggggagcagcgtgtggaggggaagaagttcgcgccgcggttcgacggcctccgattcatcgagacgctcgtcacggcgcaccgctgaactggggctgagattccttccttccttcctcccgtgattcggcggaggaagaggaggaggagacgccagatgcgcgcgtgatccttcggcgatttagatgcagcgccaagaagttttgttaggacaattgagaaattgaggctttgaaatctttcctcttctttctgtttgcttttctttctaatttcttcttattttcccccctttctattgttactgctattgctgttgacaattatggtgatccttgttaagctgaggcgataattgtgatgatttatgtaaattgcgagccatgattgattcttcatccaatttcttaggactgttcatgatatgatgttgatatccgcctcctctatcttagcatcccaagggatgtgggtgtctctgctgtaccttgcttacccatgtctgtccttattctcagcttgtttcttttcccttctttttcttctttgatatggtttctttttttttaattattttcttgatgtgatctctttccctccatgttggtggattgaattgctgcatgtgtgtgtggcaacaaattggtgctttgtcatcactcatcaagagttgtgatgctattggcacctgtgattgtgatgttattgtggcaaggggccatgtgatgtggctgcttgctctccatgctttccatttctactcctgcttttcttgattggatttgtatgtgatcaagatttcgaatggatgggatcaacctgagcaggatgtccgaattgaaccgtttatcagcaagctggtgacattgatgggcagaatggatgcaggaggcattgctggaaaggaagtacagtactggagatgattagggctgcgttttatgtgcaaatgaatgggacaggatcacggaagggactctggagcatgttcctcccaacttcctttttccaaaccctttctttcgttgtttattgtaccagcatgacacatgtagtggaaggcaagaaaattggacaaattttgtagtgtccaaactttttttttcatatttgtagtgtccaaactttttttttttcatatttgtagtgtccaaacttttttttttcatagttattgattataacagcctggtacatgtggaagcacaaaaactggacagttctttacactgtacaaacaaattggctggcctgaaaaggaatatccaaggatgaagttgccctgcccgggtttaccttaccgccgataaccgcgtggttaccgggcttaccgcggggtacggtaatataaatatcacggtaaccttcttaaattcaaataaatttaaaaaaaattgaatttttgataaattttgcacggttttatacgatttttcacggttaccgcgcggtaaccgtacttaccgctgggacgcggtaaccctggccccggcggtttgggaaaccctagccatgcccgcatgtgcacatgatttaatttatttttggctggagaattgattgtatttttttctattgtaaattacaaaccagtatgacggaatcgattttataacacatgcctctcgtgctgtatgagttttttcttttaaaaaaaaagaacagcaaagagaacctattcaggtattttcaaaatctactattcataactgcgggaaaagacaagcaaatatttatcttattaatagtattttcaccgtcggtaatagaaaaacggcaaaatttgctacaggacactcaaaaaatatgtaattagttgtcggacaccgcaaagacgtgaatttgctctagtacactccaaaagtgtggtaatttgctgcaggacactaggcgcattaaaatataatatccacccaattgatgagagagaaaccaaataaaatgacagttttactctcatcttcttatctcttcttcctgtctttttccgtcgctcctctcacgtgtgcaaatttcttagattaacgtacagtgagggaaattacacctaagtacagaattgatgatgctgctgatttcttggctaattaacagattatggtgttgattaactaattactccttgctagttttactaggcctccaaaaatttttagacggagtagtcgaagacgatggagaaccttctcgaattaaatttgaaaatatactgttcattcgattttttctcacaaatattcgggatgcaaaatattttacagaaatataccgtcggtctcgcacaaccgttgcgcgaaagtgacataggaaagacgtcgtggacggtatcgcgcagggaaagcatgagaccgcacggtctcgcggattggaatagcgagaccgagcggactaaaagagacatctcgcggtctcgctcattgcacgagcgataccggtccagtgccgatgtaattagtgattaatgattctaattagtgattaattaattattaattaatcattaattaggataattaatcactaattattattagttaatggttaattaagtaattaatcactaatcaaatcgagccgtccgactgtgtcgctgtttgattttgcgagaccgttcggtctctcttttccattccgcgataccgctcgcgacgtcattcccacatcactctcgcgcaacggttgagcgagaccgatggtatatttgtgtaaaaagttttgcatctcgaatattattgagaaaaaattaaataaacagtatattttcaaatttaattcgaaccttctccgggagaaggagcggctcgacgagtgcgggcttgacagcggcgaggagcattgcggtggcgggtaacgatggtggcgatcgtcggcgtagcacaccacacagagcgcatccatggataccacctgctgcatctcgtgcacgtcggcttcggtggcagccggccgccactggatgctacgccgaggactcctcgagaagcaacacgccttctcctcctcctccttgctgtgtgctcccgtaggcagggctcatagacccccgtgtgctggcacctcacaccctccgacaacaaaagaagactaggagaaggaagaagataagggcaaaatagtcatttcacgtggtttctctctcattagttgggcatatattatattttaatgcgcccagtgtcctgcagcaaattaccacatttttggagtgtcctagagtaaattcacgtctttacggtgtccgacagctaattacacattttttgagtgtcctagagcaaattttgcctagaaaaacgtgtctcacatgtgaaacgaaacaatcacttactccctccgttccaaaataagcgcaatcatgagtttccgtttctaactttattcgtccatcttatttaattttttttaaaaaataaaaaacataagtcaaacataaaataatattcatgttttataatctaataacaacaaaaatactaatcataaattttttttaaataagacgatcaatcaaagttggacactgaaacccatagctgcacttattttaggacggatggagtaataaaaaaaactcgtttccaatctgagcacggcaacaccacaaccgctacctgtggcctcaagccgcaggattgagatcctgcctgacgacacatcgggaccacatgtcaattataaaggcacggtgcagtgactgcagaggatcctgatcccaagctgcgacctgcgtctcccttgtcataaaaacgagacccatggcggtcagttgccttttgagctaacaaagatctttttctagtgggttccatgaatctgccttcaagtgtatataaattttatgactgtgattattcccttcatttcatattattttttttcactcaaccacctttagctattaattatttttgtttcattgattcactagttgcatacgtaatagttcgttttcttaaaaaaaaataggagatacttcctccgttttatatcataagtcattttgactttctaagataaacttattgaaagtttgaccaaatttatagaaaaatatagcaacacttatagaactaattagtttcattacatctaaggttgaacatatattttttttgtgttgtgttgaaaatattggtatatttttctataaacttggtgaaatcaataaaaaaattgacttagaaaaaaatcaaaacgacttaaaatatgaaagagaggtaatacattttgttttcttaatgtataggggtggggtttgattcatcttccgcacgctcgccaagcccaagagatgatttcagcctaacacgctaataaaaaggagttttcacatgagtccccctttactctttgtttacatttagatctgtatattaatttgtcgttttatgtaccctgacatagtttcctggacaaaggtttatacacaatagactgaaaatgtgggctaaatttctgagcatgacaaactctatatgctaaatttctgaacatgacaaactctatatgcctataatagcatgtttagacctacctgtgacttatttcttgtgtttgacttcagaattttgttcctaggacataggttatggaccttgggcaagcaagtagaagagtagctgcagcaatcttgatttcagatatacagtatatcataactggccatcattcaacataaaatattcagctcaaacaggaataggcactatctgtgctgacatagcatataaaaacattcagaacctattcatattgatgccattttaaaccataccatctttttgataaaatctaacatgtggatgcattaggtttgttaccaaacattggttatgcactaatgcttatgaaacttggcaacatcatagtaagttaccaaaatctgggcaggtcaaatgttgccaaaatttggtaatgtatatgtgggcactaaactaaacagataaacaacagcctaccatgttggtaacataccaaatttggaaatgtttattttggcatcaatctgaacaggctatcaaatttcagccattgtttgacatcaatagattcgaccttgaggcttgaggtcctagaccacacatatgctacaagaagagtgtcacagcaaagatagtgccacaagattaataatgattaaatctggagtgtcagctcttgattaattctgatagggaataaggcaatgtgtagttgtgtactatacaataaataaactaaactatagtttagagatgtcgccgaatttcaccatagcaaatcacttcattttaacattaaagcaggattcgaaattttgaaaccaccccccccccccacaacatgaaatgatttcaactaaaacttttggattttgtgaatttgatgaaaagaaatgttcaaattcaagaattcaaattatttcggaaattatggtcatatcggtgatcccgataaaaatagcgaaaacaaatatttgaatcctgaattaaagtatagggtttcctaaaaagtttaagtgaacagagacctcataacttttaattcaaaatcataaaatgacagcgggaaaaactcaataagcaactatctaacacaagttaacactgtgccagaagttaggttcctctgcccattatcaagtatccacaattctacacatttgtgaagagaatgaaggctattatcagtctgattagcagtacccacacttcacattctaatcacacagctaatcagctagctattctaatttatgatgcaaacttgcaaattatcagccaacatttcattcgattaacatatcacaagaaaattgcatgtcttaaagcagcattttcatgaattattttggagcaatgcattcaaaccgaaaagaggaacgcctgacccaaactatctgaagattaccttataagtctatacgaacgagggctatcatagcccggctatgacaaacttggcacaaaccaagtgcaagcatgcatcgaggggccaggcaactcttcgatttggccatcctccatcctgaaccggtagatgaaagacctgctggctctgtccatcttgaagaagtaaacacaattcccctcaagccccgcgaaatccgcggcgcggagcgagaatccctggtagagaccaacgaacagcattctgtctctaatgctcctcatctgaacccaccgcgatttctcccccgcaatctctagccggtgaacctccaatgcacagcaatcctccagcaattctcctgcttgttcactgttcttgctcctgaagtaccgaatcacgcacaggagatcatcgccggacgggaataggcactatctgtgctgacatagcatataaaaacattcaggacccattcagattgatgccattttaatccataccatctttttgataaaatctaacatgtggatgcattaggtttgctaccagacattggttatgcactaatgtttatgaaatttggcaacatcatagtaagttaccaaaatctggacaggccaaatgttgccaaaatttggtaatgtatatctgggcactaaactaaacacataaaaaatagcctaccatgttggtaacttaccaaaatttggaaagttttattttggcatcaataggttggaccttgaggtcctagaccacacatatgctacaagaagagtgtcacagcaaagatagtgccacaagattaataatgattaaatatggagtgtcagctcttgattaattctgatagggaatatggcaatatgtattgtacaataaataaactaaactatagtttagagatgttgccaaatttcaccatggcaaatcacttcattttaacattaaagcaggattcgaaattgtgaaccccccaacacgaaatgatttcaactaaaacttttggaattttttgtgaatttgataaaaagaaatgttcatatttgaccaaattttgttcaagaattcaaattatttcggaaattatggtcatatcggtaaaatttgaatgaaagtataggacttcttaacaagtttaagtgaacagagatctcataatttttaattcaaaatcacaaaatgacagcgggaataactcaataagcaactatctaacacaagttaacactgtgtcagaagttaggttcctctgcccatttatctaatcatagatatttgcatacatgaatttgcttcaatgtcgcaaggttggcactgatatcaagaagaattcacaggtaatgaaaataactgactatctcgaactccaagaagtatccacaattctacacatttgtgaagagaatgaaggcaattatcagtctgattagcagtacccaaactttacattccaatcacacagctaatcagctagctattctaatttatgatgcaaacttgcaaattatcagccaacatttcattcgattaacatatcacaagaaaattgcatgtcttaaagcagcattttcatgaattattttggagcaatgtattcaaaccaaaaagaggaacgcctgaccaaaactatctgaagattaccttataagtccacgaatgagggctatgacaaacttggcacaaaccaagtgcaagcatgcattgaggggccaggcaactcttcgatttgaccatcctccatgctgaaccggtagatgaaagacctgctggctctgtccatcttgaagaagtaaacacaattcccctcaagccccgcgaaatccgcggcgcggagcgagaatccctggtagagaccaacgaacagcattctgtctccaatgctcctcatctgaacccaccgcgatttctcccccgcaatctctagccggtgaacctccaatgcacggcaatcctccagcaattctcctgcttgttctgtgttcttgcgcctgaagtaccgaatcacgcacaggagatcatcgccggacgggacgaaggatgagcacttgaaggcatccctgtgcagggtcaccggcggtggtggcggcggcgcagcgtcaccgagcacggcaagcgtggcggcgtcgaagatggtgaggtggccgcggtcgttgcagacgaacaccttcccggcgtggtacatgttctcggcgacgaggtccaccaccggcaccgtcgtccacccgccgccgccgccggcggggtggtggaagaagatcctcctggtgtcgtagagcaccaccggcgagtcgggaccggggaggtagtagccctgggtgatgggggagaaggcgtcgaagggggaaggcgggagggggaggtcggcgccggtgagggggttgacgaggaggaggagggggccgtggtcggagaagaggaggtgggagtttgtgtggccgaggagggagcaggtggcggagggggcggcgacggagcggagggcggcggaggagagggagtagaaggagagggaggggccggggccggcggtggggttgatgggggcggggcgggcaaggagccatgggaggaagggaggaggggaggccgctgcggcggcggtggcggcgcgccacgcgcggcagacggcgcggaagcggaggaagtcgagtgggtcgtggaggcggccggagaagaggcggaggaggtcgccggggaggcctgaccagtccattcgcggcggcggaggctacggcggcagcgcgtcttgaatgtttcagattggggagacggcgaaatggctcctattttttgtttctttttttccattttgctacgaatctgtcgcgtgatttgttttgatgataggatgtgtttagttcacactaaaattaaaaatatgttaaaattaaaacgatgtgacgaaaaagttaaaagtttatttatgtagaaaaattttgatgtgataaaaaagttagatgtttgaagaaaaaattttggaactaaactcggctatacttgtctcatcaattaacgagccagagggaccattaaagctgagatgcttgtattttggaaaggaggaattgacagcttagcatggccattttatgctttaacccattggctgtgtttagttcagcgtaaagtttggatttcaattgaaattagagatgatgtaactgaaaagttatgtgtgtatgacaggttgatgtgatgaaaaaggactgaagtttggatccaaattttagatctaaacacagccattgttttgtttgttatacagagaaaccctcttggtataaagctaaccagttgaacaaacacatacaaatgacaaaagctgggaccataatgttgaagcaacattgttcatatatattgaaaaccaacagtaacgaaaatcctgctccgtaagattcacaaggatccagcatatacatatcgcaagccacaatattaggggaagtgtcatatttacaggtgtcaaaagatgaatacaattgaccaaaaaaaagcttatactcgaacaggataatggacagacgacttattgactggatgcagcagccactgattggaatttgatagtcagaaattacaagatgaatcaggtcctaagataagacgatcatgagttggtacaaatggctaacacaacagacaagacccacgactatcaactctttcacagaaaagtggaacaaagatatatgatcacagacgctcatctcttaatgagaaaaccaagcaggattctcagaatagcaataaccagcacaaaaactagtgagaaaccaccgttctgactccccatttgcctccttagaagatcctgttcaattccaatagaagataaatgaaactacgtgagtgttgcagttcagattcagatttcattgatgcacaaagccataatagacaaacaagatgatatttgtagataacgaaatacatctgtacttgtagaaattagtgggttgcaaataaacttgacaaaaaagttaaaaaaaaataaataaagcgcatgtaaactgcttattctatctatctaactcaaagctaaaaattgtattagtgtttttttccggtggactggtcactgctggccacagtaaaagaacagggaatgagtaaatcatgtggtgattatttattggagatgcaaatttagcgacaaagctgttactcaaacctaactagtttttttttttttggggggggggggggtaagttaatctagttcttactgccaaagttaaaaaatataatgggtcattaaatgtttgcataatcaagctaaccagttcttcttgaagcttcatgttctgttgaatggcagaactcttctcctccttcaactttgaaatcaaggccaatggctgcacatagctgtgaaagagatcagcttattgtgctttggcatcattgtcaagcaacataggaagtcggaatcctctataataagacctctcagttcctcagtttgtaacaaaagtaaaatgctaacaaagtgaatatatgctagaagatgaagcatccctcagattaagttaccatttgcatctaaatatgttgagatgaaaagccatgatttatgcaaggagaacattaatcaaaatatcattagagcaagaatattggcaagcaaaaaaaaaatgttatagtagtgtgtgaaattaggattcagtgataacatggcattgtcaaatttaacaggagaacaatgcaacatatatatcaagcaaagtccgtagttttccccagggaaaaaacaaagagcatagcataaaacagcacacacatagttctgttggatcagagttctaaaacaagtgtcatgcagaggactaggaaataagaagagcacagcaacactgtaaaatataattaaacaacttctgaagcaatgctcttggataaaatcagacatagtagtatctctaaattatgacacctatcagaagaaaacatagatgtttcccatctgaagatgcatacctcagaggttactgtttcttattctctagatccttttgttgcctgcaaagaaaagttcacaatttgtttcagatgataaggaaatgaatctctctgaaacgagaaatttaactatttgccactttaggtttgccaattatccaaatgcccttattaggtttgtccttaattttttttgcccttttaaggtggtggcatcttaactatttgccacttttgcccatgtggcatgccaacatggcaacacagtgtaaaaatcgacgtgggacacacttgtgagccgcacagctatccccttcctctcgctctccggcctacccgtcggctgccagcgttgctcctctcggcgacggcggtgcaccggcttgcagttgcggaggaggagggggagccgagcgccgccgagagtccgacctctcttcaccgcgctcagctgcaaccgcaggattcgccaagatccgcggagccgtccgcgttgtcagtggatggccgaggagggagggacgcc

SEQ ID NO: 6921 - DNA, 26873 bp, Oryza sativa
aacggcactcggctccccctcctccttccatggctccatggtgagagagacaggcgctcggcgaggacggcgaccaccgtcggtgcaaacaacgtgagcatgacctcgcacgtccagtctagtgcgtacatcctcgactacggtggcgctcggctccccctcctccgccgccgcgagccggcacgccgtcgccgctgccgacatggttcgcctctgggaaagagaggagcagcgctcggctccccctcctcctccgcagccgcgagccggcgcatcgccaccgccgccgctgggaaagagaggagtagcgacggaagccgatgggtatgtcggagagcgagagagggggaaagaggatagctgtgcggctaacaagtgggtcccacatcgatttttacactgtgttgccatgttggcatgccacagtggcaaatagttaagatgccaccacattataggggcaaaaaaaaattaaggacaaacctaagaaagaagggtatttggataattggtaaacgtaaaaatggcaaatagttaaattccccctgaacccccaccaaattgaagcccccaaaagtacaacgcacaaagcctccatgggaaggaaatgcaaagatagtgccaccgcacaaacacatcccgcaggtggcggcggatctagggcttggggtgctggtgctcggcgtcttcggctaggagcaaggagacgctggatgagatgaagagggtagaggcggtggccgtcggcgggggttaggctggtggcctgtggcggaggaggcagcgcggggtgtagaaggagagggaggggcgggtggtgtgctggaactggaagggatcggaggaggggaggccgcagctgcctgcatgtggcggtggctgaaacccatcggtggagaggagtggagtggagtggcggcggcgcggtcagaggctactggccaaggaagaagaagggctgatattataggatacaggtgggacccacgtgccagtggaagtaaagggcacgagcccacctgtcatcctctctgactctgcttgacttccatggcgcggtgcgaccgcgagcgacttcttcccggcttgctgccggtgatggccgagtagaatcgtagaaagtgagggaaggggacgaggatgtctgagcgcaagtactcacctagactccatgggcgtcgtcgaggaagaccgtctgctgcagtgcagggaagatgagaagatcgattcaatcacctgccaccaccggtgcggcaatattccttcttcaggagatgctgcaccaatataatggccgttggactgcctatacatttgtcgataaatttttccctaaaaatttgatagatgtaattattgtacaatcataatgtaattacgctgtaacttatatataattacactgtaacttgcatgtaactacattgtaacttatatataagtttcacataattttgaattattagatttattacaagatttgttttggtgaggaagaaaacaaatcatagcacacacatatatgaaagaatttgttcccacgacctccattttaccgaaataacatgttacggagagatttttgaaagttatatataagttacactatagttacagtgtaattacatgcaagttacagtgtaattacactacgattgtactgtaattacatctgtcaaatttttgagggaaaatttgtcgacaaatatatagcaaaatcgaatgggcgtaaactgtcacctcctcctggcaatcgatgtgcctgcatccgtgtccgtcgtgggtggttagcgccctgcaggaggacggaaaaaaaagtggtgtggcatatggactaggtcttgagaccgagaggacacacaagaatttcagcaagtctacgttatgtgattatgtcaagttgtcaaaacggtaaattcaacctggaaacaaccactaaaccacaattcatctacataaatgcataaataaaagggtaggcactgaaaaatacttgaaagaataatgtttcagacttttagcaatacatatataatcgatagatatgataaatatatatagaatatgcaaaagaaagagtaaagatggattaaaagactacctttaacatggattaacttaaaaaaaaacaagttgaattttttagatggcctttactcaaaagagctacaaccaattattacatagtagcaatcaaaaacagagtgtaaatctagagaataacaaagaatccagcctaacgtaaggagatcacaattattgaagtctatttgtaaatctccaaccataattgataaaaagttgcataaccgtagtctctaactttcgacgtgcaactttcagaaactcttcatcttcatcacacttttgtagttgtgcccgaaaccggagtcaatatgttgccctgaaaataacctgcatataggaaaatgatggtgatttttcaaaaaccatatcgttcctacttagccatattgcccaacaaatggcagaagctccaacaagtatcagtttactctttttcttatcaattcccaaaagccacccattaaaaatagaggtaagttcatccgaggtcccttaacttgttaaggaatccgactttcgtccctcaatcggaaaactagacacaacgggtccctcaactattaaaactggtgcagattagatcccttggcagttttgagagtggttttggctgacgtggcgcctacgtggctaatttgactcggtcttcatctgacgtggcattgacgtggcgcttacgtggcaattcgatcaggaaaaataataaaaccggtaggacccacatgtcagtttcacacacaaattaataaaaatggtggggcctacgtgggccccacatatcatgctcacccctcctcttcttcctcctccctccccatctctcctctcttcgtctctctcctctgctctctccaggcgacggagaggcagcggcggccggcggccggcggccggcgggagagaagggagcggcgcgcagcggcggaggcacggctccggcggttgtgggcagaagaggaatcggcggcgggaagtggctctggctgcggcggccgcggtcgctgcacatgctcgaccccttcgcggccgctgccgcgcccgccgctgccgaggctccgtccggggaggccgccatcgccgctgtcggagcggcggcggaggaggcaaccccgacgctgatcgacgcctcagcaagctcaacaaccaccttgataagatgctgaagtaagatttctcatgttatggcaaaaactgaaaattgattccacaacgcttgatgcattccttaaaaaaatgtttgaattttctgttgttgaaatcgatcatatttttaataactttttggttctggtatgttatgttccttttgaacagagacatggaggaatcatggctggggccatggaaatgccttctcttgggatacgaatgtacgatttaactgaccaacacattgaggcagctctgacaaacctgattgctggtctggaatcagaatacaaatttgaagtaaatccagtgctcatcaaggtcatccttggtggtgctatgtcagtggatgaagtgcaggactgtgtttctcaacttatatcgtgtaaaggctattttggccgaggagggtgttgtgggaaagacagacttagagccttctcttcttgctgtattgagtctgaagctctggagacagtcgaatgcttaataaaaagtacagtgaatgagctgagtgaaccagttgatagagatccaggcatttttgttctcgacgaacctgctgcggccacggccacgaccacgagtccacgacgacacttccgctcccgagatactgccacgtagcgagccctccgcctccagtccacgccggggtcgcgggcttgggcgacgagcagcaactggagcagctggcgagggtgctctcctcgctgtggtacaacgagatggcctccgcggcgccgctcctcgccaactcaacgttgctcgcggcgtggccagggtcgatcaccgtcttcgcggctcccgacgtcttcctccgctcctcttgcaccatgtgctcgcgccgccatgtcctactggagcacatcgcgactagataaatcatttgttgccacgaaaaaaatcgtggcatcaatactaaaattgtggaaatagatacatgttgccacaattgtaaaatcgttgctagccgtagtaataaacagcgtggtaataggttattgcaacgatttttattttgtggtaataaatttagatgttgccacggaatggatgtggcaaaaagtcatattgcaacacttcacatcgttgtaataaaaattattgccaccactccatatgtagcattagttttacgtaccaagttaaaagttcaaatattagtctatcatcctatctatttatctactctttttttttgattttgtgtcttggctaggattcgaacccaagacctgtccttcaggtgtgctctcctttaccaactcaactacacatcaattctgttcgaaaatgcatatagttctatttgagcctagctaactgagatttgaatcatagatttgatatctaaaagatttcaaatgaaaaagttatcacctataaaattgtagatctcgtcgagagctataatttccatataaaatttgtctcaatccgtgtccatatgaaaaaataaagttaaattatgagatggcaatttttttattgcaacaattttgttgatcatggcaacaaaaaatagtgaaaagtactgtgtactatataaattgccacaaaaataaaaattgtggcgatagaacatgtttttttgcaacagtacgatttttcgtggcaatatctcattttctattgcaacaaaagtactaaataaaacaacgattgtagatcgttgcaataaaaaataattatttgccacagaaaaattatcattgcaatactataatatattgctacgaattattttttgttgtaataatttggtggcaatagctcaattatcttgtagcgccctgggagggaggaggaagaacaggaagggtgagttctactgacatgtggggcccacgtgggtcccccatttttattatttatgtgtgagattgacatgtgggtcccacgggttttattatttttcgggatcgaattgccacgtaagcgccacgtcaatccacatcagatgaagaccgagtcaaattagccacgtaggagccacgtcagccaaaaccactctcaaaaacgccgagggatctaatctgcaccggttttgatagttgagggacccgttgtgtctggttttctgaattagggacgaaaatcggattcgttgacaagttaagggacctcagatgaacttatttcttaaaaatatgagatatgctaactggaagattaaaaaccaaaagagaactgaactgctatccatatgaacttcgcaaaatgacaattcacatagagatgttgaatagactcattcttcaaacaaaaagaatacctcaagctgccattccagttacgccttgccaaattatccttagttaacacaacccctttaagcaagtaccacatgaaaattttaatcttaagtggcaacttaagcttccaaatacacttatttctctcgatatagccattattaattaaagctaggtatatagacctcaccaagaacaagccattctgatgggaattccatatgaaactatcagacgaattattcaactggatatgtactatagaggcacacaactcatgccaacaaacaagattctgataaactaaagctctcctaaaagaaacattaagcggaacagatcccataacagtggcaatagagtatgttttccttcggacaatagtgtataacgacggatatttatccttgaaagccaagttgcctagccatttatcttcccaaaatctaatttgttccccattattaacaatccaagagcccatatttaagaaagtacttttgacattcataagaccaggcaaaaaataggaatccccttgtttcctatcaacttgggttatagacttattataaagatatttcctcttcaataagtcatgccaaaccccttcctcattaattaacttaaacaatcatttacttaaaaaacatttattttgtatctccagattatgaatcccaagaccccccggtccttgggttgacaaacaacatcccacctagtgagcctgtaatttttcttatgatcatccccttgtcaaaagaaccgcgatctgtaataatcaattttacgaagaacccctttcggcacctaaaaaaagatatcataaatatggctaaacttaaaagaacagaattaatcaacaccaatctaccaccaacagataaatgcttgcctttccaactactaagctttttctcaattctctcttcaataagtttccaatctttactagtaagcttcctaaagtgcatcggaattccaagatatttaaaaggaaaggcacctaacttacaaccaaagataccagaatattgctcataacattcctttgcctgaccaaaacaaaataattcactcttgtgaaaatttatttttaggctaggtaacttttcaaagacagattaaatcaatttcagattctttgcctgttgcaagtcatgctccaaaaagatgatagtatcatatgcgtattgcaagatagacaaaccatcgtcaacaagatggggaataatcccattcaatagtcccacctctttagccatcttgatcaatagagtaagcatgtcagctactatattaaaaagaataggagataaaggatccccttgcctaaaacctttgtaagtttgaaaacaattaccaatttgatcgttaacctttataccaacatcatcgccttgaataaaagatgctatccactcacaccatctaggagaaaagcctttcattctcaaagttttttgttgtacaaaaggccatttaactttgtcataagctttctcaaaatcaatcttaaaaattacaccgcttttatctttgcgatgtaattcatgtaaagtctcatgtaaaataagcaccccttccataatatttctcccaggaatgaacgctgtttgagtaggactaattaccttttgagcgatatccattgttctatttgtagcaattttggtaaaaatcttaaagctaacattaagtaagcatataggtctatactgttgaatcttcatagccttaacacacttaggcaaaagaatgatagtaccaaagttcagcgaatataagggaaaactcccagaatgaaagtccttaaacagttctaagaggtcgaatttaatgacattccagaaaacttggtaaaactcagcaggaaatccatctggacccggagctttgttgtgttccatttggaaaatagcatccttaacctcattttcagtaaaatccttagttaaggcttcattctccaattgtgaaacttgaggaatgtcagtaacataattctcatcaaactgaaggtcagactcatcaagagggccaaaaagacctttataataagtggtaatatgtgactttaaattggcatcaccacttatgcgactttaaaaacaagttgaatgaaacgtaaaacagtaaaagcatactgctcgacaactactagactacctggtgaaatagctcttcaaatctacaaacaaaattacacacatgtgaatcaatgacaaattgtgcattaacttttgcaaattgcaatgttttcacttgtcatttgtcaaatactcaacaaatgttatctttttaagatgccaaagcctttcctttcccctttctatccatttgtgctgaatcgggccagttgctttgctgccttgcccttgctgacttgttggtgtagctgccctgctcggcttagagctgggttgctgcgtgcagcccagtggcggacacaggattttgaagatggtgtacagagttatcaaatcgttgttccataaagaaactaaagcttaatagtaggaaaagtaatgagaaagtttttcttgctagaacaaataaaaatagaaacattgcaaaatagctaaagaaaaattaaatcttggagaagagatagtatgttttcatcccaaacactccatagagatttttgcactaccatttaactttttgactgctctaccatataaattcagatatgcacattaatcaaatttcctaaaagcaaccatcaattgaatcaaacattaactacagaaagatgagttaggagcctaaaaatatatatgatacgaacacattcaacccattgagccatgaggttgcttctccagtgcagtggcttgtcgatcagctgcttgttctcggcttctctccgtgaccacgagcagcgcctgcacacggctgccattggttggttgtcccaaaccataggaaggcatgcaatatgctcggtattctggttgtaagccccatagacaaaccagagattcagggtcatgagacgagatcgaggagcttgtgttgttctgccagagccgttttctatgagttgtattgtgattttaggctaaagaatagctgttttgacccaactaatgatatatataggtaatatacctattaattcaaagattattagtcaaaaattttgggggtacagatgtacccccatgtcccatgctaggttcacccctggcgcagccgtgcatgccaggtggcaccgcgacactaggagcagacgagcaccgccatgccggcctgcagcctgcagatgctcgccgcctagcctagatgcattgcccacgtgttaacaaccaaatttggtaatatcggcatcggaaaagaagattagatcgaagtggagtcgaaggcggagatcgattcgagaacagagcaagaatcggctggagtccagatcggctacgaataggatcggctgggtctgagtcggactaggtaagccgatacagccaattccgacaatacgacttggtgtatgacatcgggttgaattgaggtacttcaagatgattgccgcacatggatagagtcctgagaaggcaattgtatctattaatttggatattttatgtaatttccatagagatatgtttgggcaaaagtctgccgcaaagacttatggtatcttagagtatgttagagataagagtcgtgtccgatatggacatagtttgtaattttcgggtataaatagaccccgaaccccgtgtaatcaattaacacacatgttcactacaatttcggcgcatcaccacccttttgctttagttttatttcgacgagttcttgctttcgggttgagctgcatcggtttcgatcttcaacaaaagataaaacttgttatgacggcttgcgttctcgggattagtgcttccatctttatgatattctaatcttgcttatgtaattcgtcgagttatcatatatcttacataatttctggcaatatcgttatctaacctacaatcggctaacatctatcggtaaagggcagtcgattaggttagatttcaacgttgatttaaattatataagatatctaccactctatgaaatttccagcggcttgattgtttagatgttgttcttcttttcatacttaatgctgcatcagttgagtttgatctattaagtcgtgcttagcatatcaatctctagcatgccttctggttgccaattagggtagtatcggagtttcagcctaccttatctgatttaactatatttgctctatatgcttcattgacatgttaaatccaccctttatgtcaagatattattgcatctaagtatactaagcttctgtttagcatattctgcttgttttaacatctaaacatagagttgtatcggagtattagccgatacatgctagatcaatctgatcggctatgccatgaacatatatagtccttttattaatatatatttcgatctaagtgatttatactgtttcggcatggcgaccgatctatcccaatcacttgatttaagtatataccgatataagaactacatattgttaatatctacaaccgatcgggtagatttagttctttattacctatttacaaccgccgatcgatttacatatgacatcggctcaaagataaatgatatgtcatcggcacttagccgaccggctatcatttataggtttaaccgtggtttctttgtctctatttcttgttgattacaggatcaaatcaactggcacgctaacacacccgaaggcgagctttggacctgcactggagttaagcagatctcccaggcctcgtgtttttcgtcaacaccacgccgacgccatcgcgtcacacgtcggctggacgccgcgcatggccgctgcccggcttgaccctggagctgaaggccggagcagggggtactcgcaggcagcctaaggtatggcgagcgccagacctcgccataccgggtcctccgccactggccgtccacaagcttgacgcgcggtgaaattgagcaaatcaatccagaactagttttttttttttttttgtttctgcattgcatagaaaagttaccagtgaactgaaactggtcttaaaaatttacatctatgctatcacaagaacctattgggagttgttccccagagataagacattgacactccatccatcttccatcacaatctccaacaccacaaggttatctcgctctttaactggatgatgaagcctatggtccaaacacttctgtgagctgaagctgagcttgcatgtcaaacagaaccggtcttttaaatgttcttgattataactcgagtttacgagtttttgcactgtctgccagctccggccccgttgtacctccgcaacctatatgggagagaaatcaagaactcacaaaattaaatctggactcttttgtagcacgaattgaactcgattcaacgattccaatttccaagccaaagaaatgtccacaagaaaaggtaagaacagaaaataatcaattatcgaaactcacagaatgaaatcaggactctttctacaacaaattgaactcgattcaacgattccaatttccaagcaaaagaaatgcctgcaagaaaaggcaataacataaaataatcaatcatcgaactcacaaaatgaaatcaggactctttgcagaagaaattgaactcgattcaacgaatccaatttcagagcaaaggaaatgcccgcaagaaaaggcaataacagaaaatgatcaatcatcgaactcacaaaacagttagaaacaacagaaacaaacaatttattcccaccttggatttcgggctacaaaagttgtatcttgacgctattggtaatcgcagcggcatttctccctcagacccgaaagtgttttcctcagcctatctcttcctagcattatctaggtgtttgcttcgtgcttgaccctttgaatcttgtccaattacaacccatcctcttatttttggcatctcgatggctcagtacaggaaaaccattaacaatgaaaatatgtcaaaaagaaggaaacatgtggagttagttcagatgcatgagacaggacatgtagatgattgaaagaaagattcttgccgcaacgcaactacctccactgtaacagcattggtgccagggtgaaggatggcggcgtgttccggacaacaggacaaacaaaccatggctgagtagcgggaacaaaacctctcatgacacgaaatcctcatgcaaaatctgttctatgaagggagaaagatccatttttgttgaagaggaggtgaagaaattaagaaagacgatcggggtggacgggaggaagaaggagaggcgaggaagaagaaaagagtctatcggcagagacgagaaaaaaactattataaaatgttaaactaactagttaaaacttataagtattattattactcagtaagttacccctttcaaattgatattctagcttcgctactgtaaagtttggatcaaagtattattactaatgtcatacttcttgatttcttctatgatttggatgtccgctgaattccgctgtatgacgtaaaagcatcactaaattctattagttgtttgtttaggtagcggtggtacaatgcgaccaaagctggcaattggtgcagaacttgtcaacataaattttaatcaattgagctgcctatatgaggaatttttcgtgcatcactgcttgagacatatgtcccactacccagtttagcaggaaattaactttaaccaaaccgcccagtttagcaggaaattaactttaaccaaagttagagaaaaatgcattgacatctattccaataaataaatactttctccgtttcatattataagactttctagcattgtccacattcatatatatgttaatgaatctagacatatatgtgtgcctagattcattaacatctatatgaatgtgggtaatgctagaaagtcttataacctaaaacggaggtagtatatatgttacaccatgatcactaattttacgctatataatataacatatgatatacttatacatagtgaaagacacaactcagttgaacaatatttatagcgcactatgatcattagatttacaacaaatgttactcacctatatatgttattagttaagaacattctagattatatttaggaaaaaatatctctcaaattctaaaaactaattaatcaacttggaagcatacataattactactaactcatgtaaaaattacaaataatataatacaaaccatgggcacacaaaccaaccgggagtttttagtggctaaagctatcagtatcatcatcaataataaagaagaatgagataacaaggagatggaagagtggaagaataccatgagaaaattgcagttttaccctacattgtgctaaagaacaaatccacgttgaaaaatatgaaaatttaataatatttgtaaatcattgatgtgtatattatacaatgtctttgtgaaagatatgacttccagcagagagtgtgagcttgtcatgtgagttgggcacatctttttgctgggagcctatctttattgagattcgaagtgcctaggttgaggtagttttgtatccactgcaataccactctatctatcatgcgcttcctattattattcatgggctagctgcttcagcttcattgagtagcttgcttctatttttgtgctcggcgcattgtcctcccctgcttttatcttaccatcattgtgtcgaatagctttctcaacatggacacatatgtcggcaatctggaaaagcctcattgctaagggtgtgttttgtgtcgccaactcttggatggtgtactgaactcggacgcctaccttgaaggctcgtatgacagatgcatcagtgatctcaaggattttgttatgacattcattgaaaatcctataaagtcttacaatgacatgccatttttctacctcatggcatgtaggtactccttgaccgcgtgccacttctaggtgcaacgacgagacaaggagcgaccctaggctgttgctgttgttgctgctactgcatgctgctcaaagttcgagcaggagtgcaccgctgcttctgttgttcctcggcgccctgaactcgctgtaaaatcaaggagttgatttagattttgtgatgaaaatattggtggtttgctaatgttattttggagattttataagacggttgattttgtgaagtgtgcagtttcggttgaccctagcggtctgactggtcgcgtgccgccagtcagaccacagatgttgcggcggtcagaccagccggctcgacggtctaaccggcaggatcatgttcgatgtcggtttcgggttgtcttgttggatttggatgtttccttcggggatttggcttctagatggtttctatgcgtatggatactattgttatactaatgtgagtcaagttgggacgaacttgggctcggaatatggtttcttggttgttgcatgtgcaggtgttgcttgaggcctcgggagagtgttgccggtgatagattggagtcaacttgggacaagttgatgtccagagatcaagagatcatgagggatattaaaggctagaggacaatgcatatggtgatgaagaaattcatatggtatacaagagggattgtgtacatatggtaagaggagtcaaatttggaagggagtccgaattcaggaagattgattaagataaggaaagagataagttggatacttgcaagagagggtttcctatgtgggttaggagttctaagttgtgttagattcgtgggctatgcacagcctacctcatgtataaatagagagggaagatgaggcctcccggtatcgattttagagatactagagttgagagaaagttagggtttcgagtttagttcgagattttggtgaggagtgttgttggtgcactttgtaaacactagttgatgcaataatgtcaaaaagtttcaatctacatcttcgagtttgtcatctaccggtgtttatgggtcccgacggtctaaccgcaggtgtgcgtgcggtctgaccggtgggatagcggcggtctgaccgcaggtctacgggcggtctgaccggcgaggcttcggtggtttgaccggcggtaggagggcggttcgaccagcggtgatagggcttcgacgtctaattcgttttgagggtaatctttaattccgaaaaagatttttgggttttcggttttccctaccattcaccctcctctggtaggtttgttaggtttgtttggtcttgtgtgatcctacactcgcctggccccccctcgatttcgccaccacgctgtcaggaagccagccacgggggcatcgtcgtcggcgagccccattgccgaccgctccaccactgctgccctaccacggctagaatcaccgagcaagaagagtcgaggaagaatataagtgtaacatacgggtcccacttgttaacctctaaggctgtgtttgtttctgtgtgctgggaactcatttcccattcacggaaaacatagaggtccattagcgtgcaaggttattatgatttttttaagcaactttcatataaaaactttctgcaaaaaacgtaccgtctagcattttgaaaagcatgcacgtagaacacgaggaggtgggttgtgtgcattttggtttgtacgacaataaagactccatcctttcgcttattggcggaataagcgaaacgacatatttgcaaaaagaaaataatttgtaaattaaacttttatatacgtgttcttagcaatcgaaaagaaacgaaaagactggaaaataaactacaacgaaaaaatacctcaaaatcaactcgaaatttaagattgaaaattcaaattttgacttataaccataaggccagaagatgaggctgtaaggcatgaaaatatctagtctatccgcatccgagatgtatacagtcgcattgtttaaattttacaaaatactaatgacattgaaccaatattacgaatagtagtgatatttgtttaatggcaaaatttgctacaggacattgaaaaaacgtgtaattagctcgtggacaccacaaaaacgagaatttgccgtcgggcatcacaaaagtcgtgtaattagctcctggacactcagggccttattttattatttcttgttaatttggagagagagaaacactggtgagagtacgattttgcccctaccctcacacggcggcggtagcctgggcgagggagtggcactttggcagcaatggcatatggatccaattaactcaaaagtaaattagagttggtagagttgcaatggcatatggatccaattaactcaaaagtaaatctatctattatattattaaaggaatagaaaaaggagccctcacgttcgctctcatggcctagaaattctcacattaatcggagaaaaaaaaagacagagtccatatagaaatacaatttagaaatagctgaaattcggaattaaaaaaaaaggaatattagaagaggagactagagtccatatagaaatacaatttacaaataactgaaattcggaattaaaaaataaggaatattagatgaggagactagagtccatatagaaatacaattaggaaatagctgaaattcggaattaaaaataaggaatattataagtagaggatagagtccatatagaaatacaattaggaaatagctgaaattcggaattaaaaataaggaatattagaagtagagtatagagtccatatagaaatacaattaggaaatagcttaaatttggaattaaaaataaggattattagaagtagagtatagagtccatatagaaataaaattagtagaaaaaggagcattcacgttcgctctcatggcctagaaattctcacattaatcggagaaaaagaaaagacagagtccatatagaaatacaatttagaaataactgaaattcggaattaaaaaataaggaatattagaagaggagactagagtctatatagaaatacaattaggaaatagctgaaattcggaattaaaaataaggaatattagaagtagaggatagggtccatatagaaatacagttaggaaataactgaaattcggaattaaaaacaaggaatattagaagtagagtatggagtccatatagaaatacaattaggaaataactgaaattcagaattaaaaaaaggattattagaagtagagtatagagtccatataggaatttaaaactaactaaaatttgaaaaaatataatgaaattaaaagtagagtttagagcccgtataaaaatacaatatatttataaataactaaaattcgaaattaagaaaaacatgggaagaagaatttaaagtcaatataagaatgcaatttagaagtaactgaaattcgaaattaaaaattaaagaatattgaaatatgagtttagagtccacgtagaaatacaattagaaataataaaaattcagaaataaaaataaataatgttggaagaagagtatagagtctatatagaaatacaatttacagaaaattcgaaattaaaaaaaagaaatattgaaagacgagtctagagtccatataggaatatatataatttacaaataactaaaatttgatattaaaaataattaataactaacacgtatataaaatacaatatgaatattacacattagtagttttgtaaagttattgcaaaatttaaaattatgttgtcattttaatatatttgaataatataataaaaatcatatatgctattatatgagagaaaatataatgatactagccgcgcaatctgcgcgggccaccatgctagttagaaagtaaagatatattcactttcgtgggatcacgctactaactaaaataatctaaccaaccagagtattaattcccagtgacaaaaattgtgatgtcaacaggtattccatgaattgtccgttgtcaaattccaattacgacataccaacttaccaagggcatgcgcacatagaattgtgctaaacccaccgctgtccgctctcggcttttctcatcttaccgtaggccaattctcttccttatatataatttttacgcgatttgacatcagaggatggagcaatttggcatcaggcttccacggcgaggccaatctgcatcacctgcccgctcgatccctgaaaatcttcttccgtttctctctggagattgctgacagcgaggctgcggaagcaggcgaggggttcagggctggtgactggtgagatcgatctctcatctctccgtcttgctatctttctccctatctctaagtcgatcattcctgtaaattgtattgctggtaggcttttcttgttacctttgctgttaaagccatttaggatttttctattgcctgtgacctgtttgtggaaatgcctcaaaaagatatcacagctcacaggggcaggattctaggttcccaggtgaaaagcaacatggaagagggaggaggatgaatctgagtttttttagagtatttctttttttgtatttgtaattggagaatttagattatttaccacctaattctcttgtaattgaggcattcattttctaaatcatatttcttttggctaactgcactatgagcacctgcaaacaccaaaaggtatactattagagcatgattttcatacatatataacagaagtttcagtaaagctctactgtaatcagattctgctttattgaattgcaatttctggtttagtgatacaggattttaggtgactatgcaataaggaaattcgtgcccttgtgtgcgtttgggggctgatgtttacaaaataataatcactatgttgaggatgttaaatggaacttgtttgctctttatatttagcattgtcttgcactatgtctcttaagggttatattatacgagttacatcatccagaattggactagaagtagaacttcatatttggaagtggaattaccagtctaattcggatcataatataacagtcatcatcccctaacaaattttgaccactagcagctacatggcacaggtaacaggtaatttagttcatagtatatatttgccataaggcatgcagatagggactaagcccagatcaattggtgagaggtgtggatgtacaccaccatcaccaaagttcagaaacctcttggactcaacttgggtctctatttcttctctattaatttgataccaagttcctttttagtatttgtttttgtgtcaatcaattaatcttcacaaatataacgcaagtgttcttgaatcttatataatatctttttctatgaaatcacccatttctaacaaaagttcactatttagccttaaaagtcatgtgctgattcattttccttccttatcgagtggcctatattgtatggcatccacaggtctgtcacatattttactttttttcagaaggctcagttcttacaactatggccgaagtacttctgtcaagttttgccgtgtcaattattggaaaaataattttgtttgttagtgaacacggtttgatggggattaaatcagacaggagtgtgcatcaagaactggggaagctacagaattcgttgcaagctattagtggagttcttctagacgcagagaggaagcagagtacttctagtgcactcaaggaatggctgcgaaaactgaaagatgtcatgtatgacatagatgacattttggacgatgcgtcaactgaaactttgaagcgcagagttagcaaagatgtggttactcaaaccaattgtgtacatatttctcgattgaaattgagaagaaaattgctcaaaaggaagaagaaatggagcagcagaataagagaagttcatgaaaagcttaacgaaatagccgctagtaaaaaggactttggactgaccgattggacagtgggtggtcagtgttctgaagaaccagaaagagaatcatattcttttgtgtatcaacctgatataattggaagggatgatgctagagatgagattgttagtaagatactaagagcagcagaacatcatgatatttttgtgcttcctctgcttgggcttggaggcattgggaaaactgaactagcaaatatggtgtatcatgatcaacaaatcagggagaggttcagcaagatgatgtgggcctgtgtctctaataaatttaatctgaaaaatatactacaagatataatcgagtctgccagtggtgagagttgcaagcatctaaacttggaacatttacaaaataagctcaggggaattctgcagaatggaaattatttcctggtattggatgatctgtggactcgtgatgtaaatgaatggagagagctgaggaatttgttgtcaagtggtgcaaggggtagtgtgataattgttactacacgcgaaaatgttgttgcatctatggttggtacctcagacccgtacaaggtgggtgcactcccttttcatgagtgcatgcaaatttttaccagagttgcattcagacaaggtgaggaaaataaatatccgtggttgttgaaaattggagagtccattgtgaagaagtgtgctggagtaccactggcaataaaatcattgggttctctactatttaccatgcgtgatgaaactcaatggctacgtgttaaagaagaccacttgtgcaaaattgtacaaggtgacagagatataatgccagtgctaaagttaagttacaatgctcttccagctgcccttaaaccatgtctttcctatttatccatatttcctaaggacttcgaatattacagaagatgcataatcatgttttggatggcacatgggctactgaactcgaacaaattgagtgaagaaatagatgttggtaatcagtacattattgaattgataggaagttccctttttcaagactctctaattacttttgatggaagcatgccacattgcaagttacatgacattgtacatgatcttggtagatatgttttggacacagacctagctgttgtgaactgtgaagggcaacaagtctcagaaacagtcaggcatctagtatgggaccttaaggatttcacacacgagcaagaatttcccaggcatttaatcaaagcaagaaaagctcgaacttttattagttcgtgtaatcatggttctttaagcaaaaaatttctggaagtgctgctgtccaagttattgcttctacgtgtattgattatatccggagttagaattgacgaactcccagattcaattggaaatttgaagcacttgaggtatcttgacctcacctggaacaaaaccataaaataccttcccaattccctatgcaagctcataaaccttcagacacttgatctttatcgaagtgaccaactaatcgagttgccgagagatgtaaacaagttaatcagcctcaggtacctgagtttgacatcgaagcaaaagcagttgccagaagcaggacttcgtggctgggcttcactaacatccctgcagcttcactcatgtagtgaactaacatcactgtcagaagggattggctcgttgactgccctacagatgctgtggatcagtgattgcccaaagcttccttctctcccagccagcatgacacacctctccagtctgcgagagctgttcatcgacaattgcccggagctggatttgatgcatccagaggaggccatggatgggctatggagtcttcgatcattgcagatcattggacttccaaagctagagcgtcttcctgacactctttgttctgcctcgggttctcttcggtatttattgattgagcaatgccccaatctaagggagcttccaagcttcatgcaagatctcactaaccatcagaggcaggggggtattcattaaggatttcccgagcataattatataaagggatgacaattagttgattactatctccccataaaatcttcatggaggtatagagcttatgctaaaagaaaagccccacaggaagtgaaataggtaagttgcattgttctctcagaaatttaaatctttataatttaatacgaattgcagtgtttgctagattttaggtttgggtgttaagcttccacacttgtatgattactttgtctaatataattcagttcagtttgggagatggatttttcatttttattttttttgcattataggtatgtatggaagtatagcaaccagtgaagctaagaaatcccttttaggcaccaattcaatggatttccttttgttgcagagaggaccaaagtacacactagctgggatgaaaaacaataactgagactgctcataatttgttaaccgaataggccacaagtttgaattacgatgctcattagggtgattgtaaggttgctctttttgaaatgtatagtgatgctctgaataccatgtccctgtttctaaattgtaatgatgcatttcaaatgtgccatgtctaattcagtttatgtttttcacatgtttaattatttcagaccttaattgaacttatatggtcgttcgaagtcctgtttgtatagaaatttcagtttaattcccgagcttgaaattttattatactcatatattgccagctgattaaatattccatatccgtacaagttttttagtttctcatttttatatgttttattaattcaaacactgctacagaaacaacaatgtgtaccggttgggaaaaccccatggatgctaaatttcccaaatgacacataacataacagggggcacctttgaggtagtcaaaggtgccagtttaggaaccggtagctttgaggttccagaaataaaaaaaaaaggcggcttgatcagctcgaaggataggggaaaggaaggatgtaggagatcccaatccaatgcacgtcagatcgcctcgtggatcccggtggtgatcggcggcgggtgttggtggaggagaatgggagggtggggaaggcaaggaagagtcagagatagagagagagagagaggagaggataaggccgagtacaagtactcatgggttcggcaaaaagtatctccctcccacccaccggttcggctcggctcggttttacgggcgtcggtttattaaaaaaccatcacctataatatattatagatgttgatttttttaatgaaatggtacctatgataaattaaaggttcctttttttagaaaaaatcagcacatacagtactggtttttctctagaactgttacttataattgctcaaatgtgttggttatttaatgtttcagcccttggagacagggaaaggtttatatatgccagttttagtacatccgtcacctatagtgtcgtcctctttgtgtatttgtgtggtagtgagaccttaattttgcaccttccatacgatgttctacatgatgctcacacatttggcagctgacaaaattgaattcatagccaaatttttgtatgtcttacatcataatgttattgaatttaccgtggaatttcatatgcgtagtaattttattatagattagtttatgttttctgtaggtgactgtaacctttgttcttttgtagtttctgtacgtagtagtagtttgtgctagcagaatgtttatgtccaatgttcagatttctgatattacctgcataggttagtatttcaggaagaggctaaaagtttgtgctaagtcttatattttcttctttatttgaatgatacttgcaaaatgcctagttggtcgaggcattgttttccctgttttattgccgaagaatggtggtcacaaaatagcgaaggtaaaattagacaaccatacaaagttttatggaaaatattaccagggctttgcccagtagctatatattaaaataaaagaacgcgtgtacagagaacataaaacaaaggccccagaacaaaaaaaccaaaaaaaaaagctaagaatgagaatgctaagagaatcctttattctgcaaacatgcagaagaatttcattttttaaagcaacaaaccacctattaagatctggctgaacattgttaaaaaacatggctatttcgctgcttccaaatgcgccaacaagcaaaacatataaagtccaagaaacctttcctccttagccaaaacctgcatttggcaaattttcaaattagtattccacctgattcccagacgctcccaacacatcttactgaaaggacaaatgaagaataagtgaagcaaggtttctcttggtcctccacaaacaccacaacacaaaacaacatcttcaggggcacaatgcctcctgtccaacacatctctagtgttgagtctatcccacagaagtaactacacgaaaaccttattctttttgatgcactttgatttacagatccaaatgaaaagccttggaatcgaaattcccaaaaagttagatggataaaacttctgagtagagtacacttgagaattccaaatgaaagaccaagaatctcctctttgagttttgaaagataaactactcattgcaactgaaggaactgcccataagcctgcgcttctagaggaagattgaaacaatcttctagatggaagccagaaaaatttcttacagattcccatctcactgtggtttgggaaaagagagcttagaacttaagttttctgtcttccccattccagatatcatcccaaaacaatattgtagtaccagactggattgagcatttagagatagctctgtatatattaaccaattgaataatatccctccaccaaaaagatcctttattaaagatcatgtgaggcacttttgttctgctgtaagaagtccatataagtctaacccaaggaaagtcttgcacagtgtaaaatttatgcagatgctttaaagaagcattagcagttaatctcctttacactctatccaccattggtgccatgtcaaccgctcttagtttgtagtatacccattggcaaacctaagtaagtaaaaggcatggtgcccacctttacatcccagcaacagagcaaattttctaatttatccttaggaacattcaaggggtaaatactggccttatgataatggatttccaaaccagtgtcttgagtgaaagtgtgtaaaagatccttaaggaaaaaaaaaatctctctaggatgcgtttatgaaaatgagggtatcatcagcatattgaaccactggaaagtccccctcatcttgcacatttataggtttagataacagtccgattctcatagctttatttaagactgttttaagtaattcaataccaagcacaaaaagcaaaggagaaaggggatcaccttgcctaacccctctcttgcacttgaaaattttcccagggactccatttgacaaaacagatgaacttgcagaactaaaaaccatcttcacccagtttatccattttgcagggaaacccatatgcttcattatttccaaaattgtagagtgttcaattgtatcaaaagcattttcaaagtccaatttgagaatcagaatctcccacatagactggtaacactgatggataaactcaaaagaccaaaacataggagaaaaagacaaaaacaataatagtgttattcgtatggttgtttatttacatatagcatgtgtgattttttttaattttttgcgaacatttataaaatatcttgttcaagttttcatgtaagatatagtttccactatactttcctagtaaccaatgtgatgcggacaagggttcctgatcttctgaaaggttttgataaacagtcgattttatggagtcacagcacaaattgatctggcttctgaacgaacatgctcttgagccccgcaaccgcagcaccacgtctactctggttatcaaccgtacgtgtcgaaacccggttgacctcaccgagaaggctaatccctatttgtgaatcgaagaacacaaacaagaacaagaaagaatacattcaaaatgtatatgaatgattaagctcacaagttggggtcttacaaactgaaggatcagcgaaactattcttgacagattaatctaagcaaaacccaaaccctaaaggtggcagcagctactaatatatagagtttagggtcatgcaaataccccttgacgcaaccctaatgggctccaacacgatacatagcccaaagaccaaaatacggcgacgcaacaccgaaacagattctagatgtcaacttgtttggtcgattcccaatgactcggaaagaatttggatatgggaccaaaccattggaaatgttatcttcttagctttccatccatataaagaaagccccaatccgagcacgtatgcgacctaggcacccattttagtgcagactggtcctagactacgaaacgtacttgaagttgacttggtttgggcctccatattgacttggacctccttgctgatcctccacacctctaagtccctctctaagtgtctccttgtcctctccattattcctaatcataatataatcattaggtagcaatctgttctcaaaatcatataaagataaacataggaacgagctcacatctaaattcaattgttgcgtgcgagctcttgtgattggttcttgaatgaccgatggatgattgttgtgtatatccaaaggagtgatgtcctcatcacaatgtgctcttctggcgctctcccaagatagggaggttggggagctctctggaaacaataagaaaggcgacaaacagaaaaatccccttctctcgatccctcttactcggttccggcagctcactgccagtgatggctgaaagaggggtcaagccccttcctactagtagtagtttagccagtatagtgttgggttccacccattcttgggctttttcccgtatcttcgtgcaatgtcctgttttgactgaggtcgccggagtcgttcctatggaatctggacttgctaataatggatctgatggtggcaagttccggaggcggtcgattaatctgctccgatctctagccatggcagattgacaaggtcagtagttgccaatgctaccttctggtgattactacgctggtgattccactgttcatcctcttcacatgtggggagatggcggtcatcaggagtggcagatctggccaggcagaagcttagtagtagctgatctgcttgcccaatggctgacaccatcgaccggtggtgagcacaatggtagtggctggtgacttcgttcgggtggatttgtccatgcatgccttctcatccaatacagaagtgccgatctcattagacgcacatgcaggtaggctccttctcccccagaatgatgcagtcaatatcagctaggcaaaatcacatccttcctagtgctagaatgatcaagggttcctgcttttcgg

SEQ ID NO: 6922 - DNA, 121948 bp, Oryza sativa
  unsure (1)..(121948): unsure at all n locations
ggccaccgccgcgctcgcctcatctccgcgccaccgccgctacgagccgctgttgccgactagggtggaaaaaaatcttgggctcatgagctcagctcgggcttggctcgagctcgcttagctcagcttggcttgaatgccaaacgagccaagcccaagcttcattttcagctcggttctgaaacgagccgagcccgagctggctcgtgagccgcttgatttggctcgtgagccttagccatcatgtatttatatggatgattttattttctagtggagttattatttgtcaatatgtaatttatcatctatattttgatgaatttaatatataaagttattttaattttacatgttgataatttgttatcgcttttcttaatgattataaattatatagcttcaacggaaggctcgcaagccagctcgagctggcttgagccaggaaacgagccgagccaagctcatgtcttagctcgcttccctaaccgagccgagccaagccaagcctagcttgttgcaagccattacaagccgagccgagccaggcttggcttggctcgtttccacccctatcgccgatcgccggtccctacgctcgtcctcaccgtgcgcgctgcgcgagagagaaaagaaagagagagaatagagaaagagagagtaagaagtgtatgacatgcgggtcccacaattttttaattaaaaacgctgactggactgccacgtagaccaaaaccaccgtggattgggtcgaggggggtaattcgtccagtttgcatacttgggggtgtcagggttatggataccacatacctaatagtagttgactaaatctcggcaggacccaccacataccatgtcttatacggaaacaaccttcagatataggaggagttccgcataaggaaggatgaatagagttctacatggaaacgacaaggactacttggattgtatccatatttatttccctagttctacttggacaaggggacacctatgggtataaatataaggcctcctagaaggagaggggacacggaacaatagatcaagatacaagatcaacatacaagccaacatgcgccaagacaagacgccggatatcgacttcagagataagcatgactagtcccctacggtgtctacggatactgtcaggagagatatagcactgtctttgatctcgccggatgtggattcgaggaggaagggtaccctgttgtcgattacgagtcagcacttcggactgccaagtcgataacagttagataggctaccccaaatattgtactggtgtgattatggtgaataagagcaacgactggtttcgaccaactggagtaggattattacctgacaattcagggacccgaacctgtataaaaatcctcgtctccatcttttttactacaatctcgcaaatatcctagtaccaatgatccccatactatgcaaatatcagaatcgcgacatcaaacatcgacagtggcgcgcgcagttgggagattttggtgcttcagggtttcgatgaaatgggtttatgagatggattctccaacaacaagctactcgacaacttcagctatgaggagatctaacccgatcggagtatgtcgtccaacaagatcggaaccattgtcgtcaaatatttaatccggcgagatagaccaagcttgaagacattgccgtcgcggaagacgttagttcactaatgtcgaccgtgggattttggtccatgtcggctacttcggaaactaacatcgaccgccaaaaagttcgacgaattaccgccgggtatcgacgacatcagtgatcggtctgacgattagcgtgttcggagaattgacgaggtgtacgtatcctcatcggtttctgatatactccctccctccctaaatatttgacaccgttaatttttttaaacatatttgactgttcattttatttaaaacttttgtgatatgtgtaaaactatatgtatacataaaagtatatttaacaataaattaaatgatagaaaaagaattaacaattacttaaattttttaaataagacgaacggtcaaacatttttaaaaaagtcaacagcgtcaaacattttagtatggaggtagtattatattggcctacagcagaccagagtcaactacacgtcgttacccgccaatcaagcaactagccgactgcatctacacatgtattaagcatgcatgcggtgggacccatgtacagtaatgcatggtgtgtaccgaaggctattttagccataggtatgcttgtatacataggtaagccgtccacacgtgctaatcacggaggacaattcagattggctaaaaggtatttagtagattaattttttaaattaatatatactattttcgtagatatatctggcatatatctacacaggtacgcgatatttcataaaaaaattatcgtacttacttttctgatctatataatattgtcagatccatgatttattatgtttaactagagcatgttttttatataatatctattgtgcgagtgtttccgacgttaaaccaactatggtctaatgctacgggcttgctctattttcttatgataaatcatgcttgtttacggtttacataatccctgatatttaatctgcccgttatatcctgataatactagaagatccacgcagttttctgagtacatactcgatattatctactatatatcttgccttctagaaaatatttttcaggaatgactaagcactcgagtaggttgtgatcaagcacatgcattattgagaacgttctcgacaaatgcaaagttgtcacacccaacctaccaacgatgaccgacgacctatctcatagcactgaccatggctgggctgttcgagacaaggttgttaacggataatttctcgcgaacgttgtcagcttgatcacccaacatgattgcgaacggatatccggatatgctataagttggatatgtgagtcatgctggccacatgagatgcacatgtaacaaaccaactttagcgcccctatagacgatcgagaggcccctactcctggttctcgaaccagtatgacgaagcgatctctcgcgccttaacttccaacggtcgaggtacgacaacggcaatagcgtagcggtgcttgcaccacgacatcaaatggttgaggtacgactacggcaatagcgtagcggtcctcgcaccacgacttcagatggacgaggtacgactacgactggtctttgaccagcagcgtagcggtcctcgcacctcgacttcaatcggtaaggagataaggttgctcctggttctcgaagtagtaggccgtagctatctctcgtacctcgacctcaatcggtcgggagataaggctgctcctggttctcgaaccaataggccatagctatctctcgtacctcgacttcaatcggtcgagagataaggctactcctggttttcgaaccagtaggctgtagcgatctctcacacctttacttcaagtggtcgagttataactacccctggtttccaaccagaggcatagcgatcctcccactaccgttacttcaggtggtcgagttagggctacaactagttttcggccagaggtgtagcgattctcccactacctctacttcaataaagttgatatcaggtacacaatatcgccaagtgttttacccatagatcccttaccacgacgacacctagagttgaaaccaatcctacggtccctttacaccgccctagcaaggcctccaaggaacctatgggaacttcggctggggacgcccagagcggataaggccttgtcaggaaatgcatagacgaacgaccatgtaagatctggtcatgtaagagttctcaccgtgcgtattaaccaagccgtgtaatcggaaattgggtttccaacttcacggctgggggctagggtaagcgatttttcaaccaaggtaggtcaagggtccaagagccttatcctccgagaacgattctccgacgataaggctgggggctagggagagtgtatgactcaacaaactgactgatcgaagtcggtaaaagagaagacgctcatatacaaaaacattggtctgtaaatttaattcattttcagttttccatacatattataacatgtcaccttttaagcattcactcgggggctatttctatctaatattcttttctaagtattgatttcatgaaaattctattcgacattgttcttctcattctcttctctggaaaagtctatctgacctcccctcaacaactcccctcaacccagctcctcattctgttctctgcaaaaagtctatctgacctccctactcggcccatcttcttctcctctctctggccaagctggtaggcgataaagtccattccttctccctcttgccggcaggctcgccgtcccgtccccgcgccttgcctcgactccgcgcggccgcaatcgcgcaagccgcggcaaggaccctagccaaccggcgccggcttgcctgcgtcgtccgtcattacgaacaaaacgccggtgcgccgtcccattctcgccggccgtttcccgtggcgattaggtgggcacggtcgcccagcggcccgtgcggcggcggcgttgagcggcaacagccacttggagccccgcgacacccaatcctcggccgcaaaaataattctacctccatccctaaatatacgatgttggtgataaaaaaaaatcaaaggatgtgatgatttcttaagcataagcacctagtatttgttttgggagcagaaaggagcagggaagcgggaaccagcctagctagctagtatttctaacaactgaaactatcaggatatggattttcatccctgaggggatatctccccttgttgtttgcatgtcatctaaatagttgtaaaaaaaatttaaaaaaaattgacaacatagattagtatgaaatatatcagttcacaaagatgcaacaccaaatttcacttccgcaagttacaacaaaatgaacaaattaaaatgaaaatagttgtgtacattcgcatatatatttgttatttttgttgaaacttgtagaagttgaattttaacttgcatgtttgtggagtcatatatttcatattaatatatggcatatttgaattttaacttgcatgtttgccaaatttttttaaaaaaatttgatgactatatttaggtggcatgcatgaaacgaaggaatatcccctcgagggatgacatcactttcccaatctatcactctattatacactattgtattaatatagtaagcaagagcagtatacggaaaaacccacctattttcggcttctggcataatatatatagcaccctgggcaggcgttgtcggatttgctacagtacacaaacccatgaatgccttcttttggcatcaatcgctttgtcttccgtttcaaaaatcagtttgtcttctgtataaaataaattatcgtctcagtaggctaagttcctatcaagaacaaattatatatctaaccgaaaattatggaagggaaactgcatatctagcacgaaaaattggaacatctttttattccggccttccgagaggccgcattattatcagcagcatgaacacctacaagcaaaactcgctcgctgcaagaactcaaggaggtgaactcatcctcctggttctcaacaactacagattgctcactgctacctacccctacaacaatgctacccacagcttggccggaaatctgatcggcggctgccgctacatcgaattcttccgccgctacgacatcgggtgatgcaccgagaacatcgatccatccttgatcggagtcccagtccggcaccgatgacggcgagcacgccattgctctcacccacttggctggacactctgaagatacgttatctgctgctgttgctgtttctaatttatttgctatgctaatggagacgctgctgaggacatcgatccagccttggttgccggagtcccagtccggcaccgacgacggcgagcacgccattgatgtcaccctctgctctattgctgctgttttgtttgctacattaatggagacgctgccgaggacttcgatccagctgcagccatggtcgtcggagtcccagtccggcaatgtctggcaggagcatgccattgctctgatccggccggtagggctgttcgacgacatgtcgtcgacttcctcgccgtcggtcgacgacgactcggactcccataatgtcgcgtcgagcgcgctcgtcggcgacacccatgtcgccttgacggtttccttgttgttgagaccgcatgacttggagatgaacgggtgctgtagcagctgcgcccccgtgggacggtcgccggcgcgccgttgcaggcatccgcgcaagaagtccttcgcctccggtgacagccaccgtggcaggtccggcacggcgtccgtgtacccgatcttgtggagcgcggggaggacgttgtccatgtcgctccacggggcgcggccggtggccatctcgatgacggtgcagcccagcgcccagacgtcggcggccagcccttgctcctcgccacgcgccacctcgggcgccatgaacgccggcgtgccgccgagcaccggctgcttcgaaccaccgggcattgccaccctcgcgcacccgaagtcggtgagcttggcgcggccatcggcgccgacgagcacattactccccttgacgtcgccgtgcacgacgagcttcccgtggaggtagtcgagccctctaagcacgtcggccgcgtacgtcctgacggcgccctcgtcgaggcgacccccgtttctcgccaccacgtcggcgagcgatccgccgggcgcgtactccaggaacagctggtgctcgccgccgccgcagccgccggaggcctggacaaagccaaggcacttgagcacgtgcggcgaggacagcccggacatgacgctccactctcgccggagctgctgcctcgcggcgccctcgccggccgacttgatgacgaagagctccccggagacgtcgttcgctgccagcgacaccacggcgccggaagcgccccggccaacgctgcggaggcgcgtccatccgccgccgccgatgatcgccgcggccattggggaatcggaggcgagagctgggttgagttgttggtgtttccggattagggttgcgaatgctgctgctcgagtcgatcgaggagagtatttatttaatgcgtgaggctggcatgtgggacccgtagcgccgcgcattgcagtgtgaactgtgaaatgcactagagaagcgagggggccgacaagattattgctatagctggaaatttaccagtgtgctctgttaaggaaaggtgtgtttattatcctcttttttatttttaatccatgtggattaagaaggaaacgagaggtaaaaacaaaaggatagacgtgtttagtgtatttctttctatttttttccctgtgtaaaccatggggtggaaaacgtggagtgagaaatagtacgcttgtgagcaaattttgcgtttttgcatgatccattgtaaaaaaatgaaatgttaaaataaattattaagaactactctctctctcgtcgttatatatggaaattttgtgggtccaagactagtcaatgtggtcatcgagctaagaaattaagatctatggtgcaaaatgtgcctcatatctttagaagtgattaaatggttgattaatcatcatccagtaaagtccctgaaacatgcaataagggacggttaaaggtatgtttgtgctactttatattccattcactactacagaaccaagataaccggtcaaagtgatccgtctcagataacatgagctctaacatgtaaaaaaaaaataccattcgagatatgacaaaagggaactacctgtatatgatgtcatctatgatgagtcaaaattataaaccgtcaaagatcatatatgatgaccccacatatatggcaggtccaatcatatggcccaccagacataataaagacataagtgcgatttataaataacaatcgctaaaaatgagttataatctattatggctctttcttttaacctatcatggaggacatactacgtcatacgctcctaccacgtgttgacgtcatcgtctcctctttatttctcgcttgctatcccctctctttaatttatctctttctaacatatatactctaactcccaaggactcgagccagttgttgcctccttgatccgtcctcgaactccagccatcatcgcctctggccccgaaaacgagccgccaccaccatcttcaccccctaaccccaagcaccggccaccaccttagagatgccagatccaacctccctgatatcggaggacactgaatatgctctccttaacatcatataggtggctagatccaatgcaagccaccatcccctaagccccgagtgctagtgagcctctggacatggtagtgagatgtgcccgcttgtatctcggtggcctagtagtatgacgggcacaaagatgggcttcggaggtgtgtagctatatgggcatggcatccggatctggccacccccatcttggtgaccttggtggcgcagtaccgctggggtctggcaacgatgacaaggaccatgatgacgagcacaacaacaacaatgggcttcggagggggcatgcgatatatagtgacaccttcgaatgggcatagggcataaatgaccaacatgtataggcatcgactggcttgtcgagatcgtcaagaagtacaagatcatctccaaaacgctcagcctggcctcaaccaccaattcctatatcccttccttctcctgaaccgttgggccagagccaaacaaaaccccttccccctccccttcctcctcctcctcccactctcacgccccttcctcacctcgcctgagctgacaaacaatagtagcagcttccctacaaacaaagatggggtatatacgcacacgccaacgtactactcaggcctatagaacaatatcacgcccttttgcaagtctattttgctcatcataggcttcagggtcagccgctgtatcacccccaactatagatggtcatgtgggccacccggcacggcacggcccaagcccggccgtgcctgggccgaggcttgtcgggccggcacggcccgaccgatgcaccaggctgtactgtgccagctcacgggcggcatacacggcccaggcacggcccaatactactcgagccgtgccaggccggcccgaaggcacgatgggctatcgtgcttcctcacagaaaatgtctaattttggtccctcaactctgtgtactgtgtttaaatggctggagaataagtctattttgtatactcctcacataaaagtctatgtttggtccctcaactctatgggctgtgtttaaatggctggaaaataaatctattttgtatacctcttgtcttgggccttgccttatacgattatttaagtctatttttcatctctatattttttatttgaccgggccatgctgtgccggcccaacgtgctgaaggtgtggcccaagcatggcccggctgtcgggtcgggccgacatgggcacgacctcagtcgggccgtgccatgctttgggccgggccacgggccacgggccatatggccatctatacccccgaccaggctgagggaccatgcggcgcgctcaagtgcagcaggactcgttctaactcatccttcacctctccacgctggactgcgactctgcgaggcactgttccggcctccgacatcaacaccttccatgccaataaagctcactacccttgctctgtcaaaaaaatataccaagctagtacttgattagacgtcacgtagttctatgatgactatgaacaggggatctgctctgcctagattaatagtcctaggaggcttctaatcgagtaacaagtcaatatttcggagcgaaggggactacattcgaattatcgatctgtatgaagattagggagagaaaaaggttatgagcacatcgactggggatcgagggacgaggatcatgagaacattcttttattccggcctttcgagaggccgcattattatcagcagcatgaacagctacaagcaaaattctctcgctgcaataactcaaggagatgaactcatcctcctggttctcaacaactacagattgttcactacctactcctacaacaatgctacccacagcttcgccgaaaatctgatcggcggctgccactacatcgaattcttcaggcgcattcccttcaccgccattgtcgtcggccggtgacgcgctgaggacatcgatccaaccatggttgtcggagtcccagtccggcaccgacgacggcgagcacgccattgctctcaccctcttggccggagactctgaagcttcgtaatcttctgctgctgctgtttttttttttgctatgttaatggagacggtgccgagtacttcgatccagccatggtcgtcggagtcccagtccggcaatgtctggccgccggaggatgccattgctatgatccggccggtggggctgttcgacatgtcgtcagcttcctcatcgtctgtcgatgacgacgtctcggactcccacaacgccgccgctgcgtcgagcgcgctcgtcggagacacccatgtcgccttcacgacttctttcttgagaccgcatgactttgagacgaacgggtgctgtagcagctgcgccgccgtgggccggtcgccggcgcgccgttgcatgcaccggcgcaagaagtccttcgcctccggtgacagccatggcggcaggtccggcacggcgtccgtgtacccgatcatccggagagcggcgagcacgtcgtccatgtcgctccacggggcgcggccggtggccatctcgatgacggtgcagcccagcgcccacacgtcggcagccgggccttgctcctcgccgcgcgccacctcgggcgccatgaacgccggcgtgccgccgagcaccggctgcttcgaaccaccgggcatcaccaccctcgcgcacccgaagtcggcgagcttggcgcggccatcggcgccgacgagcacattactccccttgacgtcgccgtgcacgacgagcttctcgtggaggtaatcaagccccctgagcacgtccgccgcgtacgccctgaaggcgctctcgtcgaggcgatccccgtttctcgccaccacgtcggcgagcgatccgccgggcgcgtactcgaggagcagctggtgctcgccgccggcgccggcggcggcctggacaaagccaaggcacctgagcacgtgcggcgaggagagcccggacatgacgctccactctcgccggagctgctgcctcgccgtggcggcgaccgcatcaccggccgacttcacgacgaagagctcgccggaggcgtcgtccgccgcgagagacactgtggcgccggacgcgccgtgcccgatgctgcggaggcgcgtccatccgccgccgccgacgccgatgatcgccgcggccattggggaattaattggaggcgaattgggttgagttcttgatgtttccggattagggttgtgaatttgttgcggatgctgctgctcgtgccgaggagggtatttattgcgtgaggctggcatgtggggcccacccttgcatgcagtccgaaacgcacaggggaatcgagagtggcgtgtggtaatctgactgacatgtggggccgatagggtcaattgctagctggaaatttacctgtgtgtggaactctgtaagtaaggaaaggcgtgcttgttaacctctttttatttttataatccgtgtggattaagaaggaaacgaggattaaaagtaaaaatgaccggcgtgtttagtgtatatctttctattttatcctgtgtgaacaactgagaggaaaatgcggagtgaaaaaaatagtacgtttgtgtgaaaattaaacgaggagcacaagttttgtgttttgtgttgatttagcatgatccattgttaaaattttggatatttctagctcagtgcagctacgaaagagctgcaaaatgcacctcacaattttagtagcgatcaaatggctaattaatcatcatctagtaaagttaccgaacaatgagggacagttacagtcttacagatatttgtccatgtacattgtatagcgtcaactataccgacaagttagatgcaaacactagctactgcactactacgaaaactatttttctgtacaaagatccatttagattgcatacggaacataactggtcgtagtggcggagccaggataaaattatagtggggactcctcagccttttgggccttctaacaatctcagacaaagtctattttaacacccttgcgatagatatatggatttaaattttagggggtcttaatgggggctctaatgattcattagagggtagggggggggtntaaagaccccccagccctcacgctgcctccgccactgactggtcgcgtctacgaaaatcatcctccatttttgtgtgcggttccttaagaaaaccgtacgcaaaaatcaattttcacaggcgggcatcttaacagtcctgcacggaaaaatactcaattttcacagacgggcctaataatcgacctgcacaaaaaaatgagatatttaaccatttgtcacatttagatggggcaattaactttttcccactagacccacatgtcatagacacatgtggacccacgtgtcattgagataggggtggcaaatagttatttgccaaatctaaaagtggcaaatagttaaaaatcccccgaaaaaatacccattccctctcaacctattcaaaaaattcgagtttcccttctctctccctcttatcttctctctctaccccttatcttcacctcactttcctctcctcctcttaatgttctcctcacttcagctgagctagaaccgcgtggccgcgtcgagctcgagccccgcgggccacgccgccggcaccggcgccggcctcttcgcctcctcctccggctccgacggcggtgggcgcgggagtggcgggctcagcgacgtgtgcacggcggtgggcaaccgggagcggcgggctcgcggcagtgtgcacgcgatggcgaacgaccaccccctcccccatccaaatccggcggaggcgactgctcccccccgaatctggcagcgatggccgtccctcgcccggatccagtggcggtggtggcgggcaggcgggttcggacggtggggaggcggcggatccggctaccgcgacggcgacggcgatgacggagtccgtgaggagggcggcggcggcggctgcttttgggttagggttttgcttttttggattttatttttttttagttttttatttttgcgtgtgggcgacataaccaccccgcacacgaaaaatcagattttcgtgtgcgggtgcgccatccgtatataaaaatagcgatttttgtaaatactttgttacatacggttggaagatccacacgtgaaaattgctttcgaccgtacggaataatcgttattgcaccagtgacaagagcacatctgtgctggtttgacaaaacctagcaccgataagggttttcccaccatgaacctcgagctcgtctatgcagagaatatacccggcactgatgagaccacctcttgttgaccggattatgtcattaaatggatatacagactattacatacataagttaaatattttgataaatagagtcaacaaatatcttaaaacaagtgatcaagaagtacaatggaagatatattttttaaaagaagaacatattaaaaacatgcagcaagtcatcatgataataacgtgatgaagcgactgaaatgaagactagtttagctggtgtaaacagtgtgctgcatgtggagagaatatatggcgccttttcgagggagcttcttgctgcggtagcttctcccagaatcagaagttttctcaaacagttcagtttttatccagaatctaaaaattatagaatctaaaagatgaactttaagccaaaagatgaaaaacccagtattttcagtttgtcagaagctgactaccaacagctgtttcgtagaatcttaaacttctccaaacagacccaaacaggcccatgatctgtaactgaaaatgaacggttattaggctaaactggtgctcttggctcacttgatctgacttaattaatcgctcttcctttttctatcattgccacgtggatttggaatagacacacgggcccagacctcctgatctctgggctgataaagaaataaagaaaaaagttagaatactgctaattgcaggcccactaatcaggtcttttcgacaaattcctttgacctgatggcgttcatagtatcacatttttaatctgtatgacttattatctctgtcccaaaatattactatttctaactataataatttattctaaaatgaagttatttattcacctgctatcttctctcaactaataaacaattctctttacctatttttcttttgactatcaatcataattctcctccaattatttgtacctactttcttaatttcttaatgtctgtatatctacataaaaaatgtgtatgtttccttgcgtgtaacggtcctctcacgtgagaaacagaaaaaaaaaagagaagttcgttaagaaaaattatgtgctcctttttacatcaacaatcaattcatttctaataatatagatacatcgtaatgtacgggtatatttcttgacgaccaattcacattggctggtttttaattcccatgtctctattactccctccgttttacaatgtaagtcattcaagtattttccacattcatattgatattaatgaatctaaacatatactcccttcattccaaatcgatctacatatttcataggtataccaagaccaagaaaaactaataactctctcatactatatttattctagcaacaaactcaatgcatgcaccatccccactatttcctagccaataacaaatgaagatattgtatgtgggttataaatacatgtgtgcatggatgcatgcatcaatgtttatttactccaatgcacaaataacgaatagacctaataaatgaacacaacaatgtagatcatttagaaataaacttaaaaaaaactatatgtagatcaatttggaatggagggagtatatctatatagattcattaacattattatgaatgtggaaaatgccagaatgacttatagtgtgaaacggaggaagtattttcttaatggaataaaaccatatatctagtgtaggttaaagacaacctggacagtgtcagacttaattaaacacaagttgcagatagattagtggcagtgaccatactgtttcttgtttcatttttttttaaaaagttgcttctactcgaattaaccacgaatttcacacgaaactgcaaccttgcaaaatatataatccttcccagcaaggacgcattcattttgtcgccatggccaagcccaagacctctcctctccaccgtgtcatcggcgccgcccgctgggacgccgagcgccccctcggccgcctcctcatcctcgcccacgccgccttcctcgacgccggcttcgtgcccgccgccgccgccgccgacgacaactccatccggcttccgaggaaggtgggcaggacggcctcctcgctcccgctccggtacgccgcgccgcagctgctgcactggccggacgacgccgccgccgtccagctgaggctgtgcgcgcacgggcgccacctcgtcttgtacgtgtccatggctagatgctccatgttcagggagtggttggacacgtactgggtgtgcctcgacgcgctcgccgccgcggcgctcctcggcggcgcgctggacgacacggcgcgcgcgctgcggcgcgacgcgcgcctggccgcgctctggggcgcgctcgccgacaggctgtgccggcgcgtcctcgtcgacgtgtgcgccaggaacggcgtgacgctggagcccaccttcatgtcgctccccgacgacgtcaaggcggccatcctggcgaggctccccgacggcgacgacctcgcgagggccgagtgcacctgcgccgggctccggcgcctcgtcgcggaccgcgaccgcgacgccgcgctctggaagccgaggtacgagaagctgcctttcctgctgcagctcatcggaggcggcgacgacgacgacggcgagccgacgacggaggtgagctggaagaagaagtatgtggcggcgaggctgtggcctttcggagagctctttgcgtccatgagagagacacggaggctaccgatttatgcaccattgttggacttggacttcgattcattcacacgcttttgggtgttcgatgataagccgtcgccgttgccggaggagatcactgtccctcgtcatcgtcgccgccgtcggaggtggagagcgatgccaagggacgccggccatggccttgcggcgcggggacatggcggcgacaagaagccgcggcatggcgccggcgcggttcactcgccgtcttcccggttccgatggaagcaccggtgatcgccggcgatcgacgtgctttggtttcgctgttgcagagcctttttggcttagttgtttatggatttcttttcgtttgctttgtaaatgtgctgagaatgagatcatcgtctgaaactgaaaatggttaagcctaatcacaaatgtgaatgccttgttgctactttggatctttgatccactggtgttagaacttagaactctcctgaccaagtattaagtatgaggttagtaattaaattagagaccttatccttatttccttagtaatctttttcaatagtgggtatctggtctttgcttcaattgaaactacacgcataataatttacagcttataaaactgctaatatgaaaaagcaaagaaccacacacactccacccaccgtgtacaatgacttctagattcatgtagctagtgatttctttgtagcagtaaactatgctaagtggaatccaattaagatttttcttctgttacaaatgctgacacttacgaatgctcatttaacacacagtcaaagggaaaaaattcagcaacaaatctctagactcattaaaaaatccacggaaagcttacccagtactatgtatttatgggcacaatgatttaaagtctatgagtgaaattatatactcacgactctttattttaaaccaagcacccacgacgtactccataatcacactagctaactatacattttcaattttatattttcaccatatcgaaacaaaagtataaactcaattaatggtaaaactagcttctttcgatgttagcatagatttacagtttctggatcaaacaaaaccaatggctctaactaaaaaggtatattcaccacaaaagttgcttaatatatgttcttgacaaaatgaatgttagattactgtttcttcttcctagctaaccggtggtgttccttgtcatgctgactatggctgagaacattggccatatatcatatcaaaggcataaaacagtcagatatgtccaaccatgcatggaaaggcttatatcggcaaacgatatgattatgctgcaaggcgcaatatggttcctttttaaaaagaacaatctggttttgttgttaatttctctacttttgttttgtttatggaaatttctctacgtttttttttacgaaatatttactccagctggagaaacaattttagaggatataactacaccctagaaaatgtccaatagaattatttacctcatattttggagcgaatcagggcatgtacaacatatgaacatgcccacaaattaaacctcagatatgaggtaataaataattctactggaaccatattattatgaggtaaataattctactggaacatattcttctccacagagtaaaatctattggaaccatattctactccacggagtaaatgttccaggtatgaggtaaataattatactgtaacgattgaacatgcaactaattcgtggagaaatgtcaccaactaataaatcaaaccccaggttttttttatgcaacatcacattcttacacttttttgttattaaaacaaacttgacagggtgcaggcaagcatgtataggcataaataaatacacccaaggcccatttttgcacttctctcctaggatgattaaataattagtaaaagcacagttttgtcagaaaagaaccttgtcacgaaattcagacgtaactccactatggctgtatttagatccaaactttcaactttttccaccacattaacatgtcatacacacacaacttttcagtcacatcgtaccaattacaatccaaactttcaattttggaaggaaataaaaaaagcctatacaactgcatccattccctgcaaacgtcgacactcgacacattgatgatcacttagtcgccatggccgacacctctccactccaccggatcatcggcgccgccatgtgggacgccgagcccctgctcggccgcctcgtaatcctcgcccacgccgccttcctcgacgcgggtttcgtgtccaccggcgccgccaatgacgacggcgcccaaagctccgtccgacttccgaggcaggtgggcgcgacggcctccgcgctctcgctccggtacaccgcgccgcagctgctgcaccggcaccggcaagacgccgccgcggcggcggcggcgacggttgcgctgagggtgtgcgcgcacgggcggcgccacgtcgtgttctacgtgtgcgtcaggttcgccaacccgtggctggacacgtactggatctgcctcgacgcgcccgccgccgcggcgctcctcgccggcgggctggacgacacggcgcgcgcgctggcgaggcgcgagcgcggcgcgcgcctcgccgcgctctggagcgcgctcgccgacaggctgtgccggcgcgtcctcgtcgacctgtgcgccaagaacggcgtgccggtggagcccgagcacgagctcatgtcgctccccgacgacgtcaaggtcgccatcctcgccaggctcgccgccggcgaggacctcgcgagggtggagtgcacgtgcgtcgggcttaacctcctcgtcgcggagcacgactccacgctctggaagcccatgtacacgaagctgcgttcccagctgcggcggcggctgcggtttctcggagtcagctatggcgagccgacggcggtgagctggaaggctaggtacgtggcggtgaggcggcggcgtgttccggcggcgcatgacgtgttcatgggagaaatactactgccggtgatgacagagtggatgagagttccatggatacgtaggtatccatttgtgccgcctccgccgccggagtcgccggaggaggaggagacggtcgtacctcgtcggaggaggaggcggagagcaatgccaagggacgccggccatggccgtgcggcgccgggacatggcggcgacaagaagcagtggcgtggcgccggcgcggttcattcgccgtcttccgggttccgatggaaacaccggtgaccgcccgccggcgatgaactttgcttaatttcgccgttacagattttacttagtttatttattttctgtggatgtttttctttgtttgctatggacattttctgagtgtttttgagattatcatctgaaactaaaaatggttagtactaaccacaaatatgtacgaacaatcgagaagtagatatgaggttaaatacttaataattaattagaaatttaatcgtgaaaaattagagatctaataaactgaacatgtctttaaccaaccagaaggcccgtgaaagaacataggagtattgtttaagctagtgccgataagacttctctaatttatcaaatttgtagaaagacatcgcaacattctaaagcatactatcaaaaatatattcaatatattcaatgtttatatttaatgaaactaatttaatttaatgttatacgagttactatatttctccataaacttgcttatataagtttatcttagaaaaaatcaaaacgatttatgaagtatgtattataagtagattaaaaatcaatgtttaaaataatagactatgataaaacggttttaaaattaatattttggctatggccgataaggcagtgagctgtgagcagatgatcatgttggtctttttcttctctttttcgatgacttcaaccagatgtgtctaaccatgcatcgaaaagcttacgacgataaattcaagatgatgcagctcgcaatctgattcgatccattactatttttttcaaaaaaaatatttgacgaaacaacctaagcaatttgttcttacatggcattctccagattgctttgacattatggctgtcatattaaatctccataccggtcgaaacttagtggtcacacgtcaatcgactatatcttcctctgtctagttcgtgatgcctatctaatactacctatgttttttaatacttcaccgtcccaaaatataaatatttttaaccctgacacggtcatcgagatgctattttgaccaacaatatttataaaagtaagatgttttaaataaaaagagttgcatactatgatagtttgtttaataataaatctagtaaacttcaattttacatgattgattttttttattttttctgctattaatggtcaacgtaaacaatgtttgacttgtcattatgctaaaaatgcttatatttaagacggagggagtatatgatggcattgattttttaacaaacatttatcactcgtcttattcaaaatttttatgtaaatataaaaatatttaagtcatatttaaagaacatttgatgataaatcaagtcatgataaaataaataataattaaatatttttttaataaaataaatggttaaacgtatttttaaaaattaacgatgtcatatattaaaaagctgagggaataccttttttgggaaatcgatcgatggcgtgttgttctagagtgccgaggttttttagttattattgttgttggaggtacaccacgaggtcgttcggccggatctgccgaaaccaacaacttaggcgacgggtttggactggaggcaagcggcgaaggttgaaaagggaaccgtatgggcgaaagccgtggcttggaaatacgcgggctttgtcaggcaaggaccttgtcggcgggccgcatggccgaaggcgataaggcgaaggctttggcacagaggcacgggcttcgccaagtactgaactctgccaagatgaggcccagcgggctgttacgctctcagggggtttcgtcaaatacataggccgagcccttttggcccagtagaggcccatgcatgcaaaggacaatgtgtacccctgataatgtctctatcataagggtagccatgtaaattcccctgtaaaacctaaaccccaaaggaggaacttgtaatagagctataaatagccccctaaagctatgtaataggggcaaccaaaaagtttttactaagcaatacaattatctttcttttccaatcactgttgagagaatcacgcctttcgacgtgacacggttgtctattcgacaacaattgttaactatgtgatccaaggtcatatattatactgacaatgacagacttaattaaacatatattacgtgtgggatggattagaggaaccgaccattgcttttatttaattagttaaccatcttcgttggagacaagagattcacatttcaccctcacaatatgctgttgtcttttccttttagtaaaccacgcgattgttatatacttgacttcatctaaaatggaggaattttagagttcgaaatttgttgctggttttcgcctatttataggcgtattaggagcatatgcgcagagatgtgaatgttgtgttccgtgtgttctgtgtagtgatgtgtgtgcgtgtgtacttgtgtctgccatataatggaaaaaatagaggaattttaaaagattgaactacataatataaaaaaaaaatcccgcataatgtttttgagcattaattgatcacaaattaattatctcaggtattagattcattgcaacaactcaggatagccctcagcacctcaccgtctcaccctcgtccccaatgtttgccatcttaaaaaaaataaataaataaaagtggactagaggcaaaccgtgtcatgcataaataaattcatctcgaatttgttttttaagaaaaggccaaagacccgcttttatagaaagccatgaccgcatgagctgggaacaccggcttgctatgtaagttcggtacatatgacatccacacaccgcaggccacattccagacagtacaaccgaaagagttacaagacagaagcgaaaccggaccagcaactctaagaactccaacaaaaggaccttacagactaagaacatgaggccagaccacgtaagatcaaatcacaagaactaaaccaaccagagggggtgaatggttggtataccaaaaaccgaaaacttttagcggaaataaaagttactctcaaattcgacggatcgcggtctgaccgaaggtattgcgccagtttgaccgcctgatgaacgtcggtctgaccgatgtagatcgatcggtcgaaccgccgaagtcgcctgccgccgccggtctgaccgccgcgatgctgccggtctgaccgccggtgtgtcgccggttagaccgtcgaaacccggtgaaacacaaatcgaagaacttttaaagtagatgataattttattgattctctctgtgtttacaaagtgcatcaatagcagtccttacaaaaatttcgactaaactcgaaaccctaactcaaaactcaactcaattgctctcaaaagcaataccggaaagcctcacgctccccctctatttatacccgaggtaggcagcctaaagccacgaaccaaactcatactagaagtcctaaacaccttaggaaaccctttagtacaagaaacaaactttacataaccaatcataccaaatttggactccttccaaattcgactccgcatcccatacgcacacaatacctccatcgtatgccatatggaatcttcacaaaccatgtgcatcaactctagcctaagtatcccgcatgatctctgaccacctcggatgtcgtcttatccctaagccgactcccggtccatcatcgcaaatactctcccgaggcatcgagtcacctacacataaaataaacaaagaaaccatattccgagaccaagctatctccaacttgactcattagtagcaaacaacagtattacatatgtatagtatccatccagaagccataatcatgaaacaatcacggatatccaaacaaacaacccgaaactaaaactgacacaacgtcggccggtcagaccgcgggctgcgccggtctgaccacgcatatacctccggtctgaccggcataccctacccggtttgaccggtcccgacaaacagcagtccctgtcaatcacctgtaaattccaatcatctataaaaccacttcgcaaataaattccaaataacaaaaccaataatctccgatgccaattgttcatcacagaataataatcaaaaacacctttaattttacaatctccctcttgatgaacacattggcaaacccatcaaaatgttttggtgtttggaaaaataaaaacaaaagtggtaaaaagcacacttcgtacaaatgttacacatcgtgctcaaaaattcaaaagaaaacttctctctcttttgaaaaaaaagaaatttcccaatcgacaagctcttctcaaatcatttgtttctccaaaaatttcacattacttctcccccttttgacaatgatttcatcaagcatagaaattatgttcattaatgtataagagcttatcatacatatagcatatcatatcatgtgttgcaataaaaagaagatgaacccatctataatatagcaaacatgcattaaagtataaacatgaaccaaagattttacaattaagcttgaatcaacaatcaaaattcatgatttcatacgatttataatacaacatctttacaagcacataggttgaagaataaacactaaacgcatatacctaatgcatttatcattctttctcaaataacctttggcacaaaacaaccaagagaatttttttttaactttttcttttcttgagcctttttgctcatatttttctcttttattccaggtacgtccctgtcgtcaagactatttccagggattcgacacccattattttgctcacatcgaatacgtcagtgtcgtcaagactgtttccaaggattcggtattctttttttatatttttattctctttttcacaatgagcaattaaagctatttgaggaataacaattcaataaagcatatatgtagagcatttataaaacaaaccatatgctcgcatcaacattgcacatttgctttattcaagtatagaatttaagtgtcatgcatcatctcccttaaaaacaaaatctaaatatcatgaaaagactagaatacatataagctatgctagagacaaataaaccttcaaggtattgctagaatgcacaagaaaatactatatgtatagaacaaagctctcttttctcaatttttctcattgtcatatttttgcttgataaaaccatgaggtacaaactccccctcaaaccatgccaaaaggatgaattattcccaattcaccacgaagaaaagcaaaatgattagaatccaaaggtttgttgaaaatatcagcaagttgcaacattttgtccaaaaactgcaattcgacatctcccttctcaacatgatccctcaaaaagtgaaaacaaatattaatgtgctttgtgcgtgagtgttgaacaggattcttagcaatgttaatagcactagtattatcacaaaagagaggtactttctcaaaagtaagactataatatttcaaagtagataaaagccaaagaatctgtgaacaacagctagcagcagcaacatattcagattcagaagttgattgagcaacactagattgtttcctagaagaccatgcaatcaatgatgtaccaagaaaatgacatattccactagtacttttcctatcaattctacaacccccaaaatcagtatcggaatatccacttaagcatatagaagatgaagtagaataccaaattccaaactcaagtgtatgattcaaatacctcattattcgcttgatcgcttgacgatgtgaagcacgaggagaagctggaaagcgtgtatacaaacacatagcaagttgtatgtctagcctagaagcaattagatacaacaaagatccaatcatacttctatactccttttgatcaacagcttcaccatcttcatcaggatccaacacagctgtaaaaccaattggtgttgaaattggcttgcaattttccatcttgaaccgtctcaaaagatccttcgtatacttcatttgatgcacaaaagtaccttgaggtgtttgcttaatttgcaatcccaaaaagtacgataactcacccatcatgctcatctcaaattccctgcgcatagtctcagcaaactccacaaccaaggcgtgagttgaacaaccaaaaatgatatcatccacataaatctgaacaaaaagttgattatcaccatgcttaagaacaaaaagcgttttgtcaacctttcccattgaaaaacctttcgcaagcaaaaagttcttaaacctatcataccatgccctaggagcttgtttcaaaccatacaaagctttagacaatttaaaaacatggttaggaaactcaggattttcaaaacctggtggttgtttgacataaacttcctcctgtataaaaccattaagaaaatcacttttcacatccatttgatacaatttaaaaccttttgaaatagcaaaagccaacaaaagtctaattgcctcaactctagcaacatgagcaaaagtttcatcaaaatccaaaccctccacttgggtaaaaccttgagcaacaagtctagttttatttctcacaatcaaaccatcctcattttgtttatttttgaaaacccacttggttccaaaaatattatgttcagaaggtggttcaacaaaagtccaaactttgtttctctcaaaattttcaagttcttcatgcatggcattaatccacgattaatcagttaatgcatgtgacacatctttgggttcaaaagaagcaacaaatgcataatttgcacaaacatcatgagtcgttaccttagaccttgtagtccgctcacctatattaccaatgatttattccgacagatgtcgtcgttgaatgtgcaaaggagtagcgacttctgaagttgatccacgttctgtatcagtactggtcaaagttatagtctccggaggtccatctcgatcagcatcaacagtaccggaacccgacgagcctggccggtctaactgctcttcttgaggcggtctgaccggcggcgtgccggtggtctaaccggccgagccgacctcgtcgttgttgtcgtcttcactctcgtcttcaaaaatacgaccatcctccccctgaacctgtgacaatgtacctgcaatatcgggtctagtacctggactagcctcatcaaaagaaacttcgcaagtctcaatgattttgttagtctccaaaataagtacacgatagccacgactatgtgcggggtaaccaagaaacaatccatcggtagaacgtgcctcaaacttatccaaatttccagatttcaagacaaagcacttgcaactcaaaacacgcaaatgtgaaactttaggttgacgtccaaatcgaagttcataagaagtttttccaagttttgatctcaagaaaactcgatttgaaatataacacgcagtattaatcgcctcagcccaaaattttttaggagttttatattcatccaacatcattctagccatctcaaccaaaacacgatatttcctttcaacaacaccgttttgttgcggtacacgaggagaagaaaattcatgttcaagaccttttttgttgcaaaattgttcaaaagaagcatttttaaacttaccaccattatcacttcgaattcttttcaaagaaccaggaaattcaagatccaatcgaagaaacaaaccacgaaagtgttgaaaagcttcgtccttagttgccataaagaaaagccaagaatatcaagaaaaatcgtcaacaataaccaacacataccactttcctccaacagattgcactctagctggaccaacagtgtccatatgtaatagctgtcccggtgcatccgtcatcacagaaacaataggagcatgtgaacaagcaaccatcttagcatgacgacacggtgtgcaaaccaaatcaatatttttcttaagtttaggcaaaccacgaacaagatccaaaccacttaacctagtgagatgatcaaaaccaacatgtccaagtctacgatgccaaaacatcacatctttatcaaacttagcagccaaacatgttatcacaggtgaaacaggattttcaaaatcagctttaaacactcttccatagcgagaaataatcaacacagaatcaccacaagaatcaaaaactttacttccagttttcttacagtgaacctcaaaattttcatcaaaaatttgtgaaactgaaagcaaattgtactttaagtcctcaactaaagcttcatcttcaattcaaatttttcatataccttaaccaaacctgtagcgagaacgacacttgtagaagcatcaccaaagataatcgattcagtcttggatgcctttttgagggaggagaaccaatttttatcaccggtcatgtgccgcgaataaccggaatccacgatccacacgttctccttccttgccaccaaagcctacacacaagcataagtcgaagcctcagtactggggttagatgataataaaaatttaggaatccagtactgagacacacgaccagaagatccaataggcatatatccacgtgtaaaaatagtttgagaattttcagaaaaattcctctgaggccggtctgaccgaggtgttactgccggtctgaccgggggccggtctgatcgccgctgcaccgccggtctgaccggtgttcggtctgaccgaggcactgcagccggtctgaccggtcgccggtccgaccatgggacccactgcggtctaaccggttccctcgaggaaaaatcagatttttgccactttgattttgcaaaagcaatctctctctcgtttttctgtttatgagttaatctgaaacaaaaaccaacaatatgtccatctttaccataaaaagaacaagtatatttttcacgatgattagacacattggtagaattagaagacttagcaacacaaccaacaacaggagatttgtgcactcaattgttccacaaagttgaatatataaacgtacgaacaaggcagatgaagaggaagatataaggcccatttggtagccagcttctgagaatatggaaaagctaggtttcccagcttctggcttctagtttattttttggattctacaactacagcttctcagaatttggaccaaaagctggactgtttagagaagcttctgattctgaaagaagctgcagcagatagatgctcccccagtcgattgacgtgtgatcaccaattcaccatgttaccactgttagggaatccacaatgtggtgtaaaagtagtccataagcaatagaatattccattcagctacctattactattgtgcaactagtccatatagaaaaaatagcaaaagatacccatatgcatatggactacccatatggaataaattatattatctatctctactcctctcttctcctaatgataccttgtaggacattgccatagggataaactatttatgtgggtcccatctatatggatcactttgccatatacatcggtgatgcccttatacatattgagatttaattaatatggaaactgtaaggtcaaagcaagttggagaacgccagctggtaagagcaaaattgtttatgcgcgccctttcgtctaataattcaggaaaaacagtatggaatcagattgcgtgttgcatcatcttcaatttttcgttataagattttccatgcatgtggttagaaatatctggctgaagttataaaaaaagaaaatctaaagtgtaaaaaaagaaaatctaattagcatagtttaattactagagtctgtcaccatcctactgaattatattataaacgattactcatactctcaacgtctgtccattaacttatcaaccataggcaaaatataaattttaaaatttaactttagagtttattttaaagttgttttatcgtagtccattttcaagcattgacttttaaaccgctaataacacatatataaaagtttgtaggaattgtattcaaggtaaaaaaaaatttggtaggtgtgtgcattttaatgcaagaacttgaaaactgagcaaattggtacacctacttggttagatagtgtgcttttggtcaaagtgaatgccacatggatgttttttccaggttagcaagaaacgttatttttgttacatgtttctgctgcatccttggaacaatagatagactgaaggcccatttcagcaaatatatatcaaatcagaagcactacaagtctagatttagaattgatacaggacaccgtgatttattgatcaatttatgaaccaattcactgtaaaaaggcaaataggtgtcgccactataggtgccggcacagctaaaaacgacacctataatgcctttcctgcccatgcacccacccccacgcgccaaatattcaaaaccggcacctttatgtcgaaataggtgccggtttttaaataaaactgatacctaaaacctgtgtcagagaaagctgacggttttaaacccaccggcaccttttaatcttccccctcccacactagctgttggtgggccccacacgtaggttcggttttaagactagggtgttggttctcgtcataaagccgacacctttattccaatagtgcttttcatgcccgatggtaggccctacaaaaaggtgccctttttttgtatgacaagataaaggtgccggtttttggtctagaaccggcacctttgttccaatagtgcttttcatgcctggtggtgggcccaacaaaaaggtgccggttttttgtacgacaagacaaaggtgtcggtttttgtctagaaccggcacctttgttccaatagtgcttttcatgcccgatggtgggccctacacatatgtgctggtttttttgtatgacaagacaaaggtgccgatttttggtctagaactgacacctatgttccaaagtgcttgtagtagccattggtgagccctacacataggtgccggttgggaagacaaaggtgttggttttgggtctagaaccggcacctttgttctgacaatagtacatatatatatataatccatcccttgccactcgaactgattgagcaagaagagagtggcgcctctcgttcttgccccgagcagctagaggagggcaggaggttttactccattttttttgtggtgtttggttaaaggttgaagcctaaatgtaaaaatcaattatttctcgctccgtttaactcttggttgttgatttgaattgccatgtgctatatgcatgcatgtaaaatacactatgggtgttgtttttagggataattctttttatctttttttgtgtctattgttgcatgaaatgctaaatttgcgttaatgttttcttccatccttcgtcacggccgttagtcaaattaatgctagtcaaactatgttaaggccatggaaatgtccattgatagcttgatttatctcaaatttatgttacgggtgcccatcgatccactagaggagatggaaatggttttgctcgatttttcttgggttttggttgaagattgaagcctacaaagtaaatattcattatttctcacccagattcacacctgctcgttgaattgaattgccgtgtggtaatacatgtaaaatgcactagtcatttgtatggatccatcagtcatttgtagatatgttcttagatgtcatgctaaattttaattaatgttttattccatctacgccatcgtcgttaatgtttcacattagccaaatattttttttgcattgacgaaaaatagaattttttttatcttttcattagccatgaatatctaattaaggtgatgtgggcgtgcgcaaaaatctcaattttatcgtagggtaaaatgggcattactctttgtttttattctaatgtgcttgtacattatgaaatcctcattgtttttttccttcacgattggtaataaacgataattattgcaggtacccattggatataatggatctagaatggataactatagcggatcgtgactctgtggagtatttcaggggagtaacggctcttgttgatgcaccggaatatatttggtgtccatgccatgaatgcaagaaagacagacaacttccggctcacgggtaaattcacatctccttacaatgggttttagggacaacttccttggcgaggaggtgcacgtgaggaaagtgccggcaactgtcacgggcatgatgcggatgttggctgcgaggaggataaccaaacatgtgtcgatcacggtgaacctaatctagatcagatgctacacgacggggagagatttgacactgatgatagggaatatcgcaagttcacaaccatggtgaaggactccaaaactccagtttacaatggatgtaaggtggagcacaataagcttcaagtggtcctattgctgcttcacctaaaggcgagcaacggatggtccgataagagcttcactgagttgctagagctcttgaaagaaattctcctatggacaacatctagccagaatcgacatacaagccaaaaaagttatatgtcccctttggtcttgacatacagaaaattcatgcttgtctaattgattgcattctttaccggtatgcaaggcttctagctataagtggggagacggggatgatgagggtggaaataagaaaagagtgccggtgaaggtcgttcggtattttccaatcatctcctgtttggaacgtatgtatgcaaacaaaaagcatgccaagctgatgcgttggcaccacaaagagtgtaaaaaagatggaatgatacgacatccagctgatgggtctcagtgaagaaagatagacaagaagtaccaaagttttctcacgacatcagaaatgtgaggattgcactaagcactgatggcatgaacccatcttgtaacatgagcagtcgtcatagcacatggccagtggttgttattatctacaacctcccttctgggctctgtttgaagcataagtacatcatgatgctacttctgattcaagggcctaaacaacctggcaacgatatcgatgtgtacttcaagccgctggtagaggatcttcatacactatggacggaaggcgtgcagatgtgggatacgtacaaacaagaacacttcacatgtcgggctattttgttagggacaataacagactacccagcacttggaaacacgtcgggccaaatggtgaagggcatgaaagcatgtgtatggtgcatggcccaaacaggaggcaagtgactgaatcatagtcggaaaaccgtgtacatgcgtcatgggaggttcctcaggcgggatcacccacaccaccaaaataaaaaagcttttgatgggacggtggaaatagatggacgtccaatttttagaaccggaagtgagatcttggcggaggtgaagatccacatcgagcggtgagacccctctattcaaaaagaagtctatcttttgggacttgccgtattggaaagacttggatattcgtcatgcgatcaatgtgatgcacgtggagaagaacgtgtgtgaaggcgtgctcggggtattgttgaacacacctggcaagatgaaggacactttgcaagcacggaaagatcttggaagacatggacatcaggaaagagctgcatcctcaagacagaggaaatggctgctactacctacctccggcatgctacactcttagtgctacagaaaaaacgagtatgtgggaatgcctgcggggtgtaaaagtcccatccggttactgtgcgaacattaagagacttgttagcatgaaagataagaggttggttggaatgttcttaagcttcacatgactgccatgttcttatgtcgcagctgctaccggtcgcaattagaggtatccttctagaaaagatccgagacccaatcatcaagttatgccagtttttcaaagcgataaaccaaaaggttatcgatccggcttcattgggcatgcttcaggaggacacgattctcaatctttgtcagctagatatgttgttccctctctctttcttcgatatcatggtgcatctgattgttcatcttgtggaacaagtaaagatcttaggtacagcatatctggatagcatgtgggctttcgagaggtttatgggtatcataaagaaatatgtcaggaacagatcgatacccgaaggcagcatcatcgagggttatgcaacagaggaggtggtcgaattctgtatagattacatggatctacaacctatcggtgttcccgtgccccgtcacgagggcaggatgcttggaaagggaatattaggtcataggagaattgtcgcccccaatcgacaaaccataagacatgcccattttgcagtgttacgacaatcagctttggtggctccgtacatggacatgcacttggatgttctccgtagagacaatcccaggaaaggcgcagcatggctcgcgaagatgcataaacttcaatttgggaaatggttgatggagtacctaacaactgcagacatcgatggtgcccatttttctttatctcggtggccatccaacacaatccacatgtaccagggctatgatatgaatgggtataccttttataccaagtcccaggacaacaagagtataaatcaaaacagtggtgtgcgcatcgacgcctacgatgatggtggcaacaagcagacttaatacggtttcatagagtcaatatgggagttagattacggagccctcaaagtccctctattccaatgcaagtgggtcaaaattccaagggggttgaagattgacaagcatggaacgatcatcgttgacctcaatgatgttggctacgaagatgaaccattcgtgctcgcaaaatccgttaagcagatattctatgtcaaggacccatcactcatgaagccacatcatgttgtactcgaagacaagcaaagtattgtcggaatggagatatcatcgacgaagatgactacgatcaacccgatgagccaccgacacccacaactgatgtcgagactgaaaacgaggcaagcgctaaagagaatgaccaaggcttgtatgtatgatccgatcatgcgaaagggatagtagttagggtgtgaattaatttctaacttcattgtatggatttgtatggcaacttcattgtacggatttgtatggcaactgtttgatttaaatcaacaaaatttggaaatatattatgtgcactctaatatttaatttctattttggtcctttatactcttttttggaacatattaagtaataggcctattttctagtgaaacataaatttatgaaagaaattataatttataattaatacatataaagttacatttatataacatgcttatctctactattataaaaattagaacctattatagtcaaaggttccggatttagtgttagaaccaacacctatctcctttacttaaataccctcacttatccctttactctctcacccttatccattcactctctccttctcaccctcggcggtggcagtggcgggggctgtggcggcgaacctcaccctcggcggcgcggcgccctccaggtacggcggcgaggaggcagtgggtgtggtgcggcggtgtgtggcggcggcaatacagtggcgaggagggctcgacggagcgcggcggtgcggcggctcgacgcggcgatgaggagggctgaacggcgtgcggcagcgaggaggaggtgagcggcggcggtggcatatccatcccaacggtacctgcatcctcctccttctcttcttcttcttcctcgtcgttgtcttgccgcaaccacgcctccacgccctcctcttgctgctactgctactcctgttgtcgtcgttgtcttgtcgtttcttgcggttgttgggggaggggatgcgagggaagggagggggcggacgctagaggagaggagaaaggcgacgaggaggaagaggagggttcttgcggtggagatgaccggcgagaggaggccagcagcggtgggtgccctggaaaaggatatataagggagagcggacggtgtattggtatgagaaggaaggatatggagagattgcagcgggggaggcggctgacggcgaggagtggctaggaggaggaggtcgcgctggcggtggcggtagatgaagcagagagagaaaaggaggggaacttgaagtacctggaggtgtggcgctgcaagttcagcgataagctcttcatgctgtaaccgccgctagccagcgtctcgctgccagtgacccacgtaggatggcgcggcggcggaggcggcggcggcgccagccatggcatgcatgcatgtcgatcagtagcatagttttgacttttgaaaggggtatagtagtgtaaaagaggggtagaaagtaattaattaaagttaatggttattttgtgatgattataactatttaattaatcaactaggtcgatcttaatcttaagatggtgtactgagttgatgatgctggtaatgtctgtaaatgtggaatttaagatctggattttaccgtgtatgttcttcttttgatttatctgctttccctttttcgactagttcttttgcttaggtaaattttcattttgcattcttcagttgtagcggttgactaatggctgagatgcgactttatttcattttcatcagattttacatggtttcttaataaaaaaattgcttgacgaaactcagctctactccaaagaaatatgcaaaattttcacatgatttatggtcggatcgagtattcaagttcagcttatttgtataatgttcttgcagcggcagcagtgaagaggggcagcggtgtgcggcggcaaggcggaggtggaggcagcaacgatggcccaatgccgaggtacacccctcctccccccatccatcctcttcttcttcttccctcctccacttaggaaaatttgctcatgtgtgtgatggatttgtcccttactgtcatgggtgacggatgtgtgaatgtgtgtgatggatttgtgaaatatgttttgttaatggagtagtatagatttaagcttcacataaatatatttgtaaaatgccattgtatcattgataataatgctctattggtaatcacagtaaagtatccacattgtgcttgtcatcataattcgtcactagcatgctaggatatatagaaaaatggcaagtctagcatggtaaaccaagtggcatctgtggacggctattaagtacaaaattctcgctgtcaatacctgcataaaaccataaaagtaaaacatccaatatagtggtaggatttatttctaaccatttccacgagtgttagtgtatatttgtatgcaggatgcaacccaccaaagttgagatgaaatgtacatgaaggatgagaatataacttccatatccaagccatagagttttgagcccacaaacccaataagatacatttatcttgagccaaacttcagtagaacatatagtgggacccacatgtcagaacaccagagaaggagctaggctggatgggccagccagggttcggctgaaccagcagctagcccaaccagcacaatattttaccaactgatagttatcctcatcctatgacggttaggagcgttaatactggtggaaaccgtcatcaagaggacacatggcaaaaggagaagttaagaagatgctcttaggattctatgttgaatatttcacagtatctccactctctcaactcacctccacactataaatacccctgtcctctccctcattcacacacacttgaagcatgagctgaattacaagaggctctagtgtactttattgtatattagaatagagagagagtaatgtagaagaagttgtcgatgcaaattaattctcttcttaccttttttatcttgttaattactctgcattaattgaatatcattataagtaattaaaatttactctgtgagaattatctcttggttagttcctaattagcgtgcgggatcatcgttcactatagtctattataatatagattactttagtgagttataaacactacagtagctattaattgcttagatgcggtgtctaagtagttgatttatggtgtttgctccgtatcccacagtaggtgtaaggtgggtgtagaggtgggtgtaagtcctccctgtccgggtacgtaatagagcgatatctgggagcagcaagctggccagtgcccgaagtatcgcgttaggattaagttaagctttccgtagacattgtttctcaccggtgaatcctctctatcctttgcctatcattagcttcgtgtccttggacaaacctggtaaagagctgacacacacgttccctgtggaaatcaatacctgagaatactcctggctgaagtgctacatcagtattttccgtgcgcttgcggattttatttgtaaagttaagaaataccaacagcatccaagataaatggtaaatgcaactgttagcactatcctgatcctaatttcttatatactttaatcgaaaataaaatttctgaacacccataacttgctgcactggacctaggcttcaagatcacctctacagggtatttatgttgctcattaagtaactaattatatatttttagtgtctaataacaccgaaccagctgtttggattacccagttgtataaaccatgattacccatacatgtgaacattttacaactatagaatatggaagttgtatgaggatgtaattatgtgtgtgaatgtatgatggatttgtgcatgtgtgtgatggatttgtcccttactgtcatgggtgatggatttagacatgccacaatgtgttggaaaatctgcagtatggcactaagacacattggcacatatatggcacactaagaccaaatatgtgcttgttgcacttgttactccatttccaatgtctaaggacatttcagtcatgttactgtatattttgtgctgctactgctgctgctgctaaaatatattttgtgttgctgctgctgctgatatatttggtactttcctatatcagtttatttccacaatccatcattgggttgaaatgtacttttctactttcctgctgctgttgatatatttatgcattgcccatgtgaatataacttgttgctcgatgatgaaattcatatggtgggagattatgtgtggaagtatttcatttatttgtgtgatttgtgaattgtgctgggttagggtataaaaccggcacctatctcctactacttaattactcggcctgccacctacccactggccacttcaccctctctctcttatccacacactctccctcactctcttttggtcactatttttgaattgccctttattctcgtctctgtttatactgccacacataatcgatgacgacctagtacaccatggcatggaggccattaagttggcaacctgccatctgagagcaaatatgttcctgttttgtgcttgtaacagttctgagagcacaaaatatcttacacctttagaccatgttatttttcaacattagtaatgttattatgcttgatgatgactagacggaacacaaagaatttgccagctccagatctgagggtgaacatcatgccagccctagcacgttcttaaacttaaatcaagagcattccgaaggcggagaggtgatttcgacgtatatttcacgcaatagtgcattagcaaattccgactctaatggaccattcgaactaatcaaatttgcaatttccaaggaggttgacacttccactggcagttcaggccagaattcaactgtctcatctagcctaggggtcctagcttgatgccggatggtcactacgttgtgacagtgctcatgaaactgggtggccacacgtaccatcgacggtgatgaccccctatggtagggcgtgtggatgtatcgtcaaggatttcattcccatcaagtacagacattggaatgaaatgatgtaacacaactcgactggatggtacctgaaggaagaatgctggcgaaagttgaagttgtcattcacctttccagaaggccaagaagagctagcaaagaagggagccctatcaaagatgggcacattatttagagagtggtggactgacttgaacgtggacttcgtccaatgcaaccgaaccccggattttgagaaacccatgtatcaaaagttggcagattattgggatgagtttgtgagctagaaaacatctgaggaggcaagagaagtgagcgccctaaacaaggacaacttcatgttgaacacgtatccacaccgacttggcccgagcggatatgctaagaatatccccaaatgggaagagaaggtggaacaactacatcaagcaggtatagttctcgagacagatgcatgggggacccggacaaagcactacatgtacgccaggaaggctcaactatcggatcaggagagttggttgctctgggacctcatcagcaagagctaaaagaaaagatcactgaggccatttccctggcaagacagggtaaatttgtgccagtaagagagaaagatgagatcacagtggcactggggacgaaagagcaccctggacgcatgagaggcgttggttccgttccatggaaggaagggttcccggatgatacacacatgtatcgggcccgttcaagaagacccacgagagaagaggaggccggacgtatgagattagaggtggcctatcaggtaaaggcacaacatgcagtgttgtttcccgatggggtactaggacgacaggggcaagttggtgaccaactggttagcccgggtgggaaacggagcagttgcgcatccgcggataatccccctccagaacagcacaccacgcattacgttgtttttttaggggaacacatgttacgttgtggacgacataacaacacatactccgtgcgtgctccatgtccctcttcagagcaacattactcaggagattgcacgcaatgtggcacatccaatatgtgcagggcaaacaatacacggtgttccattgcctgcagaccactcaagggttgaagtggaagacgtgccaagccagtatagatgttatgtgctacaatttcctctagaggaaggggttgacactctgagcgctgctcttcacaacctgatcgtatggcccaaacgctacatcgttatcacaaacgatggggcaggggatccaagcgccgatgattccagcctttcaaacggacgaggtcattcttcgcctcgacagaggtcccctagtctacctcctcgtcagaagaccccaaatcaaccacaaccttcgcagaagtctccgagtacaggcccaattaggaaaaagaccccaacaccaagtgcgtcgcaaatgtctggttcatcaagcatggagcgactcccacattccaagtcgaaattagtgccaaatccgacaacttcgctaccgaaaaaggtgagcggtagcatcacttcgcttcttggccccaagaagcctgaggaacgaaagattccaattcctaagaaagtgatcgagcatttcatcaaatgcgcacagccaaggctacctccaaaacctatatcggacttccgtagaacacttgagaaaagtgaaatgcagtctcgatctagggagttgttccttgacaagaaagcgtctgatgaggctgctttctgtaagtcagtcgatttgaaaagcctagacgatattgataaccttgacaaggctgaggtggtactcagttccaacatggatgacccatggtgctcgactcagaaattgaatggttaggaactcaagcgcattggctgcatcaatggtatttggaggaggccgcaaagggtcatgaaatgatcggtgcctactacaccgacattgattttcaccatgaccccaatatatgttatgtataatttaaggagctcttcaacttgtaccataaaaaggaactcgatatcagcctcctccaaatgtggtcattgtgagtcctttgatatcttctccttaatctggcaccttggacgtactctaagtagttttcaactattttctccttttgcaggcgctgctcttatcaatgtagaagtcttgaccgtaagattgcatttctagatccagcggttgtgaacttcaacaatcagttgtccaaagaaaaagaaattgacgactatctcttcaatgccctcgttaagcaaaatggttatgaccatattctcctgccttacctatctcagtaagtcactatcatcgatttctagttccatttgctctccacgcgtatcatattattgatacattgtcctatgtgcagccatcattggatcctcttcgtaatcaatatcgacgacagtaagatttgtgtatatgatagcttgaggaaagggacagacaattaccaaactattatgaatgcactaaatagggcatatgtgaagtaccgtaggtccaaaagaacgtatgggagatgtgcgatcgatgcaacatcattccggatctttgaaaatcaatatatttatagacaaccagcgcttaccaacctctgcgggatgtacgtcatgtggtacatgctatgttttgtagagtctgggcaccttcttccccgtaatgctgaggtatgacatgtttcagggacttacgtaataaattagactattctattgaagtacgaaagtaaatttctatgccttccacccttgtgttgcagaagttgggtcttgaaacaagcgaaatgctgccacacgtcttcacagctctcaccgactagttttgcgggcctgtccatactcatgtcatagatccaaatggcacttacaatgtcaacaagctcccacaacaaagtgcaatcctctgctcctacccctcaggaccaaaaagtgaagaaatcaactactaagaagagaaaaaccaggtaggtagatttgtgtgaaaaattgtagttacttagtgcttatgcatgaattatggatgtgacacgtcctagtacaatgaatctggacagaccgtgtgtccagattcattatactaggatttgttacatccacccaaaatcccttatgttatgggacagagggagtatgtacaaatgttttggatttggacttacaatatatatgtaaatgtttagagcatctgagatgttgtagagctctagcgatttagtcaagtttcctgggatgtgtaacacatctggtcgccaccttcgtgtggtttgatgagcacatctcaggctgaagttgactggcacgctgagtcccaacaatatctcatttgctctttactcgaggatatgaatgtgaattatatgcaaatgtctagaatttacacttataattttctggacttacgaattttagacttgtgaatttctgacctaaggatatatgtgcaaatgttcataatttagacttaggaatttttggacttaaaaattttaaactaggaatattttgagttaggatatatatgcaaatgtttaagatttaaagataggaacttttggacctacggatttttagacttggcaaattttaacttaggcttgtaggtttttatttgttgtgatgaatgtgaaagtgaatgaatgtgctgtatggatctggggctgtagggatggatttgggtttgtatggaattggggttgtatggatgaatttactgcaatatttttattacccaacaaataggtgccggattttaggtttgaaccggcacctattaggaccatataggtgccggttttaacctaaaaaccgacacctattaagaccatataggtgccggttaagacctattagcggcactattacctaatatgtgctggttctaaaaccaacactgatggcaagtattatcagtgctcctttgtgccggttgggaaaaccggcacctattatggttttcaaaccggcaccttttacccttcctgtagtagtgtcctaattatacagtcaattgaacaatgcagctagatggtgtctaagaaaagcagcgtgatgtatgttcacaagctttacagtcgaccaaaagcaatagatcaacctgggagtcacgagttcctgataaattgaaggaagccgacattaaatatacatcatgcgggacagatagaacataaaaggtgtagatagtttgtttcaaatttattagaatgcgagagaagcgatcttgtgcacctgatgtgcaatcaacaacaatgtcctatgctgatgtgacaaaagaataataatgtggtatcactttgcctaaagtgcaccatatagctaagctaatacacttatatatatatgctcaaattttaagttcctgtactagaacgcaaccactcgacactaagtgcaatttattccaaacgaaaacacatccatagagtaataaaactgtaacggcgaaagcaaaagtacgttgttggcggtcaccggtgcttccatcggaaccgggaagacaacgagtgaaccgcgctggcgccattccgtggcttcttgtcgccgccatgtcccacagccgcatagccatggccggcgtcccttggcattgttctccaccttcgacgacggcgacggtgagggccagtagtgatctttatatatgtcttcttcttcctccagtccgagccaagcttcaaaattcttcagaggggaggtcttgccaaattttattgtgaatttattttggtgatcatatacaaattggaggtgtctaaaaggttagcaacttcatcctccaatattttttttgttgtcatattacatttgaagctatgtttggtacacattattgtctctaaaactttgttggaagttgatgagagagaaaatttgtgtagggaagaagaatgtatagaaattttgtttatttacaatttataaaaagtttttataaaatagttgagaatgaaaatatattgaaaattaatctaaaataatagaaaacaaactaaattgaaaattaaaagaagtacaacacattaaatattagtttaaaaacttcaaaaataattacaaaaagaataatttgtgggattattttataattattgtatgtataatgatatgtcattattgtatgactgtttagtgggtttcactttcgttgaatatttttacggtttttttgcatttcatgtagatggatcggcaatggatgtacgcggactagcagtcgaaagagtttattgatgacgtgcattattttttgagagtggccgatgctaacaagcataagggttatatttgtcgtccatgcaataagtgcaagaaccagaaggagtattatgcacttaggattattcatttccacttgtttgagtcggggttcatgcctagctataattgttggacatcgcacggagagctaggggtttaaatggaagaagatgacgtgtaagacgagaacattcccgactgagtttagtacgctggatttgaaggaaatagaacgggcgatgtggatggggatgttgacgataacgacgctgtggatgatcttggttaaatgttgcaggacgccaaggaggactacgaaagtgaaaaggaggcccataaattggagcgtatgttagaggaccactgaacatcgttggaccaggttgtggataggggcacaaaagttggataccactctggaattctagcaatggaagacaaaaaatggtgttagtgacaagtcatttggtgatttattaaaactcgttaagaacattcttccggaggaaaacaaattgtccgagacaacgtacgaggctaaaaaaatagtctgccctctaggcgccgagcactttcaaaggtgaggttgacggtgagggtcggagaagctacgtggcgaggcattccggtgaacatcgtgtccatgatcagcaacactggaacgccatcgattctcgactcgtgggtgaatccatggctacccgcttttttggataatgatctatctaaggatttgtttgtcccatttcgtctgccgttcaacgactcgccggaggagacggtagtccctcgtcggagatggagagccttgggtttgtttcaaactcttttacatgataaagtttgaaatgttttatcaaatctaattttgaacgtgaaatatgctcgtgtcgtgttcgtgtaaggcagttataataacgtcataatagaaggatgtacatgcaaaatcatcatatgaaactgaaaatggaccctggcccacatgtcggtaacacaagcaggggcaaatcctaaagatacatcctatgtggggataaatttgtttttgtctccttttagaggttgccaatttagcgggactgcataaaaaggccatttattattgatagatctaactaattaaactaatgctggatgtatgtttcttcctggtttccagtataaagaagatgtctgccggcctctaaccagtgattctgattacactctggtacagttttgcaaattttgattgacataaaaatgtaaacagtttaggtttctgattctaattataggcgattctaattctagcagaaatggaaatgaaatccatttcaattaaaaactttttatttgaacagggcaccattgctttgtttgagaaatttgataattcgaccctttatattcgttgccaatttgctttaattgacgctggtggaaatgatatgtgggaccatatgagtgaatgagtaaatcaaccacgtttggcacacacacaatgacacaaactcgttcattactgattgatatagtttggcaaaattttacaaattctccatgctttttcaagtgacgcggcatgaagcaggcaggagatctgctgctgtttttcatagatgaagagaagcacacagaaacactacaatatacaaactgaactgcgcctcatcgatatgtcttgcagtatgagaggctaaaattgttgatgatccagagaaaattttgcaagaaaacaatagaattaatatgcgagcttcttcttattgcgctttcccgttttgccttgtttggattctctgcatgaaaatctattagtccactcttgggctggcgatggtgacgtagctagcgtcacatccttcttgaatgcatcgttgaggaaatccgaggtaatttctagttttgctccgctttgacacctaaggagggccatcgggaattcggagctgctgcgtttgaggcattcgacacgcttggcaacaatgacctgtatccttgcttggtttcgggaggggtttgctgttgtcctcttgggaagtcgaagctgctacgtgtttgcgagctcggcaatgatgactcatgtaagacttcgtcttttgcgttacgctctagtgtggggttttaagcttttcgatctgcacggtttgtcagtctggctcgcccttgtctcaatgagtctagtggtcgtgaagtcggagctgcggtgttgacggggcgcgacgtgtagcaacgatgacatgagcctagttgagttgtgctttggcgtggtttagactgttgccctaaccctggtgtttcctggtgaagtcggagtcgcccaatcggtgttggtgtgatgacgataacaccatggctgtgtcaatgtgtgggggccgtatgtttgtctagcttgtgccttgttagcggctttggttgggtgttgagttctgctgtcctgttctcgttgtcgtggtagcttagattagttggtggtgttgtgtgacagttgcggtttcgtctagttttccttaattaaccgtgcattgtaaggtttggtcctgttttctctttaaaatggggcaccttcttctttatataaaacgtcggcaaaggcctgaccgttcgaaaaaaaaaatgcgagcttctcgcttccagcatgagtacatcatctttgatctcggccagtagaaataactcgtagtgccttggattttgctcatcttgatctgttgaccaaacagtaaccatgcttgatttctgctcttcatttttctgaaactgatactattaccagcagcaggcaggaggtagcagattaccaccagaccaactgcatgaattaccatcaaaagaaagactgactatgcctgtgcttcgcaagaagtaggtgtaaatattcagacaagataaatacacaatactatcacatggatacaggagtacttgttcagacaagattgcaagttcgaatattttctgctgaaatctgagatcctcaagctgcttcaattagtcataacatgaaaaatcccaaacaaactagaaaaaaatatatcagagattcctttcaagaggacatattgattatacttggagccacctattgataaagcaatgcataatcagaaaaccaatttttcagattacacaacaggttggatcagtcaagatgaaaacaatcagttccacaaacatgtaccgtctcctgatttctccaaatttaggtcatcaccgaagtgcgctggctcaccgacagccaggaatagcatatttccaagattttggatcccataatgtcgggcgtttatgctctgtacccaaggaaaaatgaataacacctgtacatcatatccatgaatgatgtcaactttcaccaaactatatacgagattatcataaaactacagatagtcaccattttgttacatgagcatgtatgtaataacaattcagaggcattgcaaaggtatacacatacttatcaatgatcagtcaaaaagccagaaagttcatcgattttagtggaatgacacttcgtgtcatcaaataagcctcattgcaaaagggaaaaggttggagtagagttagtgtactagttttcaatgggcttcctactaattgaaagcaaaccagtccttaacaaagaaacagtggagggaaataatgctcatgcatctgaaaacagaagaagaaaacatttaaccatggctcctgtgtttgttgaaacataaggaaattctgttgacaaccttgtaattgtattattgactataaaacagagggggaggtgattgaaatttttaagtgcatactctgcaacatatggatatgcaatactagtatgtagggaaaaaaaaacaaaaaggaaggaataagcaatggaaaggtacctccataaggacattttgcatgggcatgtgacaaatctctttccttaagaatatccaaccgtggcctaaggcgttcatatagcggcttcatattcatggctgggcaatatcgaatagcaatagttgaaagagatgagtagctctctggaccacatgctaaggatgctagacgtttgcagctcacaagacaaagtctttctaatgatggcaggtctcccaaacaattcagtgactccagtttattgcagcacctaatatccaaaaacttcagggcatgcagctgccctgatagagactgaagcttcggacaagaatgaaattctagtgacgtgagggacggtggtaggttctgaagttctaccattttatcattgaaagagatatgtatcatttctaggcatggcagaggatgattcactgctgatgatgattgctctggtacacttctgtactcaaggtcattgcagtgctccgatgatgtaaatgtgtcatggtgttctacatgtacattctccgactctatatcccccttaccccatatgaactcaaaattgcgacatccagaaacatgaatgtgggtgacagatgggggtagaacgaatagctctctcaagttatcacaacagcaaattgataatgacgttagacatggcaggaactgatctgttgcacaacgagttggctcacctttcaccagcgtggtacggcctattagattaacacaaccaaaaatggccaacatcttcaaggacaccaagcataggaactcttcctccggccagtagatgagcacatcactggacttgatttccaaatacacaagttgtcgaaaccatttccaaatcccaattattggttctgatgggattgtggagaagaaaaagttgcagtgccttaactccatatttgagagagatgattcgtgaatttgatcaagctgcaatatagcttctttgtcaagcacgtccaattttaacttggacaattgggacatgtatctggatttaagcaatggcaatgacagctctgccttgttttcatttagctttaaaaccttcagctttggtgcttcgggtagactagacaactttggacagttactgatttcaacctcctcaagcagaggaaatgttggtttgttttcttgttttccttcagtttccacccaactctcaaacctttccaaatcaattaacttgacttcctttaatgctggaaatatttgtacttttccatctcttgcttcctcgcagcataagctttgcaatttatctagttttatcaaatagagaacttgaagaaacttgaaatgtatgaattgaggaaattcttcacacattgtacagccctctagatggagctccgtcaagttctcaagaacactaagatctgtcatccatgttggaaaattagtgcctttataggaaactaccttaagcatatggagaccatgatgaggtttaagagcatcaagaaccttctcagggtaatctggttcttcagcatggtattcgccactccattcaagagataagtgtgtaagtttctctttccttccaagattggctgcttttgcttgttcttgagatacattttctaggccacgtaactctagttcgccagaaaggtttaagctatgcacttccctaagggtactgcaactagcgctagcacccacaataaaatatgttaatgtctgtaaggaagttaactgtccaaggtctggaggcatgcacttcaattttgagcatccatttgtataaaggtgtcgtaggcttgtcatatacttcatatcttttgggagtctaacaagattatagcaatcagaaaggtttaatgtctgtagattgtacattgtgcttatgtctgcaggaagttcatggatattactgttgtctgagagatttagatatcttagatgttgtaggtgtcttggcctgattggtaattcttcccttcttgggagctctaatgctcttagctgtagagaattgtacttaaataaatgtgatgttgagacattaccataataccctcgaaacaataaagttcggagagctggagcttcatttcccataaagtcatctggaagagcaatgctggtgtatggtatgagaacgtgatataaaggatgttctcgcatcagatttttcaaattagacgaaccaattatactgagacattctttccccataacagattgagaaatgtcatgcataagatcatgtatcttgcacgttgttctgtcacggagctgactcctatacacattctcctcccgctgagaaattttattcacatcttgaaaaaatgacctccaaactagttccttgaaaatattctgggctactgtttccagatggtcttcctcctgcagtggtatgaagtcatgtgccaaccataattggatcaatgtctccacatcaatctcataatcttttgggaatatagcacagaaagcaaagcactgcttcatgtgtgatggcagatcatcatagctcagccgaagtataggaaaaattttatcctccccttcattgcaaatgttgcttttagttaatacatcattccattcttgcatagtagtcctggtacttaacatagaaccaaaggcttttgcacctaaaggcgagccatgacatctgtgcacaatcttacaaagaattccaaaatgttcatcattgtttggcagagttaatgctctcctcaggattatttccttcatgtaaatttctcctagattttcaagattatgcacttcaacttcacccgtgaccataattctagcaacttctgcatctcgagttgttgttagtactgcactacccataccacccttcttaaggcaggtctttagctttccccacttatcataatcccgttcccatacgtcatccaacacaatgagatacttctttccacctacttctttctgcaggtcctgcaaagccttttcacgatctctctctgtgctcatacatatgttgtttgcaatagtgacaacatcaaacacatccgacacacaacaccacctgcggagcgggaaatgcttctcaatttcagggtcattgtaaatgagttgcgcaaaggtagtcttgcccagcccacccattccaacaataggaaggacagtgaggtccgtgttattagctttatcaagcaatatcctgataatcttcttcttctcctcatctctagatctgataacaatatccttgtcaaaatcaaccatgatggaatcagttttcctccactgcttgggtgtttcctgctggtgtacgagtccgaaggagttcatctccgagacaagttccttgattttctccacgatctttcgcagtttcttgcccatcctatatcggaagacaataggattacgagaagggaagaggcttacagagtccatgccaagcatagtgtggttgcggtgccctttcttcttggcctcacgccagagcgactcgtacttgaactcgtcgaagacgtcaattgcctcgtaggacaccttcttgagtgatttgagccaagcgcaaactagaccggatcgatgatttttcttctcctccgcatcttggatgacatcgaggatggctggaagcaagcgctccagagtctcacgctggtcctccatgccatccatcaccttgtacatgtctacaagaaagctggaagccttctccagcaccttggagagcagtggcccaaccaaatattcagccatcgttgctctctcaactctcaggagcaggagcacacggcaagaacccaaggcaagggcaacggcggctgttgctgatatgtagttctattggagagtgattaatggggtattaattccaggctgaacaaaggcaaagacaattgcaaagaattgcagtgcgctgcgcactgcatttcagtgttgactgacgcgtcttgctttccactaatttccaagagtcagttttgcttttatctctcattttcacgcacgccgatgttgactgacgcgcgccttagcagagtggtgagtggtgactgaccttgtggagacgcgaggggacctggtactctggcagccggccggtgagggcagcaagatttcgctcactcttgcttgcttttgccgaagaggtgttgacaaccgttgcttgcttttgccggccgagacggcgtacgtgttgtcctcgcagccattccgtcgaacaccagccgggcactgactgccatagcaagcccctacctctcctgccaccctgcactggacgctgtaggagcggagcggccggcgtccttgcaagcgaacggcggtgggcaggacagaagaagaaggcggccggaactcttcaaaggctcgccggcggcgtggcgcatggcaggcagacggagagcaaatgagcaattgcgcgccattcggttccctcctgtatattcgtcagaaatgacgatcgatttttgttcgcgattggattcgaaggcccaattggattttgagcgcttcatgggccgtcgcaaaacatgcaagcctggcccaacttggtacagtaatagttaatcatagtttacaacttcaatcgctctgcttttgcttaatttcgtcagaccttgtagataaaataaattattcaatgagatgagcatgtaattttcctatcttgaaaaaaagcatttgcagttcaactaatgaaatccctgaaatgtactgtatcaattcattcggcgatcattttattctcttctctcttttttttcttctatatttgaggtatcatcaagcaagcagatctgctgttttgatacagattaaatcctacagctgatgagctgacagcaatccaaaaaatatttttgtgggtaaaagtttttatatatgtgtccttagagatttaaataagctattatgaaaagaaacctccaaaaattcaattttggcagctgcctaggaacagatcaatgtgcgcaccgaaacacttgcaaaaagcgaccagcggcatgtccatgagcaaacatgttgataatcgagcgaaattcgacagagggacaaacaaatttctgttggacaaaaactcactacgcttcttctgacgacggcaaaattaactaagtgaccgctttgcaaatccctaaggaaaggaactgatccagagaataatcgccctggaacaagccttgtgaattggcaaaacagtatgcaggccaaaagttttaggaggattggaaattttcaagagctttaagattaagatggccttggataaaatggaaagatgaccaaagaccgtggacctcgatggatctacattgcaacaaaacagatatacaccttttccaagcttgcacgaaaatcacaattggcaatggcgagaagacaacattttggaaagacaattggctaaatggcctttgtctaaaacaacaattgccaaaccttttcacgttggcatggcgaaaaatcagaaatgtacaaactgagccatacagtttcaggagttagccaaatacgaactgattcagggccgccggaatttctgcattttcatttccagcgactacattcttctgacactgagtcactgactgtactgacagcaggtcggagctactgcccgttgtggcttatacacggaactggacataacaatttacaacataagtgcaaagcagaagattaccacgaactgcatccactgtcagagaaacatcgaaacgatgagcaatacagcgtgccagtgcttgtgcattacaataagtatgggggtgtctattatgtttagataagataaacacacaatactaaaacatagatacaggagtactaattcagtcaagatttcaagttggaatttgttctgcttcactagaacagaacatacaaaaccaagacaaaatagaacaacgttgtagtggagattccccatcaagaagatattgttgattacactcagagccacccattgattgttggtatgaatggtaccaatcctgcagggaagccaagcataatcatcagaaaaaaaaaggaatcttaaatcacaataaacaacctctcatcttgcacaacttgttggattccagtagaaaacgatcagtttcacttttttttttgttgaaaagagggcaaaagctttgccttgtatatattgatagagcagggtgatcagtttcacatacctctgtggtctcctgacatcactaaattcaggaaatcaatgatgtgcttcggctcatatcagccaggaatggcatatttccatgattacgggtctattactgtagggctttgaatccctggtggaaaacaatgtcagaatttcttgatggaaattaaccatgccataggaaaaacagcaaaactgtaaaaaaaaacgattcagaattggctacaactaccagactgaaattttgtacacactaaaattctgcaagacattcaagacataatttgatacttagggatgtgtttgtacggaattaatctattcttccaactattcaggttgttaatcaagtttcttgttttgttcattcactagtggaacagcggtagtaaatgaatttaagcttggcagtgccacttctggaaaaatattttacgttgcaaatttattcagataatggaattctgaaacatcctaaggccatgcaagtaaagcaaggaaatgaatgaagagccttataatctaaacacaaaatgagttaggatatcagaagaaggatctcaccgtcggaaaccagcacactcatcgcagtcatctcgtcaatgcagtttccagttgaagccaatgtttgtgctttttacctgcttccaacacgagtaaaccatgatctcaagattctcaagcaagtatcatacgctgcaaatgttctgatatcagagggtagaaaaacttttagggtcatattgatctattcaccaaatgggtaattttaccatccttgaaaaagtatcgggatgtaccacactttctagtataaaatttggaaacaccatgcttgatttcttcacttcatttctgccagagtaccagactgccattcatgcagacaacaattgttgaaaatatatgcaaaaacagtgcgaaagggcatgtagcctagtggttgcagtgacctgagtagcaccccaaggtcctgagttcaaatctccataggagcacatatatccagttggatgtagagtccgggtaaatatacccttctctaaaaaaaaaatgcaaaaacagcacactaccaccaaaccgcatttcattgacacggatgcctgagtagcatcgagatagtgagcacttcagcaaaacccagtaagtaactatgccatacaataataactctgtagtgaagattcctgttaagaagccaaattattgattatactcgccagtccttcagagaaaccacgccacaaacatcagaagaaagaagctcgaactaaagccaactttcatcttgcacaactgttggattcaagtctgagatgaaaacaatcagttccacgaacctgtcaggaacccattgagctacacatgggctgactcaattgctaatccatgccaaggcccaaacaaacaaaggagatgaatacaaaagggagcagcaggagaacttcaagcaacgaacagattcatcggcggcttcggccacggcggcggcggcggcggcttggttcggttgaacctcgtcgatctctatctttttcttactctctcgtgttcctcttcactgccacttctagaagcttcctctacttcttctcactcaattcctcttctattttctgagattgtatttgatagctttatccaaataatcttgtgtgcgaaagctagttttttcagttgcatttttttaacttagccattgcattttgtaatagcattggattcctggttgcatgcgctggctgaagattagcaaactcggttagtgttagttatcgtttttccgttttttcggtagtagaagagatcgagcagggatcggatcgtgggatggcacggtcagtcgttgatccggcaagatcgcgcatgtaacagactcttttgtggaggtgaataaaaggaagaaaaaccccagaaaagctgcgaagtttttcagcaccaaaactctgtttttgctctgtttttctatgttgtcgtattttcgtcagatactgttcatcgttctgaactactcagacaagctaggatagccacaatctcgcgtgtgttcagagtgttctagctaacaattggtatcagagcagtactggaacgatccggcgatgtcatacacaccgcctggccgtcgtggtggcggtggcggcggggggagcggcaacggccgcggcggcgcaagcggcagcggcggggggaatggagcagacggcgcattacttccgctcgtgtctcaggggagagacgcatcgcacaccgctcgcctcccagtcctctcgaggacaaactacccggattgggcgctcctgatgcgcgtcaacctgcaggcgcaggggctgtggacggcgatcgatcccggctacgcggagtttcgtgaagatcgggcggctctctcggcaatccttcaggcggtgccgcgtgagatgttgcgcgggctggcaaagcatgacacggcgaaggcggcgtgggacgccatcaagaccatgcgggtcggcgttgaccgtgtgcgtgaggcgaaggagaagggcttccgtcgtcaatttgagtcgatgcgattcaaggagagggagacgccggaggagtttgcgatgcggctcactgccgtcgtcgcggacattcgcgacatgggtggagtcatggaagatgaacacgtcaacaagaagctgctgcgcgttgttcccaagaagtataagccggtggctatctctctcgagcagctgctcgatgtgaagaccatggcgctggaggagctagttgggcggctgtcaacagtggattcttacagcgatgatgaggagggaagcgatggcggaaaattgtacctcacggaggaacaatggcaggcacgtgtgaagcagcgggagcaggagggctccggcaacagcggcaataagggccgcggcgcgcccggcacgcagaatcaccgaggcaagcccggtgggtcgccaaagggcaaagaggcggccactggtgcgaacagcagccgcgacatctcgagggtaaagtgcttcaattgtgatgaatttggtcactatgcaaggcagtgccgcaagccacgacgccaacgccggggagaggcgaacctggtgcaagccgccgaggaagaaccgacgttgcttatggcacatgtcgtaggggtgtcacttgctggcgaggcgacactcggacgaacacctggtggacaggaggtacacctcacggagaagaaggtgatcctggaccacgaggatggtggtgaggaggaggtgacaagagattggtttctggataccggcgccaccaaccacatgactggagtgcgttcggcgttcgccgagctcgacaccggcgttgttgggacggtgaagtttggcgacggctctgtgattgaaatccaggggcgcgggaccgtggtgttccgatgcaagaatagtgatcatcggtctctcgacacggtgtactacatcccgaagctgcgcaagaacatcatcagtgtcggccgtctcgacgcgcgcggctacgacgcacatatctggggcggggtctgcacactccgtgatcccgatggtcttctcctcgcaaaggtaaaacgagacataaattatctctatatactcaagctgcatattgcaaatccagtctgcatggcggcgagcggtggcgacatggcatggcggtggcatgcgcgtttcggacacttgaacttccagtcgctccggaggctggcccaggggaacatggtccgcgggcttccgatcattgatcacactgatcaactgtgcgacggttgtctcgcgggcaagcaacgacgactcccgttcccggaggaggccaagtttagagcacaggaggcgctcgaactggtgcacggcgacttgtgtgggccgatcacgcctgcgaccccaggcggcaggaagtatttcctgctcctcgtcgacgatatgagccggcatatgtggatacggctcctctccggcaagcatgaagcggcgacggcgatcaagcagttccaagtcggcgttgagctggagtccgggcgaaagctgcgggctctgaggacagatcgtgggggggaatttacctccgtggagttcatggactactgcgccgatcatgggatgaggcgagagctcactgctccttactcccctcagcagaacggagtcgtggagcggcggaatcagaccgtggttgcggcggcgcgctccatgcttaaggcggctgggatgccggcgtgcttctggggggaggcggttgtggcggcggtgtatgtgctgaaccggtcgccgacgaaggcattgaatggcgtgaccccccatgaggcgtggcatgggcgacgtccctcggtcgaacacttgagggtgtttggctgtgtaggctacgtcaagacggtgaagccgaacctgcgcaagctcgacgatcgaggtacgaggatggtgtttattggctatgaacaggggtcgaaggcgtatcgcatgtatgaccctgtggcgcggcgcgtttgcgtgtcgcgtgatgtcgtcttcgacgaggcggcgacatgggcgtggcgtgatcctgagacagaggcgactgaagaggaggaattcacggtggatttctttgtgaatcccgtggactctgttgttgccgacttgggcgaacaggctagcacgcctgtgcagggaggcacgtacccggcgtcgacggccactccgccctcaccaccggaagtgccggcgggggtggagttttgctcaccaccaaactctgtcacgccagggacaaatgaaggccctatcaggtatcgccgagtgcaggatatcctatctgctactgaacctgtccttgattttgattatagcgaccaatgcttgctggcaagtgaggaaccaatgagtcttgcagaagctgaacaacagttgtgttggaggcaggcaatgcaagaggagctaaagtccattgaagacaatcagacttggagctttgctgagctccctgttggacataaagcaattgggttaaagtgggtctataaggtgaaaaaggatccatcaggagttgtggtgaaacacaaagcaaggttggtagcaaagggatatgtgcaacaacaaggaattgattttgaggaagtgtttgccccagtggctagaatggaaactgtgaggctcctgattgcagtagctgcaaacaaaggatgggagattcatcacatggatgtgaagtctgctttcctgaatggtgatttggaagaggaagtttatgttgtgcagccacctggttttattgagaaaggaaaagaaggccaggtgttgaggctcaagaaagctttgtatgggctaaagcaggctccccgagcatggaatgcaaaactgcacaacactttgatttctctgaatttcatcaagtctgaaactgagagtgcagtgtatgtgagaggaacaggaagctcaaggttgatagtgggagtgtatgtggatgatctgattatcagtggggctcaagcaagtgaaattgattttttcaaggaggagatgaagaagaaatttcgcatgagtgacttaggtctgctgagttactatctgggaatggaggttgtccaaaaggatgatggagtgtttctgtcacaaactgcttatgcagcaaaaatcctagaaaagacaggaatggaaggctgcaattctactcaagttcccatggaagctaggttgaaactgaagagggagagtggaggggaaggagttgattcaaccatgtatagaagcactgtgggaagtctcaggtatttggtgaacacaaggccagatcttgcttactctgtcgggtatgtgagcagatttatggagaaaccaacttctgaacattgggcagcagtgaagcatattctgagatacattgcaggtactcttgatgttggctgctggtttgggagaagggaaaagggtgaactcagattgattgggttcagtgacagtgatatggctggggatttggatgataggaagagcaccacaggtgtactgtatatgctgggagacagtttgatcagctggcaatctcagaaacaaaaggtggtagctttgtcgtcatgtgaagctgagtatattgctgctactactggtgcttgtcaagggatttggctcaataggctattggcagaattacttggagaggaccctggccaaactgtgatgaaagttgataacaaatcagcaatcaatctctgcaagaatccggtactccatgatcgaagtaagcacattgacactcgatttcattttatcagggagtgtgtggagaagaagcaaatcgctgtggagtatgtgcgaacagaagatcagcttgcagatatactgactaagcctgttggacgagttcggtttcttgaactccggaagaagatgggtttggagcaggcacatcaagattaggggggaaattgatagctttatccaaataatcttgtgtgcgaaagctagttttttcagttgcatttttttaacttagccattgcattttgtaatagcattggattcctggttgcatgcgctggctgaagattagcaaactcggttagtgttagttatcgtttttccgttttttcggtagtagaagagatcgagcagggatcggatcgtgggatggcacggtcagtcgttgatccggcaagatcgcgcatgtaacagactcttttgtggaggtgaataaaaggaagaaaaaccccagaaaagctgcgaagtttttcagcaccaaaactctgtttttgctctgtttttctatgttgtcgtattttcgtcagatactgttcatcgttctgaactactcagacaagctaggatagccacaatctcgcgtgtgttcagagtgttctagctaacagtattgaactctattgttcttgagaattctgagtttggaggaagagggttgttaacaatctggtatcagagctgttcggttcgctggggattcttgtcatggaggtgttggggaggcagccatgcaagagggaggaggaattcggttggggaattgttcatccgagtagcgcccaccaactgttcgatgaaatgtcgagcccattcgaagtgtacgaggaagatactatccttgtcatgaaggaggagaaagtatccagggatgaagcactaaggttgttacttgaggaatggatggatgccaagcgtaaattagaggagaagctcaaccgggtcttggagaagtttgaagagatggaagctcacaatggcgcagaagatgcaactgtcatcatcaaggcagccacaaccgacctcagggaggcatcatctccaacacccaagacatcgctatctccagtgtgcttcaatgaaaacagcatgcatgcggcaacgagctcaagccacaacatcgagctgactgccttgacggttgccaagtgcttgaaggggtgctctaatcatggagttggagctggtagcttgatgcccacaaggtgcccgacgaattgctcaagtcccggcgtcatacccgaccacaccatggctacggtggttgcatgtgccaccacttctatggcgttcatggagttggttgttggagaggaggcaacctgtgacacctataccgggaccactaattgtcctgaggtgacacacaccaagtgttcgacattgggccttgacgtcaagggtgacaccgaccaagtcatggtcgcattcctggcccagccttgtgtgttccttctcaacatggacaacacaggtaccaaactagtaaacatggtagaggtgactagtctacagacttgggcacctccctgtcgagtcatatgcaagggttccctggttaagaagcatccagcaacttggttagagtttgagtggaaacaacatgatgtgcaacagatacaaccatggccaccgccacagtggctagaaacttggttattccttagttgtttttcagatgtagcgccacatgattcagtgagcccattcatcattgacataataccttatgcactagatgatagggaagaaatgctcaggagatcaattgagctgaggccctgtacacatccacagtatttggggaaggggaaatattgggcaggaacagctatgtcctatggaggcaatcacctgttagcagtcaaaaggttattggcaaggttcaaggaagatttctctatggttcctagttggatgagctggaattatgtgagaagaatattgtggtctccgggctgttctctgctttctgctagagaactttggaagtgtttacagttattttgtggtaaaggagaattgttggatggtgagagttttatgcagcgaaggagatcgaacatgacatcctatgaggtttgctgggaaaggaaatttatatcaaaaacatatagtgattcttctcagaattggttcgagttgtatacttcgctctcatcggaattatggcataagcccactggctataaactgatgcaatcagaagctacttctggtgcaacatatttaattagtgcggattggactataacagagagctgcaaattatcatacaaaataacacttgaagatggtgaagtagatgtgtactggttgaatactaaggaccaagaattctcgtatgaacaattgatattccacaaagaggagcttgctacagtttgggtttatcaaagtactagttttatcaaaagtaagggcagtggcagggttgtcaccattgcagcaagtacctcatttaccaactctataccagtgccactagctagtcatgtttggaaggaattttcttggacactacattattggaatgatgggtctgtgtggaaattatggttctgttatatggtctttctgatcagtgtcaaacaagctgcggtgcctatggatatcttggatggaaacttggaagaatctgatccagcaagattaaagatgtggcctgatcatccaaaatatgttcagaggccgtgtgtaaatcaaagggatgaattgcgtcttagtgcacctgatctacaaatatcatgggatcctggtggtttatgtttactcaagtttctagctatctcttctcttggacaagtcacatttcagtcagtcaaattctcatttcaagacagttcttctctctttcacatgcgaagtgccaggatttgcttgagctgttcttttgagacgcaagttttctgttggcaagctgaaaacaaattggacattgatgaagcttttggaacgatgcaagaatactggagaaatcaaagtggaggtttgccatttctgcaatttacttgtcatcgacttgtggacaagtcgaatttcaaggagaggagattgtcaggaacccattgagctacacatgggctgactcaattgctaatccatgccaaggcccaaacaaacaaaggagatgaatacaaaaggcagtagcaggagaacttcaagcaacgaacagattcatcgacggcttcggccacggcggcggcggcggcggcttggttcggttgaacctcgtcgatctctatctttttcttactctctcgtgttcctcttcactgccacttctagaagcttcctctacttcttctcactcaattcctcttctattttctgagattgtattgaactctattgttcttgagaattctgagtttggaggaagagggttgttaacagaacctttatggtcggctggcattgctggctcactgacagccaggaattgcatatttccatgatttggggtcccttagcgtaggatgtttaggctctgcaataggaaaataataccttagtttcacaatcgaaattaactgtacccaggggaaaaaaaaggaaattctgtcctattcaattttaaacagaggggctggtgattgaattttcgagtgcgtacactgcaacatatagatctgtaatatgtagggaaaagcaaaaacgaaaaagaagaaaaaagcaatggagaggtaccttcatcaggatctcttgcacgagcatctcacaggtctcttctcacaaggctatccaaccgtggccgaatgtgtttatatagcggcttcgtattcaaagctgggcaatatcggattgtgatactcgaaagagatgagtaactccccagaccacatggtaaggatgctagacgtttgcagctcacaagattgagggtttctactgatggcagatctcccaaacgattcagtgactccagtttattgcagctgtcaatggatatatactcgagtgcatgtatacagctgccgttagacggaatgaagctcgggacatgaataaatgtttagcctcttgagagatgatggtaggttctcaagtgctaccattttaggacatacccagacatctagtctttctaggcatggcagaggatggtctgctgctgatggcgattgctctggcaggcttgtgcacgcacgataattgcaatgctttgatgatgtaaatgtgttgtgatgatctacctgtacactctcggacactatatcccccttcccccatatgaactcaagtttagagcaaggtgtgcttctatgctccttagaaaaaagttgcacgaaaaccaaagctcatcaatggctgagattaaaagcgaattaacagtgtaatcatcattagtgagggggtatttttgtccatataatttggagcccagtctaactccaccgtaaccacgcgcaccgcccgcttttcactcgcgtcgccgccactgctccgccctcttcctcccccgcaccgccgcctagacccagcacccatggatacgtgcggcgcgggggaaccagagtaggcggtcggccggcgccgttgtggggaacgggtgatgccgatgccgatggagcactgccgcctcgctccatctaatccggttagccccgcccctgatgacctcccggccgtcgccactatttgcgcaacaagattcgccttgagcgcgaggagccgaggactacggtaacgtggacgtcgagcacgccgccgtgccagcagctgtcaagcggccctagcaacagctgaagcagcagctttttcggcgccatgatttacccctcatccaaggccaagttgccattccagcttgtgccttttggcttgtttgatctctgtctgcactgcaatcgccagtttgctgcaagtttgatgtgatcatgtgaattgtgatcgtggatatattggtggtgactggtgagctgtataaatgaatgggggaggcagaatggcacgcagatgcttgtttatgagtatgttcccaatagaagcgcctatacacatttacatggcgattcctcatgtgttctcataacattcttttcatggaagaagaggacggagaggcggcactgcttgcaggaggaagccgggtggcgctagactgagcggcgccggggccgggaagcggtgaggcgaggggaaaaaaaggcggagcgccggggccgggaagtgacgaggcgaggggaagaagagggcggcgctgcttaccggacggcgtggcgatggaagcgctggcatgcttccgcggctgaggagcggcgctgcccgaggagagagcgtcacggtcgcggagtaaccggcctagtggtggggatcgcttcaaagttaatcctatggacaaaaatacccctcgctaataaggattaagtgttaatcatgttttaatctcagccaccggtgaactttgattttcgtgcgcttttttatttaggagcatagaagcacatctctgattataaacatatgtgagagatggggggagaacgaagagctctctcaagctatcacaattggaaatttcaagtgaggttagacgtggcaggagctgatcccttgcacagcaaggtggctctcctttcaccagcgtgggacgccctattagcttatcacatccctcaatgcccaatgtcttcaaggatactaagcacaggaactcttcctctggccagtagatgagcacaccacagaaccagatttccaaacacacaagttgtctaaggcatttccaaaacatgattattggttgtgatgggctcgtggggaagaaaaagttgcagtgctttaagtccagttctgagagagatgattcgtgaatctgatcaagctgcactcttccttctttgtcatccacgtccagtattagcttggatttttttagataatggaagcttttattaaactcagtcaattacatcaaggtgatacaattatcctgagaacacttccggcctctgcataactaagatgcacaccgccgaacaaacaaaacgacactcgaaaggaaaaaagaatgacatggagtattgaggaccatcaatctaacgactaaattgccactcatgaacaactccttggccatctcctccaaaagcacagagttttaaggaccaccaattctaagactagatcaccacccatatccctgggtaaaaaactccttgaccaccttctccaaatgttgacatgccgcaactaccatatcccgcgaatcaggcttctgtaggatagcccatatacgaagccaatggataagagaatatataacctgcaaatgtgaagatatgacttttttatcaaaaaccacattattcctgtatagccaaagcgaccaacaagtagcagctgctcctaacagaacatgtgatttcaaattattatgaattccatcaagccagctcccaaacatatgcgctacacaatgtggtggaggaagtccagatgctgcttggatgatggaccaaacagaaagggcaaaacggcattcgaagaaaagatgtctaattgtctcgtcattgcaacaaaaacaacaattcttattgccttgccatttcctttttatcaaattgtccttcgttaacaccactccacggcttggataatgaggacatgtaactggcttggataatgaggacatgtaactggattgaagtaaaaacaaggacagttcggccttgttttcatttagactgaaaatcttgagctttggtgcttcgggtagactcctcagttttggacagttcctgatgtcagccttttcaagcagaggaaatgttgattcgttttccactagtctctctaagccctctaaatcatataacttgattttctttaatgctggaaatggtgtgaaagccatttcacagcatagtgtttgcagttttggacatttctctatttcaaccttctcaagcagaggaaacactggttcattttcttgtcttcctcctgttgctacccatctctctaaagcttccaaatcgtgcaacttaatcttctttaatgaaggaaatgttacggatgccatgtcagggattagtgttagaaactttggacagctcttgataacaacgttctgaagaagatgaaatgtttgttcttttccttgtctaacttccttgcaacatagggtttgcaatttatcaagtctgatcaaacagagaacttgaagagacttaaattgaatgaattgaggaaattcttcgcacattgtacaaccctctaatttgagctccaccaagttttgcagtatacttagatctgtcatccatgctggaaaaatgagtgcttttataggaaattacgttgagcatcagcagcccatgatgtggtttaagagcatcaagaaccttcccattgcaatttggttcttcaacacagcattcactattccacacaagagataggcgtgcaagtttctctttgtttctaagattggctgcttttgcatcttcttgagatacattttctaagccacgtaactctagttcaccacagaggtttaagctgtgcagttctctaagggtgctgcaaccagagctagcaccaaccacaaaatatgttagtgtccggatggaagttaattgcccaagctctggaggcatgcacttcaatcttaagcatccatttgtatagaggtgacgtagacttgtcatatacttcatatcctttgggagaccaacaagaattttgcaatcagaaaggatcaaagtctgcagattgtacagtgtgcatatatcttcaggaagtactttgacatgatagtttctggagatatcgagatatcttaggtgcagaaggtgccttggcctgattggtaatgattctgtattgagatatctcagccttagtgctcgtagagaactgctcttggataaaagtgatgttgagatgtgaatatagtctctgtcaaacaataaagtccggagtgttgaagattgttttctcataaagtcatctaagagaatagtattgtcatcgtctaatgagtagaagtgatacctaggatgctctaatgacttacttctataatcagatctgccaactatgctgacacattcttctcccatagcagattgagcaatgtcatgcataagatcatgtatcttgcatgtagtttgtagaggaaatttctgcacatcttgaaaaaatgacctccaaactagctcgttgaagatatgtttggccaccatttctatattgtcatcctcttgtaatggtatcaagtcatgtgctaaccataagttaatcaaagtctccatatcaatctcaaaatcttttgggaatatagcacagaaggcaaaacaccgctttatatgtaacggtaggtcatcatagctcagacgaagtataggaaaaattatgtcctccccctcattgcaaatgttgctcttggctaatatatccttccattcttgcagagtagtcctgttaaataacaccgagccaaaggattgggcagctaaaggagagccatcgcatctctgcacaatcttacgaagaacttcaaaatgctcgtcacttttttttgacaaactaaatgctttactctggattatttccatcaaataagcttctccgagcttttcaagattatgcactggaacttctccaataaccataattctagcaacttctgcatttcgagttgttgttagtactacactacccatgccacccttcttaaagcaggtctttagctttccccacttatcagaatctcgattccatacatgatccaacacaatgagatacttctttccacctacttctttctgcaagtcctgcaaagccttctcacgatctctctctgtgctcatacatatgctgtttgcaatggtgacaacatcaaacacatctgacacacaacaccacctacgaagcgggaaatacttctcaatttcagggtcattgtaaatgagttgtgcaaatgtagtctttcctagcccacccattccgacaataggaagaactatgaggtccttgcctcttgcttcatcaagcaacatcttgataatcttcttctgctcctcatctctagatcggctaataatacccttctcagtatcaaccatgatggaatcagtttgcctccactgctttggtgtttcctgctgctgttttatgagtccagagtagtccatctctgatatacaatcttttgcaatttcttacccatcctataacgaaacacaattgggttacgatgagggaagaggcttacaatgcctttgccaagggtagcgtcgtgccccttcttcttggcttcacgtcggagcgcctcatacttgaactcgtcaaagacatcgattgcctcgtaggacaccttcttgagttcatcgagccaagcgcttagttcgggtttcttacttctcttctcctccgtatcttggatgacgctaaggataagtggaagcatgcgctccagagccttacgctgctgctccatgccttccatcaccttgtactggtatacaaggtagctggaagctttgttcgtcaccgcggagagcagtggcctaaccaaaaactcagccatcgttggttccctctaacactgtagacctgaagattgtggaatgaagaagatgaaggcaaatacaactaaaatgatatgcaggaagatgaagccagatctcctaacctcgtcgaccaagatgtttgtggatcggagcagcgcagtcgccggtgcggcacaggggaggcgctggatgagtcacgaaggttgggtggtgttctccttctctcggtatgtagctcgcattggactgacagacgatggaggatggtggattgctgctgcacactgagagacgacttatggttgtgtggctgggtagtgctggagaaagagatgatatgtgagagatcactttgctgggttgttttaggcaaggaaaaaggtactaatgcacaattgaaatgatatggttgtgtgcactgcattaattgtgtcttcatctggttggtgaggatgacatctcgataactaatttttggtcaccaaggttttcacatgcatgcgtcctggtatttttgcttcattcatgtgccatctactttttgcacattgtttgtgacagtcagttattttacgctgggggtgaaattgtggtgaatggttttcagttgctgaaatgtttttttctttatggacctctattactttttcagctatttgtttatttaaaatttaaataaactaggcgattgtcccctgtaaatcgtgcggtcctagattttaggcccgatttagtcctcaaaattttttcccaaatacatcatatcgaatctttggacatatgtatggagcattaaatatagataaaaataaaaactatttacgcagttaggggagaattgcgagacgaatcttttaagcctaattagtccatgaatagccataagtgctatagtaacccacatgtactaatggcggattaattaggctcaaaagattcatcttgcggtttccaggcgagttataaaattagttttttcattcatgtccgaaaactccttccgacatcagtcatacgtccgatgtgacacccaaaaattttttttcacgaactaaacaagggctgagtttagatccaaagtttttttccaacttccaacttttccatcacatcaaaactttcctacacacataaacttccaatttttccgtcacatcgtcccaatttcaaccaaacttccaattttggtgtgaactaaacacacccaaggccttaaaagtaaaactagtctatatacaacacttcaattataagagcttgtttagttggtgaaatgataatttttggatgttacatcggatgtttgaccgaatgttggaaggggttttcggacaagaatgaaaaaactaatttcaccgctcgcctggaaaccgcgtgacgaatcttttgagactaattaattcatcattagcacatgtgggttactgtagcacttatggctaatcatggactaattaggctcaaaagattcgtctcgcgatttccgtcataactgtgcaattagtttttttcatctatatttaatgctctatgcatgtgtccaaatattcaatgtgatgtttttgagaaaaaaaatttgggaactaaaccgggcctaaacttgaatgtttgattggagacagcaatgtaaatgtcagtcgtgtccattaattggagtagagtgatggcagagtttagggcaagcaccattcaaccagtactcagaatactctctccgtcccataaaaaatcaacctaggtgagaatgggacatcatctaaaataacgaatctggataggaggttgattttttatgggacgaagggagtgttaggatacgataggcaaataaacgatgaagaacaatagatcaatcacagaagacacgaggttttaacatggaaaaccctcctaagatatgatagaaaaaaaaaacacgagcgccagccagcaaaactgcactatatcagatgaggttacaaaacgcccaacggctgcttcgctctggcccaagcctctagcgatgggcctccacttcgctcagtccgaaattggcctttatatatatgtgtgtgcaaatgaatttggatcacaaataaacagggagtacttgccaacttaggccatttacagtgcaaggacgtgacgtgtggcaatgtagagccacgtaggcaaatcgcttgcgtggaggagagaggggagtggggaccattcccaacctagcttcgcgtgaccaagtttggccacacgaacctcagcaacttttgtcaaaaaaaaaaagcacctccacgagaaataagaaagcgagagagggagagaaaggaggctcgccggagtaggcgcacttggggcgtggggctcggcggaggcttgccgaagtaggggtgcttggggagctcgccgtcactgcgtggggctcagggaagccaccgctgcgtggggctcgccggagtagggccgctcgaggagcctcccgagatccaccgccgtctttcgggtggagctcccgaagctcgccaccccctcgcgcgccggtggcgttggcggggtccgcgtgcggctgcgcagctccagtgctgcgcctccaccgtcgacgacggtgtcgtctccgccgccgtcttccgccgcaccgctggacgccgccggagctgctgcttgttgccgcgtgggctgctccacctggttggaggaagagaggtggcgtcgcgcttgggccggcccgccgccgagctttgctgcgccggtcggagcacaccgccatggcctccctagagaagacacgagaggattaggtgggggtgggggaggggtgagattttttatattatctgtgggtcctattataaagtttctaaaccacactagcttgccacacttgaattgtggatgtagtgtcttttggagttcccagacctacgtggcagttgtggcatagcaatatgctaggacgcattgctactgcccttagagcaggtacaatagcagagtataagcaagctgcaaacatattttaagagataaatgaggagagagaagggcagcgggctacagatttgtagccagctgtagtacggactccaaggcagtgtgtgtatgacaggtgggaccagatattaatagcatagtatgtaactattgtatgaataagctattagattggctatagatgaattgtagctagtagttggctatactattaaacttgctcttagagtaccttgttgtatgtaaggtggcgcggcctccgatgctgaattattgcaaaccagaagttcaccagcaaagcgacatggagcgctgacccaccaagcccagcaaacagcagcatgcaaatggctgatgcacaggaatgcacgctgatggcagagaagttagaaatccgatggagctctggttcttaatctacttcctctatcccatataaagaagcaactcctaacattctaatataaaattaaaggagagaataaaagaccaaaatatcccatcgtcctattctaagatgctgaagccgatagtgattttaagccgatgatgactatagggcttaccgaattttgatgttaacaggtgtgcagatggctgatccgcgcacccacttataaatcaagataaacaagtttgcagctttagcttataagttaattttatggattagctccttacacccttaaatacagtagagccgatgtgagtctggatcctgcaagtggaagggaaggcggggcgagtcgccgggcgttgtgtttggctggccgtacgtccccttcgactgagcttggcaggctgcctggctgtcctgcccggttggggtggttgtctttgcatgactggccggctgggtccccggccttcttagctggttgagcacttgagctacggctagggttgggcccactaaaaacaatcactaactgcctgccaacttggagccatgctgtgatccaacttgttgtacagaacctcatgcattattgcaggtggtggcctcctgcattattgcagacggaacacatcatcacgacatctcactcaatttctagtgatattttttcagtcatttatttccagaccaccaagaacaaactaaagcacacatcgatcagtagccatggatatcgtggtgagcgtctcacatggggcactgggaccactgctgggcaagctcaataccttgctcgtagacgagtgcgcacgcctgaaaggtgtccaccgtgagatacgctctcttagatcggagttgagcaacatgcatgcggcgctccacaagtacacatcactcgaggatcctgacatccaggtgaagacctggacaagcgagttgagggagcttgcctatgacatcgaggactgcatagacaagttcatgcaccaacttggtgccaacgacgaccagcaccacactagtaatggcgtcaaggacttcttcgggaagagtgcaaaacgtctcaaaactcttggctcaaggcataatattgctgccgagattgaagaactgaagatgcgagttatctcggtgagagatcaaaagaacaactacaagcttgatgatattttttgtagtagctctagcaacactaatgcttttgttgatccacggttggctgctctcttcgcggaagagaaccatcttgtcggtatagatagtccaagggatgaacttgtcaattggttggatgcagacagcaggttgataaagcatcgcaaggttgataaagcaggtcaattgtggggtttggaggtcttggaaagacaactctagcaaatgaggtatatcgtagggttaaaatccattttgattgccctgcttttacgtcggtatcacaaaagcctgatatgaagaaaatcttcaaggatattatataccatatgcctacaaaagatgcattcctcaaagatattgacacatggaatgaaaagaaatttattgaaaagctaagagaactacttgtggataagaggtaattctctagctcctttttcttttccacttcgagaaattctttatacctacattcgtgatataatagagtggttttttcctacacaaacttatattgtttataaacttcaactaggtatcttgttataattgatgatgtctggtctatttcggcatggaaagctatcagtgttgttttcccggagaatggttctagtataattatagttactacacgcatttccgatgttggacggtcatgctgcttaaatggaattgaccgcaattttgagatggaacctctaagtgaaattcactctagaagactattttgccagagaattttcagcacagatgaggatggctgcccagatattttacaagaagtttcaacagatatcttgaagaaatgtgggggtattccattagcaattattagtatatctggtttgttatcaaacagaccaattatcaaggaagagtgggagaaagtgaaagaatcgattggttttgtattggacaagaaccaaaatctagaaggaatgaaaagcatactctcccttagctacaatgaccttccaaactattttaaggcatgtttgatatatttgtgcatatttccagaggattatattattgaaacaaacatgctattacggcgatggatagctgaaggctttgtctctgaggattgtggaatgaacttggaagatgttgcagagagctacttttgtgagctggtcaacagaagcctggtccaacctgtggacattcgctttgacagtaaggcccgtgcatgccgcgtccatgatataatgcttgaacttatcacttcaaaggcgacagaagaaaactttattacattgttacgtggccaaacaaggaaaacaaatttgcatggctacgttcgtcgattatccatccaggacactgataatgatttgtcaagtctgttagtaaacaaagatttaagccatgttcgatctctaacctgctttggtgggaacatgaatcttttgccacagcttgcccgatttgaggctatacgagtgttggagtttgaaggctctatgaatttggagcagtatgatttggaaaatacagacaagctattccaactcaagtacttaagccttcgtggttcagacatatcacacataccaagacaaattgcaaagctccaaaatttgctgacattggacataagtgaaacattcgtagaagagctgcccaccgaattatgcctgttgaaaaagttactacatctattcggaaattccttgaagctaccagatgggattgggaatatgaggaatctacaggtgctgacaggcattaatataagtaatagctcagcaagtacagtgcccgagcttggtgaactaaccagtttgagggacctcaaaataagtttgtctgataaactcagcaagtgcaagacaaaagaagagatgttactcgcctcactttgtaaactaagcagctacaaactccaatcgttgcatattatatataacagttccgatgatctcttagaacgttggttccctatcccttgtttcctccgattgtttcgcatgagcactaatcactttctcccacaacttccaaagtggattaaaccgagtctcaccaaaatggcatacctgaacatcaatttacgtgagataaaggaggaagatatggaaacacttggagacctgccagccttactctgtctagaaatatggctagaacctaacccaaaaaaacagcttacagtccaaagcacaggattcccatgtctcaaggagtttctccttgtttgcggcgatcacgatggtggagcgtacctaacatttgggaaaggggctatgccaaagctggagaagcttgagattccatttcacgtattaatggcaaaatcccatggtttctattttggcatcaacaatctcctgcgtctgaaagaagttttttgaaaattcaccgggggggagagcttccccacctgaatatattacttcgaaccatcttatatagaagagatacatgagagtttccaagcacaggagcccttgaggataacatgagagaaagcactgagagatatagagaagagaatacaaaagattaagagacagaaggagaagctttgacattttccacctacaagatcaccaggccaagatcaaaatcacttacgctaggccctatctcaaccacatccgcttcacacgcaaattttgaaacaccataagacaatagagccagggggccatttctgccacaagcatgtcaactcgagttccggcgatcaaaaggctgtgattgtccaggaccacccgcattagccataaaaaaacacgacttcatcatgttgctgcttgcatcaatgcctgccggcgccctttagggaaaggaagccccaaaggagggagggccactgaagattacggtcatgggccatccgcatcaagacgtcttcaatatggatttaacaaagtgctagcaagttcaacagcctccaacgcccttcgggggaaagaagcccctaaggggggagggctgctaaacaatgtggccaagacaaccaggtaaaagggtatagcggagcaaggaggtagacagaagagataatgaagaggtggagatctcacaggtaggaggaacatcaacagcactggcagagagatgcaaagatctgaggccatcacagccaatggagaagcacaatcaagaagagatagacccaaactatcaaacaaggagcaggttaatattgaggggattcaggtaagggagtcggcaccaacaaactcctagataacagatcaggccaaattggtcgtggcaggcttaactccaaccatggggcacgacagaaaaggcacaaagcggacaacagaagaaaaggggagaaggagtggatggaataggggagaaggatgggaaagcagggggactggttgcagggtttctccaaaaatgatgccttcaagaaggtgacgacgtcggaaaggacgccaccatcacataaacaggagactggaaagggttttcacccagcaaggaggaacaagggtgttacgacgacacctctagggaggggcatgatgtccgaggatgttcatcgccgtcagtccggcgatgagtcggacagagcttttcacccaacaccctaaaaccatcctcactaccagctagcacacaccgcgcaacccaacagccatgcgcggtggaactggtcccaggtcgtcggccgctaactagcccggcaggtcccaccgccgccaacctgcacaaccgacagcaccccacaaaccgcaagtcccactcccgacagatctagacgaaacccttgaacgggaaaaatggccacaacagccttccctaattccaccaccagcacaatcagggaaggggggcatcagcggcttgaaaacccagattcggaatgagaacattgaagaacaacaaatgaggagggaggctaggagaaagacgggagggtgggaaggaggtagaggagggtgggggcgccgccagcggcaaaggggggcggtgccgccgtcggcgaggtggtcggtggtggggtctcgggggtttggggctatcgcctcccgggccgcccgagcgagcgacacgggagtcctaggtccaggtaccgcttgcgtctgaaagaagtgaacgtaataatctaccgttaggggactgtacgttctgataccgagtctgcggtggctgcaatcaagagagaagcaagtgcaaatcccaaccatcctagacttgccatcttcggagcagatgcagaagaggtccaagaggataatagcgaagagagtgattataactggggttcagaggatgacgatgctactgacacctgatattgttgccagccatgatctttctggcaacccatgaaagaggtaaatagaattctctctaagtagcaagctagttgtggttgttacttttactatcttattttgtttcactcgatctgtaagaaatttgtgcactccatttctttcaggtttgcttcaattgcatgtcgtcaagtttgaaactggagtccacgttaagtccgtgcaaagtgggaagcataaattatatgtgtgcttcacattattgttgttgtcgacattttgtcttatcaaaacatgatcctgcatgttgtactttctaaataatgtagcaacttcgggctgcttggattgttataattttatttgaattttttatggattctagagtattaacatggtcagctttttttttcatccttgaaaagatatgacaatgtacgattttataccgtgaaaattgatcatctgcctgacagttcagtagcagttgatcgcgtttcaaaggcatatgtaaggcaaatgaacatttaccactcagctaagggccaaatgatcttaaagattacctattatcggtcaaatttagaaattctttgattgctattgtaaatctttagaagtctaatgtgacaacgagacttaggccctcttcgattaggcttagatttattggcttagacttttaagttaacttattggcttatatgatttataagccggtggatttaatgtcctaagtttaatagtggagtcatacatctacctcacataagccaaaatagcttctccaacttagcttttggcttaatagtgttagagtggcttatagctttagaaaagccaaacgaaaaggccgcttatttgtttaggcttagactttttgacttacaagttggtttataagccgaaacaaaagggccttacccaccacatttgattcaacgcggagctgcagggggaaggggaccaattgcaaggcctcgtctatagtctctgtggggctcaccagccaagcggttgaacgccctcctccagtgcaactcatctatttgtacaattgtgaatgtcacacagaaagatgatgacagtcgagagtaagacggtatagttgtgttaaatagtcctacattggttgtgaaagagcaaatgacttaatatataaatggaagagcccataaccttattggctagtttttggggtgggaaatgccctttatgattctacacgttgtcctcgcaaccattcggtcgaacaccgaaaatgcagtttttttttccttctcataatctctatacaacttttgcatcaaatgatttctcatacgatcactcaagctaatttacataaatgaaaatgagccgagtaataggagacacgaccaatgcaactcgcccagtatgcagccaattaatgtgaatgtatttgtggaacatcatgttaattagctttagcttcatggctggccactggtcagcggagcagaggaaatcagagcatcgcaggtgcaagatgaattacgctgagcaaagcagagcacttcaggtgactttctggtgctccaaatatttttattttttgggatagaggataaatgtgaggacaatagaggtgttattgaagataaaatggcagctgtcagacggattctgtactaaattgaaatataaaacacataagttcaataattgtactccctcggtctaaattgtagcaacccatgaagctcaataatttaaatcaaaccgagacttaaccaatttaggtaatgatccaatggaaatgcaattacccaaggcttcttttgaccaaacaatattcagaaacaatattacagcctcacgttcaccaatgtatccagtgatgttgcgagggtagggaaggtcatactgctgacgatgtgaaactcattctgttgggacggaataagcgtatcttccaaaaaaatcccacaacggttgatagggtggccaccctaattcttcaagatattgatcaaagactcttggctttccaacctccttgatgctttttttcgtttttgtgtttttgttgttttcttgtctgtaaataacttttatttcgtctaatatattccggcagtccttctgccgtcgttcccctaaaaaaaaaaaagaatcagggtcatacaagacagccagaaaaaaagggaaacagaaaattgtaccagataactacatgaatactaatactacagactgcagagtgtagacatggtttatttcttcagaagacacttcatatgagcaagaaaaaccacaagtagagcatcacctactgtgtacattaaggtcagatttttgtagagcgtgagatcttcaagctgcttgatccaatttacattacccaagataagtggagatcatgtttagaaagataactaatatattatattctcagtcacttatgcaccaatcgtgtatctggaagtcgtccagccagacgcaccaatcgtacttcacctgtagaaagcagcagcaaccaaatttgacgtttcagctactaaaacctataaattgagaatgcacgagtcaatctcacaaaccttccaggtaaatctcctataatcaggtcaggacatcaatcatcctggttgtaccaatatccaccacatccaggaatagcatatttccaagaccatggatccctcaataatggccctaaatgtataacagagagtcagaattcctcgatgttaatctgtgataaataagagagagagaattcctctatataaacaaacttcaaacatgtaaatcaggtgagcacttactaaaagaattaatagactagagggtaacctgcaaatggaagtttcaactttcaaggttatgagaacaggtgactacaatccgaaagtgaagattataataagtcgtgcattttcatatatatgggcaaaaggaagaaactagtatcaaaaccacatgcatgcatgccatatatgtagaactaagactggaaagctttaaaacaataacagagtaggtgtagtagtgattaaaatttgagtttctcaacaggcaaaaagtacagcaaggtagtactactatcaagggaaggttgatcgaaagggaccttcttcaggatttcttgaatgaacatctgataactctctgatctcaagactatcaatccgctgcccgaggcgttcatacagaggcttcacatttatagctgggcagtatttaatcgtaatatcttgaagaagtgggtaacgaccatggcaccctgctactgattgcaagcgtctgcatccctcaagacggaggattcgtagtgacggaagatctcccaaacaatccaatgactccagtttattacagtgatcaataattaagcgcttgagtgcatccagctgtcctgagacggaacaaagcttctcacagccaaatattagtagcttcttgagggaatgattcagcgcgtctagttgaacagaatgaaggttgtcacactgaccaattcccagcgacttgactgtcggtggtagatggttaagtgttaccaatctatgacacctacctatggttagactctctaaacatggcagagaattatttcttagtgatggagattgctgatctggaacaattgtggaagcaaggtcattgcagtgttccgacctgcgttccacctgtattacactctctgactctgtcttatcctctctccacattagctgaagatttctgcaatcatgaatagaaatagatgtgagagatggtggaagtctaaagatctcttccaagcttttacattgccttattgatagtgacgttagatacggtaacaactgatcgcttggaactcgagttgactccccactcacatgtctgtggcctattaggttattacatttttcaatggccaaattcttcaaggaaaccaagcatatgaactcttcctctggccagtacacaagcacatcacaagattcaattttcaaatccacaagttgtccaaaccatttccatatcccaactgttggacgggatgggcctaaggggaagaagaaggcgcagccacataactccatttccgaaagaggtgcttcataattctgatcaagctccagtcctgcatttccgtcactgacagacagtgttagctttgataatgaagaaaatctagacctcagaattaataaggatagctctgccttttcttcaactagcttcaatatccgaagctttggtgcttttggaagggatttcaacattggacagttcattatactagcactctcaagcaggggaaatgtcacttcttctccttccgtcgccgaccatctctccaacctctccaaacgatgtaactgaagttctcttagtgctggaaaaaaattggatgttgtgtagctgcataggcttgcaaggttgtctaaacttgtgagacaaagaacttttaggacattcaaatgacagaattgaggaaattcctcgcacattgaacaaccaactagatagagctcggccaagttctgcagcacactgagatctgtcatccaagttggaaaaccattgcctttgtaaaatgctattcttaacatcaggagcccatcatgaggttttagagcatctagtaccttcttttggcgatctggttcatcaacaaggtggtcattactccattcaagagacaagtgtgtgagtttcactttattttcaatattgactgtgcttgcttgtgcctctgatacattttctagaccacacaactctaattcaccacaaaggtttaaattctgcaattctctgacagtactgcaaccagagatagcaccaaccacaaaatatgttagtgtctgtaaagaagttagatgtccaaggtctggaggcatgtactccaggtttttgcatccattagtatagaggtgccgtaggcttgtcatgtacttcatatcctttgggagccggcgaagtctaatgcaatgagaaacattcaatgtctgtagatggtacagtatggatatgtcctctggaagttctttgatgtcgcagttttctgagagattaagataccttaggtgctttaactttatcggtctaattggaagttctttgatttcatatagctgcagtccacgtagagaaatgcacttcgataaatgatgtatcgatccataagtattccatgttggatacaataatgtccggagagttgtagattgtttcctcagaaaatcatcgaaatgatctccagttctatgccttgacacgagcaagtggtaagtcgaacgatttgacaacaactctttgcgataggacctatccgtaatagttacgcattctttccccataacatatagagcaatgtcatgcataagatcatgtatcttgcatgtggtggtgtatcggagttgcaccctgtctccattattactgcacacaagaggagtttgtttgacatcttgaaagaatgacctccaagctagttccttgaaaatttcttcccctgatgtcgtttcaaaatgatatttctcctctagtggaatgaagtcatgtgccatccatagttgaatcaaattctccacattaatctcataatttttggggaatatggcacagaaagcaaaacattgcttcatgtgcgatggtaggtcggcatagctaagctttagtataggtaaaattccagtcttctcgttgcaaatgtcacttttggctattatattcttccattctaggatgctggtcttggtactcaacatagaaccaaaggcttttgcagctaaaggagaaccttgacatctgtccacaaacttctgaacaatttcagatagctcatcactgccagccaaactgaatgctctagtctgtattatttccttcgtatattcttcgccaagtttctcaagattataggcttcaactacaccagtgatcataattctagctacttgtgaatcacgagtagttgttagtattgcactacccttgccacccagcttaaggcaggtcttcaatttttcccacttatcagcttcccggttccatacatcatccaagacaattaggtacctcttcccacttattgcctcctgcagatcctgcaatgccttttcatgatccttctctgtgctattgcagatgctatttgcaatatttccaacatcaaaatcatctgacacacaacaccacctccagagttcgaaatggttcttgatctcaggctcattgtaaatgagctgaacaaaggtggtttttcccagcccagccattccaacaattggaaggaccaacagatccctattgctgctagcatgattatgcaatatcttcacaatcttctttttctcctcatctctggatcttcttataatatccttctcagagtcagccattatagaatctgtttgacgccattgattggatggtggagcttgctgccggtgtatgaacccaaaggagttcatctctgagacaaggacctcaatgctccccacaatcttttgtagcttcttacccatcttattacgaaacatgatagggttataagaaggaaagaggcttacaacgtccatgccgagcatgttgaactgccccttcttccttgcgtcgcgccggagggcttcgtacttgaattcatcaaagacatcatttgcctcataggccaccttcttgagtgctctgagccaagcgcttactccaggtcgaaaagctcccttctcctccgcatcttcaatgacatccaggatggcaggcagcttgcgctccaggatctcgcgctgctgctccatgccttccataaccttgtactggtctagaaggtagctggaaaccttctccttcaccatggaaactagtggtccgataacaacctcagccattgttgcgctcacaactgacaagaacacaaggaaacactgcagcagtgaagactttggggtgcactagaaaaatatggacgagcgcttcagaggaaatagatgggagtgtgcttgttgtgatgtgtccccaatgatcagccacttaaaatatggttcacaggtaactataacactacagtactctagataccttattagcatctaaataaccatgtgagagcacctgctgtcatccatttgaacttaagaaacatccagtagaactaaagtcattagttactacttacacctgaaaaaaaaggaaattttgaagacatatcttttatattataaagatagctctaaaagaaaacaccatgttcgatgtgaaggcctagaaattacaacattacttggagaaaaaaataaaatataaaacattacatcatgatataaccaaattataacggtgtagaatgataggaacagttgtataaatttacaattatatctatggaaacacaatataagagttatatattaagcccaattctacttttagtatttatattgtatatagaatataattgcatatatatagaaacaggaggtaagagttgtatacttgtatatcaagtcatattcaacaattagcttgatatgatgcatagtaaatatatgttagaggtggtgtcttgtaaaacatgaattattggtcaattgaaaacaagagggaataaaattccacctactaatcatgtgagagcatctatgctcatccatttgctcttaagaaactacctagttgtcaaattgacctgtcgagatgcatgtcaaggcccatagaacaaaggtatttgaagactttgctagttttgcagaaaaaaaaagcgagcgattatttttgaagagagcgattattgctctcttcgaaacaaatttttgtttataggtaaatgaaggccccgggcatttgtatttgtatgcagatttgttatttcagccaagagggggaacccacccaattttattttaggccaattttattttaggacaagaaataaaaaagaatgcagccaatgtatgaaaaataggactaacgaatgtcagtacagacacacagcatctgacctcagtgagaagctagcacggcgatgcagtcggctggcaccgtggaacactctggcgacacatcttgtcggcgtcaataaccctccggcgatgccttcccgtcacgttgtttctgttattcctgatcggatccaatgtgtcgtccttgtacccatttcgtcgagcaccatgtgggcaccggcgtgtaagccgcctcgtctcccgcctcttgcttgaattcttggcagcgacagagggaggagagaggcgagggtgccgacggcgcaaagcatgggaggttgacggacggcgaggctggcgagtgggtaggcggctgctgatgcagcgatccggcgcccgctggattggtggggcgagacgaaaaatgcagcggtggcgccattagtttgcaggtttcagcgagcaattgccgatgcgatgcttaatttgatttttttttttttggaaaaagtacaccgaaggtccctcaacttgtcgtcggataaaaaatatcactgaaccgcaaaaccagatatacgaggtcccttaattatacaaaaccggccaagagttccttcagtggttttgacaaccgttttagtctacgtggcggctgagtaagcgtgggacccacgcgggccccacatgtcagcgtaatccacgtcatcccctccctctttctcctcttctatctctcacacacactttctcctctctaggcagccggccggcgagtggggaaggaggttgccggggcgaggcgggagaagaagtccggcgatgcggcaacgacgacggaggtggggccaggagcgaaggcggcgagggggtcaccaccgccgccacccctggggcgcgcgcgaagccagcggcgagcaccgactcctcgtcaatgggccagaacacatcgagcgactcgcgcggcagttcgtcgccagtggtgctcactaccttagccgcgccgggaacgtgaagccgccggagctcacgacgcggcggccaacaatgtccagcgtcgggaaagcggcgaacagcgtcgcgccactgccgccgccgctgttcggcgccgccgcgaaggtactgttcgcgagaggaggaggacgaaacatgctgctccctggagatatcttcatcttgatgggctgtgtgtcattgacggcgccgcctcctccctctccccggcgtcggcgtcggcttggcggtggcggcgaggcgggaggaccgtgtcggcgtcagcgctgggagccggagcggcaggaggcagggacaggcgcgacggcggcggtgcgccaggaccaagcgccgctgctactgccgtgctccccccgtcctcctcgcgctcccccctggctaccgccgcagccgccctccccttcttcccccgggcgccggccgccgtcgcgccgcagccgccctccccttctccccccgggcgccggccgccgtcgcgccgctgccgccctccccttctcactgtggaggacgtggattacgcccgtggaggagaaagtgtgtgtgagagagagaagaggagaaagagggaggggatggcgtggattacgctgatatgtggggcccacgtgggtcccacgcttacttagccaccacgtagttcaaaaccgggttcaaaaactactgaaggaccttgggtgaccgggtttgtatagttaagggacctcacatatctggttttgcggttcgagaacattttttatccccatgacaagttgagggaccttccgtgtactttttccttttttttatttgtttccgattggattcggaggcccaattggattctgtactgtacagtacatggcccattgccaaacatgtaatgctggcccaattattcctgcacttgctgttccctcctttggcgcagtaaaagttagccaaagaaaagaagtgagtgtagctcaactggttagattgcttgtaatagcagttcacacaggtttaaattttatatttgatatgtgtgctcgtatttacagctaattattttttaagtggcaggtgacgtttccgttgatagcgaggcgtccgtgacaactctgtaaatctcaagatatattggtacagtctttcaaaaatgctcataaggataaggggtgtgcgatgcatgtgtgcatgtgttgtgggcactgtgtttgtaatgtgtttctataaaaaaaagttagcgaaagatttatttgcacctgtctgcttttgcctaattatgtcctaagaactttattgaataaatagttcaacgagatgaatatggaaaacttgcctatcttgaacaagacaacttaatcaaactgagcccactaacagaatcgattatccctaaaaaaaaagaagtaaagaagaatcgattagatacatcaacttgcagtttaaataacaaaatgagtaaattgcacctacgataaaaaaaatccctgaactgtattgtatcaattcatccagcaatcatttttttcttcttttcttttttctagatttgaggtatcaagcaagcaggggatctgctgttctgttagagattaacacaacggatcgaagcgtcgtaaaggttgaacaacgttggggagagagaaaatgaatgtttggaagaggcaaatatatacgaaccgatcaatgtgcacacagaaacactcacaaaaagcgaatagtgcatgttttgtatgagatgcgcaaacatgttggtaatcgagaggaatttgacataaaggcaaatataaatcttgctcatcttgatatgttggacaaaagctccctatgcttatttctgcacataacagtttttcaagtaaacttactgcggaaaaaatgcctccgtccctctcccctagccccgacactcacccgcggcggcgacgcccggcgccacgaagcttccacccagttgatccctcgctccacatttcttccccagtccttgaatgtttccccaccaaccaatcttctccagtcttcctcccttccattcaaagctccctctgtccacctgaggagggagaaatcttcgtagactcccccctagatccaggctgttctgaagctggagaagagatcccccatggatctaacctccatctgcccgtttctgcaacggatggggatcgaggtaaggagaccggatctatctcaaaatcaatttcaaatctgcattcatcccagcatatccccaagcagatctccaagcagatttcaaatccccccgccggcccaatgtcttctcggcctctttactccgccgtacttcgacaagatggacatccaccagtagctcggcgcctaccgattgcaaatcacctcaatccctcaattcttggccgcccaccgcctcctccgtcttcaagagtgttgagcagtgggaaagttgttgatttgacgagacgccattaccaccccccctctttcccgaagctgtgctacttccaagactgagaaagagcagccatggcaagaagttaagcaaaggttctagtggaggaaaggatcctcattcaattctcctaacaaccaagagatcatggctgcaagaaagatccgattcctcaagcacacagaaggtaaatgcttccgctgcctccaacccggtcataaagttgcagactgcagggatcctcttcgttgttggttttgcagaagatttggtcacctctcctcagcctgcagagaacgccgctataaattgcaacaacaagtgcagtttcatccgccatcctagcaaccatctccaccaccagcgccaccactgctttcctccacagtgttccctcctctcaacaaccatctgaacacttcctctgctcctcccaccatggcctcggtcccaagtgacttggcctctcgccctgacctgggtagctgcatggtggcggcgacaagtgaaatggaacgtctgaagcagctcttcacggcaagatcggtggtggcctggtctgatgaaggccagaaggtggagatcggcacatttgctgatgacatccgttcggccttccgtatccatcgctccgacattcagatcacgaagttctatccagaagacttcttcctcacttttgttaaccatagcgatcgtgaggaagtgctgcaagagccaaggctggtaactcgaagtgggagagtgtatcacttcaagccatggaatgaaaggcgcaatgctgaagtaattgatgttcgcttccatgcccgagtctgcattgaaggtatcccaatgcatgcaagatcagaagaagtggcgacaaagatcattggctgcaagagttcagtccactacatagaagagtactcccgtcgccggaactacaaccgtacctttgatctttggatttggagctcagacttgagcagctccatcctgaaggcttcaagtttctctatcacaaggccagacagtgaagcaagagccactgatgttccttttcctgagttggagccgccccggatgccgggcattcttccgcagttgtttctcctcttccccaacctctctcacctgatctgttgcccgtgtcacaggatcagagggctttgctcttgcttgaaagacacctggatcctatgttctatgaggccacgatgggaggttccatctactcccctgatacttccctgcctcgtactgcctctcctgtgtttgttctttcagctgctgcagactcacaggcgacaccagttgaggtgacccggcatgatgtggaggagttcctggcggaggtgaccacacccatccagcagccactccttcctgcgccaggaaccaagccacgccgcccatgctgcaacaaggtgattactccaatacaaaggcaacgtgaaagactggccgtgaaagccagacgcaatacaaagcttgatttaattgcgcaagaaatacttgcaaagaaatttggcgttcttgatgataataagcgtctagatgaccaaattaagaaactttacttgcagcactacaagaaactgctctccccagcagacatgaagacaatcacgacactggtggagaatggaggctgcaaaggcattcggctgcgtgccaagaaggcggcatcggtggtgccgatatgaagccccaaccgtgacagaagactgccggccaactgttgatgatgttaagtagatggcttttgatgtttgtaatgcaaatgtgcacctctttgtgtttctgccaagtttcttggctgtgtttcagagatggccatttgcatcacaagtcctcccctgcagatggagtctcccccagtagtaatgacttttattcatgtcgcagttgaactgtttcatcctcaattggaatgtcagaggcttgaacagccaagttagaaaaaaaagtgttaagctgttggtagagcagatgaatgctacaatagtttgtctccaagaaacaaagatgaatcaaatctctgatgtggatgttttgcatactctgggttctcgtttcaaaaacgaatttgcttttctccctgctgatggaaccagaggaggaatcctcctagcctgcaacgataactatttcagcctctctaatgttctccggaagcagtacagtctcacagccacagtgactatgaaaaatgatggcatcgcatggacgataactgtggtctatggacctcagcaagatgcccagaaaattgagttcatcactgagctacaggaaataaagcaactggttatgtcaccttggctgctaataggagatttcaatctaatctataaaacctcagacaagaacaacagcaggctaaatagaagtatgatgcagaggttcaaaggaactttagacagattggaggtaaaggaactgcctctttcaggaaggaaattcacttggacacaagagtgtgataacccaacccaatcaaaaattgaccgtgctttttgctgtcctgattgggatgttcttttcgactcagcacaaatgtatgccctctcttcttcctgttcagaccacgcccccttattcataacaggctgtgtggaaagagagcaaaataactccttccgtttcgagtccttttggctaaagttcccaaactttcttcagataacagaggagtcctggaacagacctttacagaccaccaatccttttgcacgaattaatttaaagctaagaaggcttgcaagagatctcagaagatggaaatcaaccaaaataggagacacgagattgcagctggcaattgcgaatgaagtaatctttcaattagatgttgctcaagaggatagagttttgtcggatgaagaacagtgttttcgaaaatttttgaaagtaagagtgcttggcctggcagctatggagaaaattcgcttaagacaaagagccaggatcacatggctaaaacatggggatgtcaattcaaagttcttccaaatcaaggcgaacggtagaaagagaaaaaaccacatcctgctcctccaaacaccgattggtattgctttcacaaaaaaccagaaagaagaagtgaagcgatacttcactcaaaacctaggttcttttggccctagaaatcaacgactaaactgggctgccctcaacataccttctttagatctctcagatcttgatgagcctttcactgaagaagaacttaaatatgtcatttctgatctaccctcggaaaaagcccctggcccggatggtttcattggggcttttttcaagctgggatataattaaaatagatatgctgcaggcagtaactttctttggagatttgggatactcaaggctacaggacctaaactcagcacatatttgtctcattcccaaaaagactgatgcttcgaaagtggaagattttcgaccgataagcctaattcatagctttgcaaagataattgccaaactgctagccaacaggcttgcacctaagctaggagatttggtctcccaaagtcaaagtgcgtttattaggaaaagagcaattcacgacaatgtcctgttcgtccaaaacatgatcaaagcatgccatagagcaaaaaagccaactcttttccttaaagttgacatttcgaaagcctttgacacagttaattggccatatctgctagaggtcctacaaaacttcggttttggtcagaaatggtgtaattggatttctaacttgttgggtacctcctcctcggcaattctcctgaatggcaccccagggcaggtaatagaacatgcaagagggctccgtcagggagaccccctctcccccatgctttttattcttgcaatggaacctctacataaattgtttctaaaggcagaagagtctggacttctgtcaagtctccaaagacaaagacgtttcagatgttctctttacgcggatgatgttgcccttttcataaagccaaatcgagacgagatgctagttcttcgtggtattctctctgtttttgcagaagccagtggtctttacacaaacatggaaaaaacagagatatacccgattagctgcaatgagatcaatcttgatgactgtctatccatcttcccaggcagagtttcaaacttcccatgtaaataccttggtctccctttgcacacaagaaaattaagaaaagtagaacttcagcctttggtggataaagtgggatcaaggatacctggttggcaaggtcgattcttcacttcggctggcagagaagtgttggtcaaaaatactttgtcctcaaccccaatttaccacttaacgattctacaacaaaataaatggccatacaagcgaattgacagatttagacgagcttttctttggaaaggaaaagaccctgaaaatgttagtgggggcagctgccttctcaactggtcctctgtttgcaaacccaaatctcttggaggacttggaaccctcaatttggagaaattcgcgcgggctctacgactccattggctttggtatgaatggaaagatgaacataagccatggattaacatggaaattccatgtgacgagatggatagaattctgttcagggcaagcacgcagatctctcttggaaatggaatgaaatgtaagttttggtcagacaactggctacagggaagggctcctaaagacttggcaccaaatattttcagattagcaaaaagaaaagcaaattgtgtagctctagagatgcaaaacaaccactggatcacttctttaaggatgatcacctcgattgaagagatcaatgaattagtcttcttgggaacccagctgcaagagatcaacctacactgtaactctctagataacataacctggaaatggactcaacatggagagtacacagcaaaaagcgcttatgaaattcagttccaaggctctgttgtaaacaaaaactttatgccactttggaaagctgaagctgaaccaaaacactgtttcttcggttggctgatcctacatcaaagaaccctcacagcggaaaaccttttattaaggcattggccatgtgattggatatgcagtctctgcacagaagcttttgaagatgcaaatcatttagcaaaggaatgcagtttcactatcttggtctggaaccaggtttgcttgtggctaaatttctcacaagttccaaatcaccttgtgcattagaacatctcagattggtgggaatctttagtagtttcatttcaaggaaacagaagaaagaagctaataggagcccttctaacaacctggtggcatgtgtggcttgaacgtaacagaagaatttttcagcaaaaacatcttagtgccacacaagtagcttttatggttaaagaaaatatagatcttatgcagatcttgcgccaaacctaaaggtttgtgccttgcgaaagttgtttcttctttgcctgtaatttttttttaaaaaaaaagtaccactgcttgtagtggtcacctttaagactttgtgtctgctcattcttctaatatatccggcagatctcatgccgtcatttgcttaaaaaaaaaagtaaacttactgctgtggtggcttctacagtgaactgcagataacaatttttgaaaatatatgcaacgtatagcagattactacaaactgtcaaccgcatgctttttcagagaagcatagaaagcaatacatcgtggcagagcttattctctacaataaatacaggggtgtatatattcagagtttcagacaataaaaacagacaacacttccgctagccacatgtatacgtacgggagtaataattcaaagaagatcccgagtttgaatttattctgccgaaattcgagctcctcaagctgtatcacttaagcaaaacttgcaaatccaaaaaaaaactattttttttaaaaaaaccctctgtagtggagattcaccatcaaaaaggcagacaattgatatagtcttctatgaatggtaaaaatcttggagggaagccaagtaaaattatcagaagaaagaagtttcaaccaaaaacaacctctcatcttacactacttgttggattagagtcgagatgatggcaatcagttccacaaacctctatgatctggctattaggtcaccagtgacgggctgtcactcacatttgacgaaagtaaccctctgccgggttctaattccgacccgtcacaggtgacggaatacttgtgacagactgcgaccagtgacctcatctgttacggcctcccgatggacccgtcaaaggtgaggccatccgtgacaagcacttcggcctgtcactggtgggttcttagaagtgagccgttttggcgtggtgtaggttttcacttgaagaagagagggccgcattaacgatgccctaagagggaagacgacactcactagtgtcgatgtcgccaccgccagaagactgggggtaaggctttcgcctcggtctctctcgacggttgattgcctccaaaaaacatgatgagggtgttgtgggttatcgctgcctagctcgccacccggcacaacagctctgactctgtcacaaaacaagacgaccccatactataggagcaaacaacactactactccacccacggcgaaccacactacttgaggggttattgttcccaagattgtcacccagtcaagcagttctaactcctcagctcacgaaagctcagtcatgaggtggaaccaacaaaaaccaccaccaccgtgaacacagggcacctgattgtggtcggccttgagaaagcaccaacgacgctgaaggctgctcaaccttcactgagtaaacacccagcttggccaaaagcgacacctccttaccattgggcttcccgcgatcgggatctgagagcagaccagtacaaagaaggggggattcagctcatctgacttcacccctcacgatggcagagatcagtcgaggtcatccagccgtccacattcgatcgaaccgtccgcccagggaactgcatgatatacacgagcagacgcgtcgtgaatctggccaaggctggcccaacaagttgtttcccagcgccgtccgtcactcctaccctttttacagtgaacagatgcgttttggtggccgcgctctcctttttggcgccaaacgaggccacggcgccggacgatcgtctgacaacgcactgcgatggcaaaccacggattccaccgttgatcaagcataggtgaagtaaggacctaatctgagtttttacacgcttgatgaactgcttgatcttttaggcaaggtgagcatttatgcatccattggttgtacctcccttgtttgttactgcacatgtgcagatgctcccattcaccactgccaacaggtgctgaacgcaggggatgacatgattggtgttgagcacttggaagaggattctgatggcatggctcttcttaaagcacggagctctgccggatcaatgatcgtcttcagcctttttttttaacttaatgcacacgcatgtggttagtgtgtacagtttaatatgtcatatacacttggtagtggatagcagagagcaagcatgttgggtggagattgatgtagaggagaagggccgctgtcgccaccgctacctcttccttcacgccggtcttctctgccgtcgccactggatttgggctattgtgtgtggctgccgcggtcctcctccacctccgcctccgctgggagagaggggggtcggaggaggagggaagcggccggaggggagggcaacggtggaggaggcgatgccgcaaccgctccatcgatgccggtaaccacctcacagcagactaacagagatgaggaggagggggagaagaatggggggaggcggatctagaggaggagggggagaataatggaggaggaggacaaggagtgtagtaccgagagagaggatgtcggatggataaggagtggagtatgggcgctggtttgatcggtttgcctcagctcgagtgctggttttcctacaataaactatagtgccgatttatatgcagatccggcacctataatataagtataggtccctttttttaaaaaaaactagcacctatactataggtgccggtttttatggtaataggtatccattttaaataaaccgacacctatgagccaatacctattaggtgttttgtagtaatggtcacactcacatatgtccaggatacctgatggtagtccgaggaattaggtgcccacactactacaaaataccagggaggcggcactattgactccaagtgattggtgctggtttcaaaatcagcacctttgaggtgttcgcgagccaaaaaaaaaaggctcgatacatcggctcgaatcgagctggtgcatcgagcgcatccaccccctgcgttgcccccaaaatctcaaatccacagcatcaacgaatcaaccaatatcatcacaatgaaccaaccaacatcatcacagaaattatagactataaactcccgaatcaaccaacatcaataacagacatcacacgacaaacattgaaagaacaatgaactccaccgctgctcaccatcgccatctaccagacccgccaccgctgccaccattgccccgaggatactccgccgccgggctaccaccgcctcccctcccacagtcggaccaccgggaagtaggggctgtcgcatccgggaagtaggggtctctgcctccatgccgtccacggccaccgcgcctcccctcccgccagatctggcggaggggagggcgtcgctgcccctcccacccctgccgagccggtgccgccgccgtcgctgccctttctcccgccgtacgccactattccagccgctgcgagcgagatagagaggggagagagagcgaataaaatgagaggggagagagagcggagagaacgagagagatcgagaggatacgagagagttcgaatgaccttatctcctcgatgctagtggtggggcctgttggctcggctcaattcgtaggtgccgtacctatctatctatctatctatctatctatccctctatacctctatacctatactaattgggcactttctacgagcttccacgttaaccggagaaatctaaccgttgatttaatcagttttattatcatggccgtacatacaaaatctaacgtggcgggctaatttgccttctaatttcatgggctctttcagcccatctattttttctctacaacagatcagcagtaatcgagagagatacagatcgacctcatctctctgatagaaattaacgatagagaggtgggagagaggactagcaaccacgggatgatacccaatgtgattggtgatgatttgcaatctcaaatcctctctaactcgggtactattttacctcaaccttgaacagattgatttttcattgatttggattgacactcatctgaaacgtcatcatccaacccaataaatttcaggagtccagatgccgatccaaaaaatcgagtacatatgccaccgttccccaattcacacaggtaatgtcgaacttgcatcttctatgcgatctcctcagccatctatttaaaactttcttgattttttatttgtttggacttttgagtgatgaattactggccgatagtttccctatttaatgagttgttcggtgttcgatgaacgtacatgttgcaacctatttaagaaattagcgatgactaattttgactgaaataatgaaatagctgttgatgagctgtgctaatgatccggtaatcagatcagtcgacagatcatagacccttatctatgacttttctctaaatctaaatacaaactagcaaatataatatttataattttccaatttactgtatgtatgtccgtatgcactacatatagtctgcagcttaccttttcttttaccaatgacatggttcaagctgttgacaatgcgaaggaagcatccaaagtcaaggtcaggataatcagactttgggatggcctaaatcccaacagacatgatagttattaataaaggtcggaataaatattcccctcgcaaataatattggtatttatgggtattcccagagagctctcacatttactataaacgttaactaaaagatctgtagttcattaggtcgatcgtattaccatgacttgatcaatcaagaatttgtgttaaaaccaatattagttgcgcacttcagggacgctcgcacattaggaagaaagatcttaacacccactagaacggataccctcatctcaatcaggcggtaagccccatctcaatcgggcacagcgtccgtcacaggctagaagtcactgatgtgaagagttatctcaatcgggcaaacggccgtcacgaatgaatatatctcaatcgggccctaagtaaagcccgtcaccgatagctttgatccagacgaccagtcaaactatagcccgtcacagatgacctatctctatcgggccacaactagcgcccgtcacagatgactactaacctttattgggcctaaactagagcccgtcacagatgattctcatctcaatcgggcctaaactatagcccgtcaaagatgactgatgacctcaatcagacctaaactagagcccgtcacagatgactgctgacctcaatcgggcctaagctaaagcccgtcacagatgatctcatctcaatcgggcatttagttatggctcgtcacagatgactataatccacaaaaaaaataaaatttgttttttggctagcctcaggcctttgctagccatgcccgctgcaaaaatgacagaaacaaacacagatatccaatatccccagctccccagcatcacccattcatacatatgcattcacatacacagacatcaacatatttcacacaaccacacattcacagccatatcatatttcacatccattcacatatttcacatccattcaaatatttatcatatttcacctgcaaaaccgagttaattggatcaaatatttatttagcaagtcttaacataaacatatgaaatatatacataaatataagcatcacagttacatcaccacagttgcataataagtgttcatcattgcctaaacatagaagttcaacattgttcatcgttttagtttaagcctaaacattcctttggggttaattatttcgcggaggatgaagctggctatctcctcgcgaacctcctcaaagctggtagtcagagacttggttattgtgccctacatagtcataattccagattagttgatcgatcatatataagtactaaaatgtagttagtctatcacaattgagaccaccgacctcaaactcagccaaagtcttcaccttttctctatacagaagtcgcatgttgtggcacacatggaatccgcactggtcacctatttgttgcttcaccgggaagtcttttttgtggatgagggtgtcatgtcctgtcttcctgaggcctcctctttgcacgtattgggcccacgcttcatctatcgctagttgaattggggtccattcatatgcgttcttatcaattctggagttcaggtaatgacatgtactccatttaggtgttatgaccagaaggatccaatgggcactgcggcattaatatagtgaaagttaattaagtactcaaggaatgtgtcatgctgttgtgtatatttagttaacacacttactattgattataggcacacataatgtactccttgtctcggcgggaccacaaggtgtcgtagatgtagttgaccattccttgacggtcattctggagatttgtgacagtgaccacttgtggatcaaggaaggcaacttccggtgcatgcttctgacaccattgccaacttaacctacacacaggatcaacgatcttgtaagcaagttaaaccgattgttattaacagaatgagttgggcgacaatacttacaaggagtagcacttaaggaggcttgtgtccaccactcggagcctgtagaggtcgaaaagatcgttgaagtcgaccacgatataatttgttggatcaaggaatggctttccatcgtgctgtccaaggatatcggtagctttacttggcttcctggcgttagatttctccatgtagtataagtgaaggtccttgcaagcggtgcccattgcggcaagcacgtcatctccaaccaatggcatgcctagttggaactcctgtggagcgacgtatttcttcttgacctctttgcccttagtctcttcctggcccttgcccagatctagctttcttggagctagaagcgaggcctgcacctttcctccccttcctctcccctttgcttcgggtttatcgagagtaattctctgaggggaggagtgtgccttcctgctcttcttcatcggtgggggttcatgaatcgccttgctgtcggcctccgttcggtcctccccaaaatccgtgtcatactgcaactgcaaatcgtaagattgtgcatgacgatcttgagcaggaggggctgaaggagcagaggcgggtctctttggtggacgaccgcctggtgcagtggttggcctcgctgtaaccctgatctcaatgaggtccttgggccattggatgaaggtaccacgggcatttcctagtgagaggacctcgtcgttcgatggatacttcagagggaacagcttgtatccgggcttcaccgagtcgacttgaacttttgcacagtcggccctgagttgcgctccatgcactcttgtctctggggtcggcttgtacgcaagtccctcggctgctagaacagtgaaggtcggcattaccctaactgtgagggtgcagctcgttggttcctgcgatagattaatcaatttttttagaatattatatatcatatggattcgttacgtctttcatgtattgagtaagttcacggttaccgttatgtggtcgacggcgctgtcgaccaatgttggattttccgccaactcagttgatgcgcaactgctacgtttttcggtgggacttcctaactctttgtgcgcagcagcagcggcggcctgggggatctgttgctcttctcggatctcttgcctaatcttggccctcatcgactcgagcttttcgtcgaattcagatgtcagctcagctcgtatcgactcccggatcttggcttcaaggcgtgcatctttctccgccttgttggaagtccgcttcttgtactgccacgcgtagtctggaaatccataattccagggaacagaagacccaacgccccgtgtccgtccacggtgttccttgttgcccaacgctttcgtgaggaggtcgtcctcgcgtctttgagagcaggcctcttgcgaggcttgttgctcggcaaccaactccttctgcattacaatttagtggggtcaaataaactgcacgatgggaaacaatgcgaacatctagtttgattagacacttactatagcttcgtatactcgttgatcttctgcatttggcatgaagattgtgccatcatcatgtttctggtacctagccctggcccagttcctagcccgagggtgtgggatatcgccaaacacgagcggtgtgcacgattcctccgcttcttcatcctcacgctgccattcctcttccttaccggcatatccggcggtaccaagccggtgcggatgctggttcctggtctggagcaagcgatatgcctcgcttctagctctggactcgggggtcgacttcttcgcatggaattctgactagacctgttccgtgatccaaggaaatttttctcttggatctggatttgccgggttgtagacgaactcgccgactagcttagtcttgaagttcttccaagcagtgcccataaccttgaaagcagcccgcctgagacggtcctcatgctctgcaggataatcaaagctctccttgaacgttagccaagcaatgtccttctctgtggccggcatgagcttgaagtcgtcttgcagaatactgaatttctgcctccctatgaccccgcagatagacctaaattggctcaatattttccttggagatgtcggcaaccctacggcgtccaccgctgttatgcggaaccgttccttaggaattttgttccttgtcctaggagtacgttcccttgaggacccactagttgtcgttgacattggttcgccttgctaagacattgtctacttttttccaaaaaaacaaaaaaaacacaattgagtgctacaatctattacaatgaattgaatgtcacttataaaaataaatgaaacatataaataaactaaattgcgcatatcacaatgatagaatgaattgaatggcacatataaataaattaaacatatcatcaaatcctaaaatcataaattcacctcataccatctattcatccacatatcatgcatctatcactaaattgattaatgcaccacattccatctattcatcatcatgtcatcaatcaaaaaaatcattcgtttaccatatatcatcaatccctaaaatcatctatcagtaaaatcatctatcactaaattcattaatgaaccacattccatctattcatcatcatgtcatcaatcactaaaatcattcgttcaccacatatcatcaatccctaaaatcatctatcactaaaatcatctatcactaaattcattaatgcaccacattccatctattcatcatcaagtcatcaatcactaaaatcatctatcactaaattcatcccaacatccacatttcatcccaacatccacattttcattatcaaccacatgcaagtagcagagggaggcgcgttggaggactcacatgaggtcggtcgggggggctcggtggtggcggcggcgggctcggtggagggcgtcgccggtcggtggaggcggcggctggctcggtgcaggcggcgggctcggcgaaggaggagttcacggcggcggcgccggtcggtgtagatgccggtcggggaggtcggcatcgggccgacgtcgccggcctcggtgggggctgctgttcgtgtcggtgaagaggcaggcggcgacgacgaggaaggccgacgccggtcggtgtagagactcggtggcggcggcggcgggctcggtggaggcggcgggctcggtggcggtggcggcgggctcggtggaggcggcgggctcggtggcggtggcggcgggctcagtggaggcggcgggctcggcggcggtggtggcggtctcggtggcggtggcggcgagggaggacgacggcggcgaaggaggagttggcggcggcgctagggttctaaggaggcgggaaactgtagcgggacttagaaaaattttcgattcgatctgagaaaccctagttatattagagtgatgagtcatctcaatcgggctttgccgtagagcccgtcacagatgactcatcggtgacgggctccatactaatgcccgattgagatgacattcaggcccgtcacggatgactcatctgtgacgggccctaagataatgcccgatagagatagattaatctctatcgggcttgaactaaggcctgtcaccgatgactatttttccatttcccagataagtctttatatttgtgagtacaaaatatatagctactgtataataattcattttattagtcataacacatttttggatagtaaatgatttcaaatcgaaatatggtcaacaacaaaattgatcttctcatcaagatctacaacttttattttggtcatttatctatataactttgtttctaacaacttgaaattgattttgacaatatgacaaatgtaaacaacatttgtaaatattacatgactttaaatgggaaagccataaacagctaacttgtacagctaatcaagatctacaacttttattttggtcacttcttcatccgacaaagtgatagtaccaatgtttacaaaattgacatatctgtgttgatatttataaaccagatgagagaaatgtgatttttgtgaataatataactatcactttgtcggatgaagaagtaaccaaaataaaagttgtagattttgatgagaggatcaactttgttgttgaccatatttccatttgaaatcatttagtatttactcatgtcaccgaaaggattcatgccatccgtacaaagacatatcctcacgtttctagggtcggcagcaaagtctttgtgttttcgatctatattcctccattcaatcgaatccgctgggtgtctaagcataccatcattccttctttccatggcgtgccaacgtactaacttcgcttcgttcgggttggcaaagattctcttgaaacgatcaatgataggtagataccacacaacctttgccggaccacccctctttgacttatttcctttgtgagcacttttctttcgcttgtatcgagaagcattgcagacaggacaagcatccaagtccgcatattgcttgtggtacaatatgcatatgcagttgttgggacaagcgtgaattctacggacctctaaccccagtggacacagaacctgctttgctccgtatgtcatctcgggcaatgtgttctcaacaggaagcatagccttcaaaattcctaaaagatctgtgaaactcttgtctgtccatccactacttgccttaagcttcattaggtccaaggtaactgacaacttagtgtgttttgctttgcatccagcgtacaaaggcgtctcggaatcacttaccaacctgctgaatttcattccatctctctcattctgggctgggtcctcaacgtcacgtaacatgtcttgcagcagatcgtgatccacatcaaccatttcaccgcccaatggagaaggtataaacatgtcatgctcattttcatcttcctgattatgcgcaccacttctgtttgctgctgctccacttcctgattcttgctctccatgcttcacccaacatgtatagccctccatgaatcctcgttgtatcagatgaccgtgtacgtcctctccgctatcaaacatattctcgttcttgcaatctgcacatggacaacacatgtaatcactgtttcttcttatccgatcctcctccgcggcgttcataaaatttattacgccctttcggtactccgtagaatgacgtttcaaatttttggcatacatccaacttcgatcaattgctacaaaaaaaacaaattagaggcacatattataagatcagtattgcaaaagtaagacatgatgaaattgctcaattaatgatttatattactgacttgattgatccattttgatcacttttgggaatttaatttctgttttccttggaaaaaggacaaaaaatcgccccctacagcctcccaccaaaatagtgaacagtgggatatagttacactaggtggtgggggtatttatactgtgcaacaaatatttgtaacggccctaaaacaatcaaccgtgacgggcatacaagtaatctctatcgggccttaataaaaggccgtcaaaaaatagtgtcatctgtgacgggcaataaacttatctcaatcgggcctctagttggagcccgtcacagatgaccctcatctgtgacgggcttcttttagggcccgattgagatatggaaccctcatctcaatcgggcctcaactatagcccgtcacatataagtgtcatccgtgacgggctttagttttatgccgatataccatggctgtgcgaccatatctcaattgggcaaaacttcggcccgattgagattacttccttgtgacggcccgcaaattccagtcttgttatgggccgtcacagatggaaggatatgtactagtgaccattgattaggtggtttacattgctatgatattcgatctatatgaattcgtgtagattaaaatatggcccggaaagtaacatggactctttagttttattttttttaaaattaataattctgaaatcagacatcataaaagacagggtttgctctcaatttagaaatttgttaatttaattgcattttttaaattcataattagcaagttgtaacttatgtgaactccaaaccatgtacaactaaaatgtattatttactatttttagaattattaaatcataaaagttataattgatacttcaaaaatgtattatttctaaatttacaaatgattaaatcacgaacaatctataaccgtgggtctggacagagtacaattttatatattatttaagaaattattaaatcatattttttttagagttgaaaatataaatcatgtactttacaagactccaacttgaaaacgtgtaacattcagcaaaatctgatgaccaacatattcataacttgattatatttttaatatttatattattaataactatagcccgtgcatcgcacgggttagcgtctagtacctataataaataggtgcaagtttttaatattaaaggtttcgttttaaataaaaacaacacaaaatacaatggatgtcggtttttatttagaatcgacacatataattacttcaaggtgccaattttttacgatttcaacccgcggaggtgggaaaaggcctataggtgccagttttagcacttatgacacctatttgatgttttgtagtagtgccatatgaggcgaggggaatggggcacatgtggatgacaaaaaagtacactaaccctaagcagtggcagttttcgcaatgtatcagttatccgttttttatcttgtccgtctccatgaaattagcactataatcagttgatgggtcaataggttggaaaacatagctgtttagcttataattgcaggtgcaaaacttgaaaatatattcctattattgactgtgtacataggagaccggaaagtacaaggtttacttggactgctatttgtatagcaagataattgttgtacatagtactcttattttactataaaatatcactatgtgttaccaaatcaactggtgcttcggcgcttccttgtagttgttgtagatccattcttgtcatgaaataaagctgtagcagaagatacatacttagtataaggtgatattcgtgattcccacgttgctatttcaaaatcaccacctgaaattgccaccgatctagctattacctctttgaacgatatacttggtttcttatagtttggaatatcatccctttctactcgaggtggctttacaagaatgcaggcgtgagtaggataagatgtcataaattcggtgctatctactggctgctctttctcaatgatatctttcggatgctcaccatatttcaaaaagttgttcttcaccatcctctcgaagcgtcgcaatattctaagccagaagtgaacattatggttccttctaagcatgtcagatatcatattggctgttatcaatgatccacccaatactactgcaagatcatttgcaactgagaccatctttggatggtccttttggtcggtcgctagcatcttgaaaaggtagctgtactcctcctgtgataaactatttagatgaactgcctttgctgttccgaaccttgcaagattttcaatcctacttatgattaccactttgcttcctccagctgtcatctgacttacagtagaatagaagtttacccaatcattttcatctatgtccgtaaaatattcacgaacaatcaatgtcctctccattttgaactttgcatgtgctattgatccgcagctgctatctccattgatgtacaaaatagaagaaaagtatgatctgatccgctcatcattgcagacatggctgatcaaggatttctttcctaccctgcaaccaccaatgattggaagaacaagacgagcaccctggttacctggattttgcaataaaaaattgataatttcctgcttctcgacatgatgagcaaacacacaattatcggtgtaaaggtaagcatcatagggtcggcgacacatgcattcacatctggctaggaatacaacaaactctttcactctacctccatctgaagtatttatgtgttttttgtgcagctctctaaaaagcttgcttcccatctcagaacagccacccttatatataattagctggaaatggttcagagcaaaaccagcagccattttatccacagctgttttcaagggatgagaaaagtgactgcaatttgccaagtttaaagttctctattcaatactattggtcgttgattgctttgaatatctgttccttaattttttaccatcacacactttcttgtatgaaatattaattaactggactatttgaagaaactagtatttttcttgctaacgtacatggctaggtgtgaaaatttctaaagactatgagggaccatttggaccatttatgaaaggaaagcaacaagttgattatgggaagctagaattcgtccacttgataaaccccgagctccacttgaaaatattttaccaaagtgtatgggatgtcatggtatagattgaaccgagaggagaggaagggagtcggactcggtggagatgatagcacgaggtggacactcggccttagtttggaaaggtcccccgtgaaaactagaaacaaatctgcccttcctttttttttctcttcttcctatccgaaacaaacccacggaaatgaaaggtagataagttggagtcccgaagacaagcacttaggtggtctagctgacacgcgtaactatacgataaagtagcaatggctaatgtttaatctaagcaaacccaataaaccctgaaggggtaccaagctatttaaggaggtgggtagatgactaaggggtccctagggtcctgctccacctagttggggcacgccctgcatggccccacttaggccgagatcccagatgaatttacgagttcataggctaaatataggtgacacaacaccttgtttctattattccagcctatgtagttggaatttggagctgagcttggatccgtttgaaagaggactgcaaaagctttccatcaagtactcacggacaaaaaacggagcacgtatgcatatttggtggccgtttgaaatcagcactttagcatgtggccgaattggatttcagaacttggtcagattgatcttgatgcaagcaaaggttatattaaaagtcaccatggtcacatcatcgtatgaaatattaattaaattgactatttgaagaaacgagtactttcttgctaacgcacatggctaggtgtgaaagtttctaaaaactatgagggaccatttatcaaaggaaagcaacaagttgattatgggaagctagaactcgtccacttgataaactttgagctgcactcaagaaatttttaccaaagcttatgagatttcatggtatagattgaaccgacaggagaggaatggagtcggacttggtcgagatgatagcacgaggtggacacttggccttagtttgggaaggtgccacgtcaaaactaaaaacaaacccgcgattggagaactgatctttcactagtggagagttgccctttttttttatttgcatggccctgttgctgcatggtttatatatatatatatatatatatgcaccatggtgcccgggcaccatggcatcaaatacacaaattcaatcaaaattttcaaattgtgagtatatacctagttataagtattcgattcatacctacacctcttaacaaaacaactcaaaatttaactttatttcacaatccaatattacatacctaactaattatatgtttggatgccatatacctagaattaatcaaaatctaacaaaaacatgtttaaactaagttcaaacttgttttgaactagttagaaaagtagttaatgttaatacctaaatatttaaaaaaatttcatactcatttgaattgagtatatactcaatttgaaccatggagctcgggcaccatggagcaccaaacaaatatatatatatatatatatatatatatatatatatatatatatatatatatatatatatatatatatatatatatatatacatatatatatatatatatatatatatatgagttggattttttgcacgcgagttcacatgtacccacaatctacaccctatatgtagcttgcacgaatcttagggcaaatatattaggtgctaacaaaatgtaacatgcatgatgtttacgttatactatattttttacaagtgtaaaatacgttgtttatgtaatttttgtatttcttgtatgcaaaacttgtttatgtaatttaccttgtttatataaattaccatgtttatgtagtttttgatggtaggatatatatcattttgtaagtatcatttttgcaagatgacaatttggtgatatagtagatatattgttttctcattttcactaaatatcatgttataaacaaaataagggttagagaaatacaatgcactagatatataaatgtcatacatatgattattattgaaaaaaattatttggtaaaaaatacaacatacatgttatacatattgtgaaccaacctaatcctaatcttttctccctatagtaatcattcatttggttaaggttaggtacattttgcagcacgaatcttggaacacatcaacggtgtagattgtaggtacatgtgaacccgagtgcaaatatgcattttcctatatatatatatatatatatatatatatagggatgcgctaaaccgcgcctggggtgcgcaataactaaactactcctctcacagcactcctccccacccaccaccccccctggtgcccaggaggctctcccgcacctttttctctccctcaccatttgtccttcagtaaataaattacttgcagttaatatcttcttattagtaaatgaattactaactaatatattgatttttgcattgtaatcccgcaccttttggcatgtccattccaactgcaacccgcacatttctcttgcacacgtagtaaataaattactctctgttaatatcatttattagtaaataaattactcggaatccaactcatttcttctctcagtaaatggattactcccaggttgtagcccttctcagttggttcattctctcagtaaatgaattactgtcgggttggtcttatttattctcttagtaaataaattacttaagataatacaacacttaattggatatcataccttctcgcagtaaataaattacttaaaataacgtattgatatcgtctcaagattttcttagtaaataaattactattacaccaatctcaacataacatattgacattgccaacaaattctcttagtaaccaagttactattacaccgatggttctcaacatatgtctctcagtaactaaattactattacatgcacgaatccaacaagcaagacaacgctagtgcctcatatcgatgttgagccgacaaagcactatagattccttaggtctccccatcgataggtatccatcacccacgaacatctagagaggcatcccacatgcacctggatatagacagaaacgattacatcatctaagagaagtctttaatttacactcataaatgactctaaatgagatatgattcgctgaagaagaaataaaatgcttcataaaaaattgagcagcaggaagagagaatatgtgcaaaatgcagcctccatctgaagaacataaatcgagtagaataaattttagaactgatgagtctatactgctttatttacaggaatacactccattagactgatcatagatttcagatgttcacatgcatgttaaattaagaaccaaaattctaattgacacattatcagttcgccaagataaatccagaaaaagtgtgcaaagtgtacgacatgaaacatttagagcgtccaagtcaaatgaaccaaggatcctatatcttcagagatcacccggatatcattgaggtcaagagaaaagttcaatttggcagtcagtaaagatctgtttctagggaacatattattatgcataaaaatgatactaatcaaatagactcgtcctaaatttttcacgataccaatgcccaaataagctaaaatgatatggaaattattcatggatgaaaactcccttggtgtccttgatccgcacctgcggaactagtgaaggacatgccatgtgcacatgagcaattagaacaacaatctcaatcctctgaatatgaaaaaaaaaagcatacttaggcaacaaaaattattgtgtgcccagtagcaaaacacctgcaccaagaacagggatttgtgccaatagactgaacaataaaggtctcaatgtacatcgttgtcagtataatcctcatctgcattgatgctgcatccggattctcactctgcccctgcgaaaaaaagacatatcttgtcttttcatgtctagttataaacactaaactaaaacctgggaaaattgcaaccataaagcatagaagattgaatcgagaagaaaaaccaccatgaatctgaacaacgtggggaaaaaaggcctgatcaccgatcatgcaaacatgaaaaaacaaaaacgaaaaaaagagaaagggaatagatcagattggcatggcagcaccaaagacactattcctttcatgggggatgcagacttcaatcacgcagacgagttcggggttgttgatggtgtcgcttgtgaaggaacgcagatggcgccggccctcctcctcctttgcccgcaccaacaacttatgcaaatccaatccaaatgttgctactacacctcctcagcgtcctccacgggcggcggacgagggcagcgggcgtgggcgatggtggcgatctggaggccgcctgcggacaaaggcggaacggcggccgccgacgaggacgaaggatgttggctcctccgtatagctcgccaacgtggagcagatcggcagcggtggaagggaagccggtggagaccatgggcggaagaaaggcaggcgcccttcgtcgtggagcttgcctccagatccaggcggcgtgatggcctctccccggtgctgccttttctcgaatcgccgccggcaacctcctcgttctagatctgaaaaaagcaaaagaaattaacaaaaaaaaatgagtgtattaaatcctatatatataggaggaagtttagtagtaaaagaattactactgtatgggaaaggggaggaggtcgggggtacaggggaggggtggggtgggtaggggtgggttgtgccatctgtagtatagtatgtctatatatatatatatacacatatatatacatacatatatatatacacatatatatatatatatataggttcctactaccaggagtagttactccctccttttaacgggtcaggttagtggaaccatcttgatccaataaccggtagttaggttgtttttttaatttaaacaattaactaaattgtttattagttgaaattatttcttttttgttagttgcatgcaaacgaacttctgcattggaatttctgctacgtgctggtcaacagaagatacatgttagctagctaaactgaatttctgctcgtttggtgcatgcatatatttcccatgtatttaggaacgttaacgtgatgaaaaggcagaaaatatgtgaacgttgacacatttaaaatgcacggtctgtgaaacagaaaaggaacagagcattagttgagaaggaagcagaacattgtttggaaatgcggcagaacatcacttggaaaaaaaaatcccaaaccgaaaatggagcagaatatcgtttggaaatggagcagaacatcgtttggaaaaaaaaatacattctactcttcctagacaaactccatcttctgctcgtcccggcagaaaatgtatctaaactgaaaatggcagaacatcaaatgaaaaaaaaaatccaaggaggaaaataaacctcaactaaaatttggcagaacgtcaactggaaaaattccccaaatatcaagggcagaacctccctgggtaatacgtgattagttacaaacaacaattgcggcatgtgctccgtgatggccgagtccatctgaacttgtaaataggcaatatagttttattagctagtaggaaggacgaaagcttaacaaaaaaaaaaaaggtgcagaatatgttctgctggtgtaactgaatcccatcctcttataggaagctctatggcaagaatacaggcagaaagtttctgcttgggtaactgaatcccgttctcttataggaagctccctggcaagaatacaggcagaaagtttctgctcgggtagaaacaggaacgggaaaggaagcagtatgtgagtatgtgactcagaaaaggagcagaacatcggttagaaaggaagcagaaaaataatttgaacagaagcacaacatcttctgctccttcaacaaaatcgtcactaagcagatgacgttaaaaaaggcagaaaattaaaaaggaatagaagaacatcaattggaaagaagcagaacattatttgtaaacggaacagaacatcaattagaaaggagcagaacattatttggaaacggaacagaacatcaatttgaaagggagcaaaatggtttctgccaatcatagtgtccatgttctgctcctccggcagatgaactaacatgcattcgaaactgtttgtatcccacgaaaatagcggtcggcattctaaacgggttggataacatggctaattaactccgaaatagcagaaatttgcactgccacgtagcaaaccgtacggtggataagctggaagtagttactcccagtagtagcttataatattcatatatatatatatatatatatatatatataggcaacatatcctatgcacacaggccctcacgtgtacacacgtgcacaccaactaaaaaatgtcaccaaaaaatttagaaaaaatcatacacatactttcaattgtattacacctagggttaaaatcttaacatcaaattcattatattttagccgtaacaaaaaaaaaacaaaaaatctgacaattttaaggttgcaattttgtcagaattttatcttttttgttattctctatgtagaatgaatttgaagatgcgactttgcacgtagatgtaatactattgaaagtacatgtatgaattttcctagaattttttgtgataatttttagttggtgtacacggtgtgtacacgcgagggcctgtgtgtataggatacgctcccatatatatatatatatatatatatatatatatatatatatatatataaaccatgcatatatatgttccaatacatatacatgcataatatatatgtatttatacatatatgtatgcaaatgcatatgtatatatatattaaagcacttaacattttatgtgcatatatatgaccaaaacatatatttacactaaagtaaatgtgtacatatagaaaaatagacatgtattaattacaattcatcatgtcctagctagctacgacttcgacgtagtagtctttatctcagaagctaacgacctatgaattgtatttccgtcgtagtaaaattcatcctcaggatcaaggacttgttcgttgatgaatcccatgagttgttcttgaaccgccatgataaattccttgtgtgtgaggttatccctcatgcgaataacctatgaatgtatgaaattaattagtaaacaacaaatcgatacgtacgcaatgaaattttgaatttatttgtacgtacatcgagctctcttgtggtgatgatttggtctgcaaggcagtggcaatactcgcacacgtagtagccgcacaagttagttccctgttcttgctttgcgcactatatatacatgacaaacggcgagagatctaattaatatacacttgtatttgaattggagattcaatataaatgtagagcatgtgtactcataggaaatttaaacttccgcttaagtctttctctccaattgccgcggaccaaatgacggaactgataccaagccctaaatggagtttaaagctatgattcgtagtagtaattaattatatcaagattcgtaataacattggaacttatgacattacctgtctataagttaaaaaacctggtcaaacgtagactcttttttatccattgagtcatatacattgactacgcaggcctccaagtcgaagagtaaaaagacccagtggaatctgcaatgtgcgtcggatgtgacatatgaaacacttagcatgtacgtacgggaatgaaatttggtagcaagctggtcagaaagttcattaatcgcaaggacaaaaagataaggcaataaaggacaaccttgacgaatacctccctcgatgagctgaaaagtacccgtacgattgaccatttataacaacagaaaaattagcggagttgatgcaggaaaggacaagacgaacgaaattagcatgaaaccctttacgacaaagagcatccgctatgaatctccattcaatcctgtcaaaagctttagacaagtctatttttaaaagaaaagctttttgattaaaagaggtgagattaaaagagtgagcaatttcctgggcaagcacaatattattagagatgcgtctccccttgacaaaagcctgctgagtgtcacaaataaggttaggaagtttattctgaatgtaattagccaaggacttagcaatgattttataagaaacattacaaaggctaatgggtctaaaatcagcaggggacttaggattagaatttttaggaacaagaacaatattagtagcattcatacctgattgaagcttacctgtttcatagaaggagcctaccatggtagtaacatcgtcttttatccaattccaggcagctctataaaatgcaacattgagaccatctggccctggggaggcatctctttacatttgcttcagaatttccaggatgtcattttcagaagggatttcagggggaggaaaaattacatcattgtcattttgatccttagaaggagtggcatcatctgtattggagctttgaaagagattttcaaagtaagaagtgaagacagttgctatctcatcaggatcattgattattgaattattatggataacactagagattctgttctttctccttctcttctgggttgctttttgaaagaaagaagtgtttctgtcacctttctggacccaatgcttcttacttctctgtttgtgataatcggccagcttctgcatggtaatatcatgctgttgcacaatccttttctcctcaaagtacaaatgttctctgtcgggggaactctgaattttcaacagatcttcttccaactgatccaattgctgctgaagaggtttcttctttttgctccaagaagttaaggatattgctaacaaaggttgttcttctctgaaaatgacagtttacagactgcagccaggctgaatgagcatgctgattaaaatctggttcaagcagccaccaattttcaaacatgaaagatcttttaggcctcctgttcttcggattgagaatggcaatgatgggagcatgatcaccatacaacatgggcaagtgataaacagtggtatttggataattaaaacaccattccacatttgcaagacatctgtccaacctttccaaaaccagatccttaccctgttgcttattggaccaagtgtaagctggaccattataacccatatccataagccccagattattgacatgatgcttaaaaatattaatacgattctgattaggaggggccaaaccatacttttcattagcatgcatgatctcattaaggtctcccatacaaaaggtcggtctgtgactactatgtacaacaaaagaggagatttcactccacatggcactagtggccctgtgactagggatcaccataaatacaaagaagattgaaaataggaccagagttcttatagactccataagctaaaatataattaacactagactgaactatagtaagatccatgtcttcatcccacatcagccacaaaccaccagaagcttgatcagcaggaaccacatgactattagctacatgaaaatgatggatcagatcagaagcagtaactttagagctttttgtttctgaaataaagattaccttagcattagtagagtatattaggcgttggaggtgttgcattttcctactgccgaggtgacccccccatacctcggcagttccagcttaaaagactcatggcgcccttgatgccttatgggctggcgccattgcccatccatcattctttccacttccatctccaccatttccagcactgggatcaacaagctgaatctctgaaacattgcattccctaggatctatagccagtatcagtctggagctagctccagcatcacttgcaccacccccttgagtatctccagcagcttgatcaacaaagatatcatgatgcgcctccaaagcactccaagtatgcttcctgctatgaatattgttaatgctttgaggggatcttggagcatctctttgaaagacatcagaatgagcagcagcaagaggtctccaagaagtggaggtcaccattcaaccaccataacctcctctctgatcccatcttgtaactctctgcccacctcttctacttggaaccctgattggtgctgaatgatggttagttggaggagctcttcttgattcaatccctccatgttcttcacctcccacaatcgagaaggaagaggcagctgaagtagttggggagcaatggcgtttggtagattcatgggctgcttcatgaaaccctctcttcttacttaaatgttgtgaggctgtctcataaatcttggtagctcttgtgcttcttctgtgttgcacttcgttggtgccaatagcagggtccatcagaggcatttttggatatggaggaatccaacaaaaattcaattgtggaaaaattcaggcaacatttttcttctcctcaattcaagaacattcaagaacagcagaagcagcaagagagaggaagtgggaccagccagtcattaatgcccaagctagattggaaaaaagcgagtgagaaagctttgactttagctggctgcagcactgttcaagggcccccaagtcaagctgttcacactaccacagcaagcaaacaatgtgagaaaaaagacaaagaacctaatatgcaaagtacaccagaagttggtaccgaagagatgttggtacatggaagtacagtgaaaaagaagctggtttctagtactatagaggatcatgtcagctgcaactcaaagaatgtcaatactgttggtaaggtgcatcagatggaaccaatccagtctgttcctttggttcaccgagtttcacctagtgcaagtgcccatcagaacagatttttgacttagtgatatatatgaatacaagtatgcatcatttgatccttac

SEQ ID NO: 6923 - DNA, 20635 bp, Oryza sativa
  unsure (1)..(20635): unsure at all n locations
atttccaatataaaacaaatatattataaaaatatattccgtgttatatttaatgaaactaatttggttttgtagatgttgctaatttttttataaacttagtcaaacctatagaagtttgactaagaaaaaaacaaatcaacttataatatgaaacagagggagtataagataaatggatatattttcctttactaaaatctgtaaaaaaaaatgaaaatagttctcctttagttcatatagtttcttgttattaggctgattgctacgggtcatggaggaggcaatccgctctggccatacatcaccttcccatgggcacgattgcagccaagattctgccgtgggaagcgccatctcgtgagaccctactgaggacaatcaatgctgctctcgatgacggcaatgtcgacgacgtgctgcaagcatttgccaattacaagaccctgcatggccttcctgagccgcgggtgttggacaggatgatcgtgtcgctgtcctatgcgtctagcaggagatggcttcagagggcattcgacatggtcttgtcagtttaccaatgcaatggcaaccttcttaattgtggctcgctgatgaagctagctctggcgcttgccagagatcagatgccgattccagcctccacagtggtgaggatcatattggagagcggcaagcttcctgatgttgatatgctgaccatggtgtacttgcatatggtgaagtcacaagtaggatcctatcttgctgctgatgttttgtgtgagacctgcgagtgtttcttggagcagattggagatagaaggcagctgaaaaaactggatccaataaagagtaatgttaccttgtttaatatggttttgaagtcatgtgtcgatttcaaatgcatgatcaaggcccaaagaataatggagcttatgtcgctggttggggttgtggccgatgtaaatacagtggctatcgctagccttgtctttgagatggttgggcagcaagttgaattggtgaacatgaaaagaagtatcgattcttttgcatctttgccgttcattcagcactatctatatttttatggaagtctgctgaacctgcatttcaaatataatgacatggatgccgctgctcagcttttggttgatctgtatcgacaacaaaagcctcgtgcttttgttggtgatagtgtccataaacaaggtgtaatacagataggctctggcaacctgaaaactggattcagaataatgtttgaccccataaaagtggacaaaggtttcgttttagatacagaaagtcaatttggccttcttgctgttattgatggaaatattcgtcctagtgagaaggctcttgctaaattcattgttggctgtttgaaagcaagtaaagtgcgtgcattgtctagctttcttattacattacacaaggaagatctaaaggggccatctcattcagatgtaattagtgcatgcattctgatgggatggttgcatgctgctcatgatatcctggatgatttagagtcagctgagattcctgttctaatctgtacttacatgtctcttttgagagcatatgagaaggagaataaaccggaagaagttaataggtttctccaacagatacaaaagaaagcatatacaatggctgattttcataccaatccatcctttaccataaaggatgttgccaaaatagtcaaggatgagatgcccctcagaaattcgtctttgctttccagtttggttcaagaaatagaacattatagctctcgagagcacttaacttttgagttcaataattcaattcttttcttctgcaaggcaaatatgatggacgatgctttgagcacatataagcggatgagagagcagaatgtaagacccagtctgcataccttttgccacatactgtgtggatattcttcactaggcatgcatagggagattgccatgctgtggggagaaataaagcgcagactcgaatatggagagctaactgtggatagagacttgcttgactgcttgattttgaatttcctaaacgctggctattttgcaagagtcatggaggttttaagttacatggcaaaccgtaaaatgtactgtgacaagtggaaatacaagcaagtttttctaaagctacacaagaatctgtatagaaatttgaatttgctgcatgaaaaaacagaacaacagagtaaaagaatagaagatgtcagagctttcagatcctgggcaggcgtcaaataggtaaaatgactgcagcactgtaatccttttgcatttagagaacactcttcttgtgcatgcacatctgtacagaattcttccgatgtaacatcatccgcatctgttgtataattctgtattgtcctttcaagtctttccatttattcttgatggttagttccaattccttagtactcactgtaacatcttacatgcatggattttttttttctttgacctctaaatccactttcaaggcttctaaatcaactttcaaggcttcaactatcgatttttttttatataaatggcccgtcttttctttcatctgttttggcatggatcatgaatctcatagcagcacatatttcctcttcaggttccaggtggttgctaattcttacatttaaatatgttgaccattgataatcttattgataattttattgtagtactggccttgtggcaatcttagactactgtcttaccaacagtaatgtttctttcttgtgatattctacaaagaggctatgctgatacagaagatcatgctgttgcttcaagttgtcaagtaattatttttgtgggaaaccgactccttgaccttacgtcacaagcaagatcaattgcatagaccacaaatggtatttattattttgaaacagttgtacactttgacatctctgacaatcatttattaccgatttcaagtttttaatgaaactgatgaacttgtaggcctgatgggagtttgatagagcacttgcagtccagaccttactggctactaaggtttgccatcactaataccagaattgtccagtactaccatgtggggtacacaacttgaacagtaactttttttagaggaacttgaacagtaacttggcatgcttaactagttgctgtggttctagaggacacagttatgaagttgaggcagatattctaattgtgatattctttttaatatagtcatatgacataagtcctggaaactctctatttcctaaatatgtgcagataatagagcaaaaacaggaaaaatgtttcaataacacagttgatgttcgtgcttaatgattccaacttttacctaaaaacgctcacatgttgaaggatgccatattgctatgaatactaattttaggaagtttttccttttagttgagcatagctgtccatcagctgctcaattacaagaaatattttacttctaatagtttttaggctttaagcatatattgcatttgactttgcacgttaaaaactgatgctaagtttccacatatcaatttctttactgttggtgtgttcattatttgattcggtgcctctttggaagcacgggtaattggtttggcttctttcttaactttagggctgacatcattgttggggatttctgcaggtgctgtgtttataaaacccaaaggatagttggattgatcagttggttctttgtaattttagttaaatgcaggactatggctatgtcacagtatttatctagtaccaggttgatgtaagcaggtgcattctgtagatcgtgtctttccgaaatacctagcttggttgctcttatgctaaatataatcaattatgatgtgtctatgctttctgggtgcactatcattttgccatgaacttgtgattgttcccatccaaaacgtggctatttgtgtagtctggttcagaaagaatgcgatcatcctcattgcaaacctctgctttgtattataacccataaataaattaaaaaaatatatttctttaccggaaaaaatgagaaaatgtttaaggaagaaatgagtttttttttttaatttagaagaggagaagaatggaacggtggcatgttttccgatgtaatttttgtaaaatatttttatatatgaacttcctagaataccattttaaatccatttttcgagttgataatagataattcatttgtttgtatcctctaataattgtcaaaacgcttcgtccattaagcatgaaaaaaagtagccatttaacatataagaactatgtgtgctgtggattatctacttgattatatggataaattaaacattttaataaataactttaacaaggtgttctaagcaatccaataaaaattctttttttagaaagcatattcttagaaacgcggagtaaataatccattttaaaaaatccaataaacaatatgaataagttcacttgagacccttaacttgttaacgaatctgattttcacctttcaaccggaaaccatatacccggtgcaacataggtcccataatggtttgaacggtggttttagctggcatggctagtttgacttgatctttatcccatatagcatccacgtgacgtttaaagtggcaatttgatatggaaatgtgttctcattcgctcctttctctctctctttccacatgatgaagagatgacagaggaggaagaagaacgaccgggagagagaagaggagggagtgagaatgacacgtgggcctcaccatttttaattattatttttattatagctgacatatgggtccacggtttttattatttcccagatcaaattgtcatggcaatgccacgtagaataaagaccgagtcaaactagccatgtaagcgacatggcagcgaaaaccaccgtccaaaccgccatgggacctatattgcgccggttttgacagttgtgggatccgttatatctatttttttggttgaaggaccaaaatcggattcgttgatcagttaagggacctcaagtgaacttattcctaaatgatatgaaaagaaggcaggcgacctagcctaaatatagaaacggcccagcccaaactcgcctccactcccactgacccacactcctcacctcacctcgccctccaaatcgcccacacccctggaaccccattccacccacccacgcgcagccgcagcgacgagaggagaaacgagagagagaaaaagaagaaagagaaaaatgctgcgccacgccgcccgccgcctggccaccacccgcgccgccgccgccgccggccgcagcagcagggcgctctcgacggcggaggtgccggccgaggcggccaccgactccgccttcgcggaggcgtggaagaaggtggcccccaacatcgaggcccccgccacgcccatgtcgctcatgcagccccgcccccccacgccggcggccatcccctccaagctcaccgtcaacttcgtcctcccctacaagtccgagatcgccaacaaggaggtacgcgcggaccgtgtttgcccccccccccctccccctctcctctgtcctcctcggtccccagatctgtgcgtgtggcgtcgctagggtttcgggtatgtgcgcgatctggggtttgcgtcgtgcgattagggataggggttgggtgggtcaaggcagcgcgatccgattcgtcgagctggtgtggtagaggtctcgcatccagactcttcatccgtaggaatatatcatggtcaatgcttctatcctccgtttatcgtttgcccagaatgtttgtgatgtggccatttgttgggcgtgcgtatttgcaatcctattaacacgaatgtgtggcggtttacggttgtacatggctgttgaatcataccaggtatttccttgttttgttgctatgagttggagatgttctttcatgggacaaacataacgtagcgtgattctccaggtggctagatgtcatatgactatagaatttctgctcaacatttgattgctgttgagtgttggtagcaaattgcatttcttttttcttgtttggggtgcttgtgtgccttaattgcaaggagcatagagaattcataaattgatatttcctcgccttaaaagactgtgtttttagttagctatgaacctggctaaattcgtgattcatacaaccaaccaaacaaaatcttcaataaacacggtccgctccttggggacagaggtagtagtagtctagtgaagtatcttttggaaaccccgttacattttgttaatcagattgaggattccaggtcgctccttgggtgtttcttatttatagatttcaagtttctcttgctaggattgctgtgtgccaggccaagttttaattctgactacaacagtgtattcagacctgtttatctctagtgtttgtagtgctatgcggctttatgcattgtctggatttatcggtatagttgcagtttctcttgtttacattaactagagtttgtgtctgaacattcactgtcaatgttcctgatgtaaatttctttggttgagaaaatctttccttctgaagttctataaataaaactgcatattaatatagcctactattcacttatattttactatgctgcataggcagcttcttttttgactgtgcgccaattatagcttttgtccttgatatatgttatttgccctgtgataaccaagtctaatactacttgtttagttttgtggtgattttctttgtttcatgttgtttcctttagcttgcttgttggccttgatggtttggtactgtttacttaatggttaatggcactattaagaagtttcagatcatcaatttttccttaagtatgttgctgagcgtcatgttcttttgttgctattgtgtatgaaatataattggttgatggtgttcgaaggttgtctatgtttgtgttgttgcatttcaacagatgataggcaaattatctatcagttgattcacatagattttgtatgtcaatgcttgattcaacaatactactgttaatgtaccaattaattcttcccccatcatcaatattgtcttctgttgcttctttcccttgcttatgtctttgcttgtctatactcaggttgacatggtaattgtaccagcaacaactggtcagatgggtgttttgccaggccacgtttccacaatcgcagagctcaagcctggtgttctctcggtacacgagggaaacgatatcaccaagtactttgtgagcagtggctttgcatttgtccatgcaaactccatcgctgatatcgtggctgttgaggctgtccccctggaccagatcgacccagccgcggtccagcagggtctcgcggaattcaacgccaagcttggatcggcctcaactgaactggagaaggccgaagctcagattggagtggatgttcacagtgcgctcaatgccgctttggctggttgatcaatacgtttttaagttgctgtccctctctctcttttgcatcttcatttttagaatgtgagctgaagtttgcaaactcatggatgatgggatggagggaatgatcttaaataaattatactccatctcaaagacagaaccctgtttcttcttttaacttgactcctgcatggatttttgtaatagtgaatatttttctccgagcctacaaagtcgaagttttctggttccagttttccatcctgagtttacgcttggatcaaatgacaaaacacaaaagccgttctgtttctagcttctgatgaattctcttatgtggagagtgtagtcgtcaagattaaaatccacttttggtacggtacacatcctgtgttcaaactatgtggtgatgttaagaaatcagaaattgctgctgtttttcaaatgaagaatatcccaatgccgtacttaagagaaaccaaaacacttattttttgaaaaaaaaatgatatgcacagcacaggcttgcaatggtagtagaacaggcgagagcaagtcatcgaaacaaaatcaggtcgtaattatcccaaaaattagtactctttccatttcatttcgtattataaattgtttgattttttttctagttaaactttatttagtttgaccaagttataaaaatatttttttatctaatatatcaaattagtttcattaaatctaatattgaatatattttgataatatgtttgttttgtaaatactactatattttttttataaattgatcaaatttaaagaaatttaacaaaagaaaatcaaataacttatcctccctccgtttcacatcaatatgaacgtgagaaattctagcacatcaatatgaatgtgaaaaatgttagaatgatttacattgtgaaacggaggaagtaatatagaataggaggagtagattacatgatagaatagtagtgcgtttgaactttgaacacagggaggtctcaagtctcaccatgctgcgtgcctgcgttgcatgtagctgctgccttcgtcatcttcatgtgcaccagcctccgcgccgccggcgccgcgctcgcgccagccgccagcttggccaggtgcgccattcgccgccgcttcgccgtcgctgccttcttcgcctccggggaggaggaaccggagccggcgtggcagcgaggaggcgggggcgatccctcctccggcggctcggggggaccatccagctcgccgtgccgcgccgcgcgctccagggcccgcgccgcctccgccatggacgggcgctccccggcgcggtcggcgaggcacctccacgcgagcgccgcgacgtcctgcgcggcgcggtgcgagtacctccccgcgagtcgcgggtcggggagcctcgagaaccaccgggtgcccgcggggtggcggcgcgcccagtcgacgagcttctggtcggggcgtggccggctccggtcgaaggcgcggtggccggtgaggagctcgagcagcacgacgccgaagctccagacgtcgctcctcgccgtgaggcggcccgtctccacgtagtccggcgccgcgtacccgtacgtgcccatcacctgtttgattttatgcccgtttcatacacatcacacgttgttgttgattgttcatgcttgcattgctcagattaatacataataatcctattattcctgtcctacttcgcactaaaattgatttctaatgtaccaatcttttgataaccataacacccaatgttaaaattgtacttcctccgtttcacaatgtaagtcattctagcatttcccacatttatattgatgttgatgaatctagatagatgtatatgtctagattcattaacatcactatgaatatgagaaatgctagaatgacttacattatgaaacggagggagtagccattagtctccgatcgaattttattttattttttttgcaaaagtttagccattagtttgaactttgaactaaattggaccgccaactctcagatcttaaatttctaggggttgcattggttagcttatttttgttgaaagggtggaagtttcgcattcgttgaactgcatgaatctttttgtgaaaacacatctctccaggtgaaaacagattatatgtcaggacaaatgcctgaaacgatggtttggccgcctaccaaactttctagaccgttttgatgcccgattcgaaccaaccatgaaattattcaagaaaatactgtaattctacttttttttttgtgcagattgaatgcaagtagttcttaaggtaaatggtaaccatcttgctagtactgatgacaaatgacttaccgctgtggacacgtgagtttgtccatccactgggccctcccttgctaatccaaaatctgaaagttttggtctgaattcctcatctaacagcacgtttgatgattttaagtcgcgatatatgacctgtaacataaagagtgtcataactacaagtctacaactctacaacatgtgaacacaagcatcaatagttcagaatataaacactggaaaactctgttaatttgcgctaacaagtatagaattatagatcagaaagccttctgaatcatagctcctgatacatatccctatgagactatcattgcaaaactggaacaactgggagttgtcacttaactctgagcacttgggttttgagatagcattaatgggaaacagctgtattatttgtttactaatgtaacatagctctagagccctaagcttctaataacaactaatagtaaggattaaagaaaacagcagaaaaagcagaagaaaagaggaggaaaaaaagagcactgctatttacattgttctctgaacttgtaactgacaatactcaatatatcgattatcgaagttgttagaccaatacctgaatttccaacccttcatgcaagtactgcagccccttagcaacgcccaaggctatgctaagccttgttttccatggaagtgttgggtatgctttattgaacaagtgatattttaaggtcttgttaggcataaactcatacaaaagggnttttggggggaaatttttaattttttttcttaaagggggngggnttttccccctttttntttttggttttttttttaaaagggggggggcccccccaaatttttaaaaaaaaaaaaaccccccttttnccccccacacaagaagtctctgaggaccttgttcgccgtcgtcagtcccgcagtagccaatgagtttgacaagatttgggtgatccacaacagcaaggaactgaacttcagccagccactgcttatgaccctgaaagtgatgtaattgaggaataaatcaactttttgaattgatggtcatactggaagaattgtagaagtataaataacatttaaacaaatttaatggaagaatttgttttttcagattgctactccaagtgcatgattcctcaaaatgttgtaattactgcattctagatgttaaaacttacaagccatggggggttcattttccttttttgcatataagacacaagaaattcgtgaggcataattttctataacatgcagctataatttgacagttatatatttgctgagtattatgcatgggaaatgcaaaatatgaactaaaaatgtattttaccagtagtctacatttgagaataattttgctaaaatccttgtcatcagtcatcctgaggctaacattcacattccattccataagtgataataattttgaccaaaccatcctgcccaactttttagagtactaaatgcgatttgtataaaaattgttacacagcctggaatcctacattaaataatatactcggcacgattcgaaagtaaccaatatgtgcagaatcagtatatttacttatgcaatttgatcccaggctccctgcatccctttgtttcataataaaaggtatgcttcaactccatttaacaattgcagtgtacatagaaacatgattatagcatctaacattcataaggtctatcgaagacaatcaatacctgcattccattaggattgagcttcttgacagccaccaccacattgccactgtcattcctgagccccaaatgaccgcaagaagtttttaggaagcccttgtacacactcccaaaccctccttcccctatcttgagctctctactgaagttaccggtagcacttctcagctcggcaaggcgaaaatcacggagctcatgcgcacgctcctcgtatagctccagtatgctccgtggtgatgaagcaacaaccaggctgcatgatctgttggccttcttggacatttcatctctgaagtcatctttgtctacggttagtgtaggggatgaccttgattgcttcttgttcttattcttgttcttctctcttgagtagaagaagcagcccattgtgattgtgctagaatgatttggataagtatggtagttttttcagaacagagtggagcattacaattgtaaatcttgtcacgattgcaagaaggaagagaaaacaagagaaaatcaaagtataggcagaatgatgctagcaacaaacttaggcatgtaaacaaggcaaggattctttgcaagaaagcagtggaacatatgaacttgcaagaccaactgaagagctggaagtaggatctcaggaaaatgagaggataaaaaaaaaagttaagaagaattcatgaatgttcaactttgtcaaagaaaggtgatgccaatatttcaccagaagaaaaacaaacaagtgaaggctgttcaaatagctcagttctggacgctcaagatgtaaagaccacctcctttcctagaagtccaatggagctacatagagagatttcagtagtagagaaagccatggttacaaagtaagggttgaagaaggttagttacttctaagaatgatttaggtacatagctctgctccaagaatgtgtgactttaatatgtagtgtatataatgcaagaaggcatcacaaagtcgcacaaaagagaatcaaggaaggctgtgcttactttgaccggtgaaactgatgtatatataatcttgtgaagaaggcatggagactgccaaaattcaaccactaaagttagaagacctcattgcacagaagaggagagatgtctggttctgaagcttggagagagactggagtgtgatttcatggtaagctctggaagaaatactggtcttctctgtctcttctctagtagcttagaattgtattttcactaacctaatctagagcactaaatacatagccttacaagttacaccaaccctcttgacttattgaccccactgatgatttcaacccctatcattctcttgtgatgctttcattttcagtaaatttggttgacctttgggagctgggacttgcaaacctgttgcatgtagtagttccataatgttttctgccaatttagttactaaaattattacatcacatggactgcttcttgttacatatctggcccatgcagtttatttcatttagtaactgaaggtttggcatgttttacatctacaatctagttattagtttgtggaactagaataatctccacattttgatgtcgtaaatgatactatttccaaaactaatcaatcatgtctagcaaattatgtctttttctccttgttagtacttactaataatcttgaaaaaataactagttgaataattcatacatgattaaatgatattcagcaatcgttgttttccatgatctccctctcttttaagtatgaatttattttgataagaattacaaaaaaaaaaaatctggtaggattctacttctgatgtacattatgctaatgtgagagcaacggacatggatatcaagcatttcgtttcagaacaacatgtgaaacttagtatcaatgtaaagtttcttactgtccttcattacagctcattaaattgatctaaaagtttacaattagaattaagaatggcaaagcatggtctgatcatagctgtccatggcttacaatattggtggagtcttcttaggacaccaagtaaaatgcttctttagtgaatatttttgtccttaaaatctccaaagatcaattcaactcatatattaaggactatggaggaatgatgccctgttttgtgccactgacactattgaactgcatgtttattgttttctgttatttccgaagtaactgctgaagaactgacatgtcagcttaaactggaacctggtatccattatcaacgtctccccatcgtcttaaatgctaggaatagtttcttttttcgtaagtcaaacagatctctgatcgaaacacatattgctctgttgagttacatatttctggatctgaaatttgcagatagcaaagctgcggcaatataaactgtctctgttgaatttgtgaatactaagagttcctttcttaaacattatctttgactcaacgagttttagctttatattaactctgttgttcaatagataacgccattaacttttggcatggcgtttgaccattttcttactaaaaactatataagtatcatttatttttttgtggcttcttttatcattaacataactttaaaataacttttttttcatatttacactagaatttgaaataaaacgaatggttaaacgttacactgaaagtcaatggcatcatctttataaaaatagaggtagtatttttctattcatcctaaacaatggttaagtctatgctaattggcatgcccacgagaggtgaaggtgtaaattgatcttgggatatgagagcatcaaacagctctttttaaagttaagcatgattaagcaaagtcaatcctacctccagaacctcatgtgacttcgatatattttccatgtattatcatctcccacatctttggagcttcagttttggtaagaggaaattactcctcttcattagtctcaaattaccgtaggggatattgtctattcactggcacaaattttaaggaaaaatatcctgaaattttatctaattatttacctcaatgtctccttccttgaaatctgaggcagtgaataagggatcatattttttaaggcaaatatgaaggatttgctttctaaagttcatggtactcaggatttttttaaaaacattgtattgaggatcttagaatagcaaaaactatcccaccaagtggaagcaccggcgggtagagtcgtgggtgcatgacttcacccaccaaggttcaaatcttcatgcatacgaatattatgcacatgtaagtagacttttaacatgtttttagtaagattagggatgtgtcgctagttctcgtctcttaacagcggagttgtctccattcctctcccactagctgtaagctgttagatctcaattctccttccatacctatctcctaccccattgacttgttagatcttgattctccttccatccctatctgctacccatcgatcgtaaacaatgtgactcatcctaattatatgggtccaagcaatgcaccaatgtctctgactcatcctaattatatgggtccaagcaatgcaccaatgtctctgttggtcgaaaattgtactactccccaaatataacaactttctagctatatatctttatctggataagagcatattcagatatatagctaaaaattactatattttggacgaaggtagtagttatgtctcaaataagtttatttttcacatatcccacatataccaatataaaaaaaagactacaatatcctcattttatcaaaccccaatgcaattattgctctctatctattcccaatacatttatcccctattttcacaaacttcggtacaatggttgctcaaaaataacttattttgggacaatagggaaagacaaaaaaatcttagggcctgtttagttcccctggcaagttttttcaccctgtcacatcgaatgtttggacacatgcttgaagtattaaatatagacaaaaaaaactaattacacagattgcgtgtaaattgcgagatggatttattaagcctaattgctctatgatttgataatgtggtgctacaataaatatttgctaatgacggattgattaagcttaataaatttgtctcgcagtttacaggcgaaatttgtaatttgttttgttattagactatgtttaatagttcaaatgtgtgtccatatatccgatgtgacacggcaaaaatttttaccccctggatctaaacacatccttaggaagtgtttgagaggagggaaaggagaagattgagaagatacacaaaacgatgtgaaccattagcacataattaattgagtattaagtatttcaaacttaaaaatgattaatataatttttaaaagcattttttaacgttttcgtagaacttctcttttaaaaaaagacattgtttaacaagtcaggaagtatacgcgcagaccgaattctacggcgaagggagtactttctctgtcccgaaaaaacaaacatcgtctcgcaaaaaataaatattcagttttagattttttttttttgacggagggagtagtttgctaggtttccctggtaggagtatatgcttgcctggtcgaactgatgggagaaaaaaaacaaaaaaagggtactttttgtactgtgctatgaccagctggtactgcctccagcttgagcttacctgactctcagactgaaagcaaccattcatgccactagcctcccattctccctgtgtcttcgagtccctgtcacagtctaaagttgctggctggctctccttacaaagtctatctggtagtacagtacaagaccaaataacttatttttattaatcaagaaaagttgtatgagaccaaataatttggcctggatgacttgggagaatcgcttatcgcttatcgctaggccctatttagtccccaaaacaaaaattttcacgcaatcacatcgagtgtttgaacacatacatagaatattaaatgtagaaaaaaacaattacacagattgcgtgtaaattgcaagacgaatcgtttaagcctaattgcgtcatgatttgataatatggtgctacactaaacatttgctaacaacggattaattaggcttaataaattcgtctcgtagtttcctgaattctacagtaatttgttttgttattagactacgtttaatacttcaaatgtgtgtccgtatatctgatgtgacaaccaaaccaaaattttttttccccaactaaacaaggcctttttggaatttggaagtctttttacagccacggttcatgaccagcagcaaagtaaataaatgaatgattataacacttctactcttattttagcagttcaaaaggccgaggattgaaaaatggaaggcgcctaaaaccattacaataattctaaaataaaattctactagaattaccagaataccgagcactgaacatcacttccatccaccatgatgatgaattgtgtggatactccgagcaagcaacagaataccagatcaatatggaccagaataccggcctgcccctgtcatccctcgccttccaattgcaggcatgaaccttgcttacaacttacaagataaaataaaccaatgcctggggcagcacaccattttaatcaaggcacaaacaacatcggctactttagaattacgggatcccacagattcgctaattaaagaacaattggaattacgttacaacattgatcgattgatgtctttttatagctacacttcgaatgtggagtgggcctgcctgccaaggtgcatgcatgcggcaggcctgtggaggtggcagtggcggcatgatagagaccatcgctggcaaatgccccccactcttgcagtagtccaccagggtgtctccaagccctgcaaaactccagtctccgcctcatggcttgtggagcttgaatccaaatacacgaggaacgtagcgctgcgagggtttctgaggcttgaggtgctcgtacgtcatcagaaacaggtgcgggaatgttgtcccaaagtatgcgccgtcgatgtctgaacatggtcaagaaaacagcagaatataacaacaaaatggcagttctatgtaactatgatatcaatgtaacacagatgagagtgtgtggacttcatctaataagcgataatatatattggcactgagaacactaagaaagcaaaagaccatgcgttaaagattactgaattgtttatgtccttagtattgatattagtcgtcctaacaactgtatatgtctgcctgttaaaacttgtcaaagcatttgccaaccactcctatcagcgaattagggcaaaactattagaatatagtaatgctggaaatccaaaggaattctattttcttccagagaaaaacaaaaaaggaacgctcatatagacagtatgataagagagtggttaggatactgccttggtacttggaccgtggatagtagatgtcttcacacttggggcagtatatcttcacagtactagatcggtgtatatctgattgtccaactggtaaacagggttgaccacagcaataaactcgtgggcatcttccaaaatcatagtttttgtacttctccagctgtgacaaaaaatattaacaactgtcaatttatcataaatcggaagtacaacaatataaataccaaagaaaggtaccattgcagccaatcctttactggtcaaaatgtatcgtgcatgaatcagcccatataacatctctgcagctgactccactagctcgttttgttcttcggtgaacatgtcacctacatattgacacaatcaagaaacattagcaaaaagaatgagaacagtagaaaagagaacatggattaaagggagctactgcattatgatgccataaagaaggctgtgttacattactgatgggttatggcatttaaaatagcagacaaaacaacacacatatcctctccatgcttgctaattactaccacaccatttactgccacagaaacctaaagcaatctattagcaacatcactcttaataacattagggcacctaaacaggtgaccaagaacaaaacaaaatcacaaggtttaataatagtgagaattaattttccatgtaatagaacagaaagtttctaagcatgtactatgggtactatcaaggagcaaacgacaagtaacgcatgatggtgcagccatatgcagagttgcaaaagagacggtcatccagaatacaaaagcacaataactaacagtaaaagaaaaggccttttgacctgcactggttatttgttcataatcatagaagttgataacagagatcaattcgaggagaaaaaaaggaacatctatgttttgtgttctttctaggagaggtaccttaaattagtcatggtactccacaatatctaatatctagcttaagagttgaacaaatatctaagaattgtatgtacttttgtttaaaaagtctaagttgacctctgtttggacatcatcaatacaagataccagtttcaactattaagcagatcaaggaagaaatacaggaaacattttttgctcaaatacatccaccatttgtttcatttgcatacgtaaatacagggaacatttaccgtgagaagattcgatatctaaaatgagatcaagagcataatcataatatggaacttgactgctaagcccacagaggttgaagtcatcttgtatataatcatcatcaacctcacagaagaattcattccctcttagactgcagtaccatgaaatccatgagtgatcctctccgtcagaaccactaacatctgatgcttcactatcagattcagactcccctgcaatgtcaagcatggacttgtcaatgcaaaggcttttacaaacaatgatgcaaatgcagcatacctgtaaacacagtatcaaatctgaaataaaacatagcatgcttaatcaacacctcaaaaaacttaaaagttatactccagttagacccgcaatagcatagatgaattaaactaatggactcctcaacccgactggcaacattcatgcaaagaactgggcaatggaaccaaatttaagcaatcaatgaagcataaaaataagatattactgatcgtatgggccacttgatttttggttttggtaacggagaccactccaggaatgtaatttcaattaacctttaaatcaacaacacatgcaaaaaatttcaggattgtttttatttttgttgtccttggagttgtttttgttattcttgtacgtaattaagccacgcgttgtatttgcatataaaatcatgaagataagtgatgttagacaatgccgttaatcttttttgcggtgcacatatggaaagcccaatgggaggtaaggccatttaaggcatttgtgtgcttttacacaacattaactatgcgtctatgcctgaaacaagcagatggtaaatcggatacaacaagcaaacacttcctcaataagatcctacatcagcatcttcaaacatcatcaaaacaacagcccaattaacacaaccctgaaacacctccaaaaaaacttaaactgacatctctacacacatatagaacaaataaatcaactttcatagtcttcaacacatttaggatacattaaacagatcattgcaaaccagtcacaatacctccaacgctccaacaacttcgccgctaatgaaaatccacaatcaacaatcaattacattcctacgtcaaattagttattccctgttaagttctatagttccaaacaggttcataagctcatgccatcgatcaaacaccacatgtgacgaatggttccctcttaggaaagctccgcagacatcctaatcctaacgtttaaaatcaaacaataaatttctaccgcagccgcctgaatccccataaagacgaatatatgcaatcactaatcatatcaaacacaacggaataccaatccagaaccagttccctgctgccgcagcgcaatctatcccctcccatggccgcaaccgcatcagcgcaccacgcaaacgacggatttctcaatctcaggcacgacgcgccacgcgagacggccaataaaaaaaaaagaggagggggaaggcgagtcggtcgcgtcgcgtcgcgcgtgacgtcaccttcggagcaccgtcccttgggcatggacgacgcggaggacggcacgacgaggcgctggtggtca

SEQ ID NO: 6924 - DNA, 23805 bp, Oryza sativa
tacataagcgccacgtcaatgccacgttagattaagacccgagttaaattagctacgtgggcgccacgtcagccaaaaccgccgagagacctaatctgcactggttttgatagttgagggactcgttgtgtctggttttcaggttgagggacgaaaatcggattcgttgacaagttaagggacctcaaatgaacttattccccccttaaatactgacccattttgctttcttgtgggctggcatgatgtcatggcgtgcaggtacatgcgctcctgtggacacggagcggagcagatgggaaggcaacatccatgcgtggccttggcccactgcgttgttgttctctaaaaataaatgcgtgtggccgaacacattccgactcgattttgctatatatttgtcgacaaatttttcccccaaaatttgacagatgtaattacagtacaatcgtagtgtaattacactgtaacttgcatgtagttacactgtaactatagtgtaacttgtatgtaactttcaaaaatctctccgttacatgttatttcggtaaaatggaggtcgtgggaacaaattctttcacatatgtgtgtgctatgatttgttttcttcctcaccaaaacaaatcttgtaatagatccaacgattcaaaattatgtgaaacttacatataagttacactgtagttacatgcaagttacagtgtaattacatataagttacagtgtaattacactacgattgtactataattacatctgtcaaatttttggggaaaaatttgtcgacaaatgtataggtagtcccttccgactggattgggagtcgcgggggcagcagcctgccggcccagtgaggtcgaacagctgggggagttgtctgcggcccatgaagcagacgacgagcggtgagtgagacactcgcactgcacatattgcatgaaaagtccatcccctcccccccctcctcccgcgtggggtgtgcacttttaattttgaaatcggacacccaatcttctaaactttacaatccattcatattttcatattacccctaaagtgatatttttggatggttgttttgcgtagatgtttaaataagcggttttgatagctaatataacatattatattacatgtcgttaatttctagacctcaggttatactctatagtaatgctataatagtattattatgttggtacttagtaagtgaaatactgagagaaaaaaagattgttagaggatatatttaactgaagatttcaacatatatttcaatgtgtataccacatagtcaagcccatgcaacatacttcctctataaaaaaaagattaactcctgaagatgagtatggacaattatctaagttcattatcagaaattggttttttctataatggagggtgtatatgcaaattagatgaaaaccaccataacgggttatatgaacagtattgtaaattttagttgttagatgaactttcaaccaaagtttagcggggtgacatggactttttcatataatctaatactccccctgtttcataacataatactttctagcattacccatattcatataaatgttaataaatctagacatatatatatatatatatatatatatatatatatatatatatatatatatatatatatatatatatatatatatatatatatatatatatatatatgtttagattcatcactctctatctctctatctatctatctatctatctgtctgtctgttatatttttaaaacagccttgaaaggaggcaacacgttcactgtagaggctagaaattccaacattaatcggagaaaaagaaaaaaaaatacacgccattagattatagtgggtccaaattataacggtcgagatgtttcttgacagatatagaaagatatatcttgctctttgtttccgactctagttgtcataccgaagcaaatagattgttattaataccactggtcatatgccagccaaaaaaagagctttattaaggtacgttccggccggtcaacgactattggctggcaaaaaaaaaccacccatcgtccggtaatccataaaacacagctcttaatctttaaggatgcatatgactaaaactattaaaaaaatccatataaattagtagtaatataatttaaaaataactgaaattcaaaaattagaataagtaatattgaaagagaagtccatataagacccaatacgagatcaattaaaattcaaaataaaaaataaaataaaataaaaagagttcaagtaggaatacaattttgaaacaactgaagttggaaaaagaataaaaaatattaaaagaatagtgcatatagaacacaatacgagattaattaaaattcaaaataaaaataaaataaattttgaaattagaaaaagaaaaatagaatttcaactaggaatacaatgtataaataactaaaatttgtaataacaaagactattgaaagaagggaccatctagaacccatgatgagattaattaaaattatgaaaatttaaaaataataataagagtttaagtaggaatataatttataaataaaatacatcggaatgaaaaatatgaaattttcaaactcaacgatgataaatgacaataaagatgggagaagccataagcctgtaaagaagtaaagtgatgacggttgaaggggcatctaaaaactattaacaaaaccctaaagagaattcaatgatgattaaaaagatggatgacggacaggcagttaagaagcacgatctcggcggttggcgagacatctaaaaagtaaaaagtaaaccccaatgataatcatattcaattttaaaatcacaatgccaataaaaaggggaagcaacaggcgagccgtagagaagtccagtggtaaacccgtcacccctgacggtttggcgggacttctagaaagtaaaaaatgaacccaaatgccaattatgtttgatttttgaaattccgatgacaataaagagaaagtagcgaccgggccgtagagtagtatagtggtagcgtttgatgggacttataagcaacatgtctgaaaaagagtagagtggtgacagttgatggggcatctaaaaactattaaaaaaacccccaaatagaatttcaacgacgattaaaagcaggaatgatggacaacatggtcgcaacggttggcgggacttctaaaaattaaaaaaaaaaaaaccccaatggtaatcatgttcaattttaaaatctcaatgacaataaagaggggaggcaatgagcgagccatataggagtacagcgacaaagccgctgacggtttggcgggacttctagaaattaaaaaaaaatgaactcaaacgataattgtgttcaacttttaaaatcccgatgataataaagagatgagacagcgaacgggccatggaggagtacagtaacagcgtttgacgggacttctaagcaacatgcctgtaaatgagtagagtgatgacggttgatgggacatctaaaaacaattaataaaaacccttagtagaattccaatgacgattaatttttactcaaccttatcctctacgattaatttttttatcgtagaggagtatagtggcagcgtttgacatgacttctaggaaaattataaagacgaaatccaacaagaaaataaactctaaaaactataagatcctacttttaaaggttctaaggagaatgaatagaaagtggtagatcgaacaagcaaataaataaggagatgacagaagtaaggggtagcaactggtgtaacttttaaaaactataaaattaaaaacacggggatgataaagtttagtctttcaaagttttaagacaacgagatagctatttaataaatttttaagtaaaattatattaaaaatatataattttgtacgggtgctagccgtgcaattgcgcgggccacccagctagataacatctatatgaatgtggacaatgctatatatgaatgtggacaatgctagaaagacttatattatgaaatggaggaagtatttactattctatcggatggcactgtaatcacctctctcataggctttttgatttgttcgtgctaagggaattactattattgtttcttgtgctgccatgcatgcatggtgatggcgtgcagatacctgtgcgattgtggcctgcaccgtggccctggaggggatgcaccgaaaggtgtacgaggagtccaacggcgttgggacgttccctgtcgcttggcaggccgcggggagttggaacgagcagctgcggctcgcgtgcgagcgcaaaggcgtctggaaggcgcgcgagggagccaatgtgggcgatgtgctaatcaagattcaggagcttgcgggcgtggtgaccagtgtccccggattgttgatgccactgctcagttgggagaagcacagcgccgggcttacccgggagcgcgtggctgagctcatagacctcggcccctgcattgggagactgtgggtttgtccctggtaccattacttcgataccgataatggctgggtttatcttgggtgcggccgggacaaacttgatagggacgatagcaaagagcgctacagaaatcaggtgggctcgcacgctgtcgtctgcttcgcatatcgattctgcgaaaatggtgagatgcatgtgctcgtgttggacaaccatgatgatgacggcccacaacggtggatcgacgttgaagagctggatgcgatcttcaccctgaccgtggagtgcctaaccaacggaggcgcttctcccccaaggaggtgaattttccttcgggacacacacatatatcaaatactatatatcaaagatttctttatcaaatatatggtctgactagagttgttctcctggttggttcctggcaggcagctcgccgcctaaggaagcatcgccagccgcaagcttccgaaatcgaaccaaacatgccctccgagttcgagttggactttaaaaccttatgtctcataaaacatatgaggcctcgagacgattgtataacctccctgcttcttccggccgtagcatgaagcatcttgagctcctgcttctcttgtctccaaataactactagggaaaattcaccgtgtatccctaaaaaattgtccaatctctcatgtatttttctcattttcttcaatactcctgaatttatccttttcataaccttctcgttagttgaccgttaaattcttaaaaaagagagttgtccttttgtatgaagaaacacataaatttatagagtatatcattgaaatatagaaatttgttgtacggaacttatatatttactagcaaaatacccatgctttgatatgggtaaaataataataataatatatcatatatagaatatagcttttatcaaatatgatagtattatttattttcttgtttttatgtatgatatccacttgattcaaataaatattaaactattatataatataaaaaaattatggactagctaatttataaaattgtaaaagtagtaccgaggatggcagaaccaccaaagaccgataaggctaaggaggccgaggcccccctttgctccgccacatccatcgcgccacttcacaaacaagcaccatcactcctctttctctctgcttccctcgattccgtgaaccgaaggaattcctcaacggagggaaggcgaacatgaagcgtggtgagggcggcctgcgccgcgacgtgttgggtgaaggggagcgccgcatcatcagcgaaaagctagtcatggtggctggtaaggttcttgacgtgctcacagttgcgtaagaaaggagacgacaaggaggcgttgtggtcgatgtaggggaaaggggaagcgaggaccgctgtaaccctaagcaaccgccggctgcggcatgaccgtggtggcgcgagctcgctggagtcactggatcgggggtgtacaagaaagggagcgaggacgtcagggcgatgaatgctaagcaccatgtcgatttgcataattatatagggagccaatttgcactggttttaaagatgtgtagcaagagacgaaagatttaaagatgtgagagatgtcatacctggttttacggtgaggggagacgattcaacgtggagcaagagatgaaagaatgcaaaatatactgcgtggggtttacatggcgcttggccaagttgaatccgaccactccacttggaagaagttggaaccgagtcgagagcaaattaaagcgtggcctgcaggagcagagcgcggccgctggactgcgacatggcgtggcggaaactgatatgcgctaccctgccgctctctactctacccagactaaactgtccgtggggaacaacagcaacatagcctacgctaatgcggcggggcacacgcttgagtgcgaactcgagttcgttctcgtgcaagaaactaaggcagtggctgggagtctagataaccagaacagcgaggaagaagggcagcggtgcctcaccgacggtggcagtgccgcggcggccggaagtagaattaatgtgggccggcgatggaacatcttcggacggctctgtggataacgaacaatggtgggttagcgcactggacaagaacagaagaactagctgaggggagcgggggaggaaagctcaccagggcctccctgcaggtggcgtggcgagaactcgatcggcctatatgcgttcgcttcaacgcccattctgtcaggagagtaaggcaagggattcagacagcacacacggtgctggactgctgggagggtgagcagctattggtagagccgtagactcgtagaggttgcgaaccctgcgacgaatggtcgacggtgggtgtgcaggatcaggcggccggcgatgcaagatagcaccaacaccaaactgtcaacttcctccagaaccagatagccagttagccacagggtggttgacagtacttcctccagaagtagatagccacagtatttcctccagaaccagatagcattctcgtttcgtgtaaaatggttaatccggaagtggttatggttagaggaataaacccttataagttagttttactcttgctaaactagcaagttggtactaaacatgcgcacccaactctcatgggccacacatgcctcatcttaattgtgtcaggatgttaccgtggcccaaccggcaaggtgtgctttttcaaactaataaactgtgtgttttgtgtgaaatttttttaataaaaaatgctttaaaaatcaaataaatttatttttcaattttttaatgatcaatatttaattaatcatatgttaattgtgtttctagttttacgtgtagctaatcatccaaattcaatagcccaaaagaacatagcgtaatttctcattttgcatagcaggactttgtcgttacttggtgattgctgaaggttacgaatttgctatattggaaaataccatcattacaattcgtgaaatttgtcacgtgtcaatggaagtttgcaaaattccaaccataacattgccctaaaaaaaatgtttgcacctccatctaaacgtagaaattgtcgaaattaccttttttttttcacattctcctttctctctctgcagttcttctccgacgtggacagctacaccttcttggacgtacgccacctagaccccgccaccgctcgctggcctctgttcggggtcaatatctatacgcggagggagatggccaagtttttccacgccaagagcaggttccacaagagtcaagaccatggaattccactgtagggaaagtttattgatcgctcgagggatatcctcttatttatacatatatctaaatagttataaacaaatttaaaataaattgacaagatagataaggatgaaatatatcacttcacaaacatgcaagttagaatttaatttctacaagttgtaaaaaaaacaaatataattgcgaatgtactataactatttttagttaatttgttctttttattgcaactagtagaaattaaatttggccttgtattttttagagtaatatacactacaacggtcatccacatctcaatcaggcggcaaaccccatatgtgtcgggtatggcgcccgtcacgacgtaaaggttactgatgtgagaagttatctctattgagcatacagccgtcacggatgaagttatctcaatcgggccccaactaaagcctgtcatcgatagctttgacccagacgaccagtcaaataagggctcgtcacggatgaccttatttcaattgggcctcaattaatgcccgtcacggatgaccacaatctcaaacgggctttagttgaggcccgttacggatgagtcatccgtgacgggtttaagttaaagcccgtcaccgatgagtatttcctcccaaaaaataaattctgttttttcgctagcctcaggcctttactagccatgcccgttgtaaaatgaagaaacaaatatatttcacaatatcccagcatccccaatcatatacaatcattcacatacacatatgctattcacatatttcatatatccattattcacatatttcacacatccattggaatacacatccattattcacatatttcacaataacatcttcaagtgctaagcatcaaaacctgcaaaacagagttgtaaattagaacaaatttctaactggcgaaggaagaggttgaggcggcgggcgtgctcggggacagcgggggacggcgtggaggaggttagtggaggacggcggccggctcgaggacggcgtggaggaggtcggtggaggacgacggccggctttgggatggcgtggaggaggttggtgtaggacggcgggcttgggcatggcagtggacgtcgatgcgacggcggcaaggacagcgtggaggaggtcgacaccggctgatgtgggctcggggacggcgccaggctcggtggatgacaacgctgggctcccagacagcggcggcagcacgagggctcggggacggcagctgacagcggcgacgctaggacgtgcagttagaaaaatttttgatctagatatgagcaaaagtgaaaccctagtcaaagcattatctcaatcggggtaatttatactgtgcaataaatatctgtaacggtctaatagttatctcaatcgggcctcaagttggagcccgtcacagatgacattcatctgtgacgggcctaatagttatctcaatcgggtctcaagttggagtccgtcacggatgatggatatcggtgacgggtttctgttagggcccgacaaaaatatcatcggttatctttatcgggcttcaagttgggctcgtcaccgataggtgtcatccgtgacgggctcgatttttatgcacatctaacatgtcagtgtgagtatatctttgccggcctctttttgggcccgtttgatgacttcgttgtgacggcccgcaaaatctaggcatgtgaggggccgtctatgagaggatctgtaatagtgatatttcgtactaatctatattgttaaatttttttaaaaaattataattatatttagatgatatgtaaacaataagtggacaatccctttaagggatgaaaatctatatctgcatatgttttttttagagaagggtatttttacccggcctggatatatacggccattgaaatagggaacttagccccgcaaacaacccaatctgaaattcgctactatagagatttgaactcaagaccttgaagtactatatatacggccattgaaatagggaacttagccccgtaaacaatccaatctgaaattcgttcctatgaagatttgaactctaagaccttgaagtactactcaggtcactgcaaccactaggctacgtgccctttcgtatatttgcatatgtgtgggatagagaaaaagaaaaaggctaaagaaaactagaaaaagaaaaaggaaaagcgcgcggcgtgtgtttctcgcgcgtatgcacgaattcgagctcgacggggcttctccggcatctcatggcttggataaggattgtgaatggatggcgaaggtcagagcagcaagccagcaacagcgtcagtacagcaaatcggaaggctaagaacacgctaatttaccgttatactgtaccagaaccgtagcgggactttatcataaaaaaaggccggcacttgatgacctttgtcgttacatacatttcctttattagaaaaaaatggctattttaatcttattatcgttatatgtttagttaaaatgaaattcattataaaaattcgttttgatatataactttttagaaaattatgaactgcaattaagagtccgatcatctcaagttagtatttaagtttttttaaagatatttcttatacgacttcttctgtatttcaaaagcgaacaaacttaaaactaactcaaatacggatatggatatgtatttctagaaacgaacgaacttaaaaataaaccgactcatacataaatgacgtaccaaattattggtaaaaatatcttcaatttttataatagtagagatacagagtactcacgcactcccacctacacttaccatgtggatgcaaacacgtacccctccgtaaaaaaaaataatcaaatcatacgtgtccagattcgtagctaaagtttatcattttttggacaaagtaatacattttatttcgaagaaacttgatagatttttgaagtggacgaaccattattatagacacctcgctatcaaggttatatcatctagcacgaaataaaaatgctgttaaatcctaaaataaatctagcaaaatatgagtgttgtgtcacattaacaacttaaatatcttactcgttccgtttcaaaatacaagagaattttagtactgtaaatttgaacatgatattttagtactataaatctggatatgatcgtattagtaatatgataaatatatgtatttttgaacttcaatatagtcttcgagatgctaatttaaccaataatatatataaaactaagatttttttaaataaaaagagttacatattatgataactagaaaaatgcatgtgcgttgcaacgggtgattgttattttaatcttattattgttattgtcggtgacatgggaccgggagtatcatgacttagagacttgaggcagacatgatcacccacgtggtctaaccccctcgggggggggggggggggtcgggcccgagggtgatacggccgcccttctctttgtctccccgaggggtcggaccgctcccgtctcggccccgagggccgaggcgccccgaccccttgtgggttttgcgccgcgtatatggggtaggtgagcatagcggggctcacctaaccatatttattgcggtttggacgagcgcgtcacgccgcatgtaacgcagtgcagcgcactcgtttatccggtctgtgaccagtcacagaccgatcagatcgtgggttaggtggcgacaggcggtctgacgtacgcctcgccccatcccgtcaggatgagagcctccaagcactcatccctagccggagccggcgtgttagctcctggagatggcacgttggtcccggtcagatatataccaggcttcatcctaaccattacaagcaagacattgtatgaagaggggcgaacatgcagattgataaactgacgcgtggtggacaagaatgaccgatttgtgaccggtctgacactggtcatgtcgtcagcagacagccatgttcccacgtcgcgcctgcttccggcggaagtggaggtaggtatgggccgtcccatcagaaggtcattcggacggcaaccatacaagtctccgtctgtttatgaaaagataggataagtccccacaaaaaagagagagatggtgcatgtggtatccccttgaggtataaaaggaggaccttgcccacttagaagggggattgatttttttggggggggggtccagaacgatcagagagggagagagtaagagctctctggttctccagctcttttgtagcttcttcatacatagatccaccaaaacacaggagtagggtattacgcttctcagcggcccgaacctgtatacatcgcccgtgtcttgtgtgtttccattctcgcgaaccttctacataccgagagcttagaatctcacccagggcccccggccgaaccggcaaaggggggcctgcgcggtctcccggtgaggagccccacgctccgtcagttatacagtttaattaaggtgaaattcactgtgtgaatttgcttggatatatatattttttagaaagtcataattaagctgtaattaggagtccgatcatgtcaagttagcatgcaagtttttttttaaaaaaagacttcttacatgactccttctgtgtttccaaaagcgaccgaacttaaaaactaactcaaatatgtaaatgtatttccaaaagtgaacgaagttaaaaaccgactcatacacgaatgacgtacgaatgtaccggcaaaaacatcttcaattttataatagtagagatttgtttaatgataaatttagtaactttaattttacatgattaagcttttttctaattaatagtcaaagttaaaaatatttggcttaatactatattaaaaatgcttatattttagaacgggcagagtatatttcattcaacaaaaatttctttaggacggatggagcagtaaatactcagccctactggataagatatgctcagtcgctgtcgttggtatacaaggcagagggccaggttaagcacaattgcactaatgtcccattccaattatttcagtaaggtgtcccatcaaaaaaagaatatttcagtacgtgtttttaatagaaaaggcgtctcctcgtaagcacccggaaattctgctcgtggaaataggcgctgctcgtggaaaggcctcactttcacagtagtaataaaaatgaaccagcaattccgtaataaaaattctgatggcgtcactttcgccgtcccggccagaaaatacgaagtaaaaaagaaccagtgatttaagcgcgtcgatcgatcgacgagggactatgtatttaccgacttactgagaattccaggcatcactgatcaaccgtactaacaataagccatagctagtgatcgatcgatggccggcgtcgtagaaaccgccgacgaagctacccaagcaccagctgttgcttccataagtaccgcagcagcatatgcacggccggtgggcacactgcttgatccgaagctgttcatggctgctcgccgcggtgacatcaacgggcttaaggaacttcttaggccagacgacgacgacgacgacgacgacgacgaggtagtcatcgtggacgtcgaccctgtgcctgctgctccctcctcctcctcggcctcggggtcgtcgcatcatcagctccaacaacttgatgatcatggggtgaccagcaacgagggtgactccctactccatgtggtcgccacccgcagcggcggcggcgacggcgaccggttcgtcgcctgcgccaacacgatctactaacacggcagcagcaacggcgccctcctcgccgcgcgcaaccacaagggcgacacgcccctgcactgcgccgcccgcgctgggggtgcccgcatggtcgcctgcctcgtcgctctcaagacggctgaggtggtggccgcgcccgcgggagacgggccaggtgtggaggagttcctcaggatgcggaaccagtgcggggagaccgcgctgcaccaggcggtccgcgctgcctgcacggcctgcatagacgagctgctgctggtggatccgatgctggccaccgttccacaggagggggagggtggcgcttcccccttctacctggcattttcactgggtaaactggatatcgcacgccatctgttggacaaaactaatggccagttgtcctactctggactcgacggacaaaacgtgttgcatgcggctatttctcgtggtcaaggtacgtgaaaatgatactaagggcctgtataaatcttctggcaaaatttttcaccctgccacttcgaatgtttggacgcatgtatagagtattaaatataaacgaaaaaaataactaattatgcatattgcgtataaattgcgagacaaatcttttaagcctaactagcatgatggcccgcgcagattgcgcggctaacatcattatattttctctcatataatagcatatatatttttttattatattattaaaatatattataatgacaatataattttaaattttacaataactttacgaaactactaatgtataatattcatattatattttatatacgtattagttattaattatttttaatatcaaattttagttatttgtaaattatatatatttctatatggactctagacttgtcttttaatatattttttaattctgaatttttattatttctaattgtatttctatgtggactctaaactcatctttcaatattctttaatttttaatttcaaattttatttacttctaaattgtattcctatattgactttaaactcttcttcctatgtttttcttaatttcgaattttagttatttgttaattgtatttttatacggctaaacactacttttcattttattatgtttcttctaaattttacctagttttaaatttctatatagactctatactctacttctaatattccttattttttaattcttaatttctattttttttcttaattgtatttctatatggactctatactctacttctaattttccttatttttaattccgaatttctattacttcctaattgtatttctatatgaactatatactctaattctaatattttttatttttaattccaaatttcaggtattttctaattgtatttctatatggactctagtctcctcttctaatattccttattttttaattccgaatttcaactatttctaaattgtatttctatatggactctagactcctcttctaatatttcttattttttaattctgaatttcagctatttcaaaattgtatttctatatggactctgcttttttatatggactctatactctacttctaatattccttatttttaattccgaatttcagttatttcctaattgtatttctattggactctagtctcctcttctaatattccttattttttaattccgaatttcaactatttcctaattgtatttctatatggactctagtatcctcttctaatattccttattttttaattccgaatttcagctatttctaaattgtatttctatatggactctaccttttctttttctccgattaatttgagaatttataggctatgagagcgaacgtggaggctcctttttctattcctttaataatataatagattgctccatgattcgacaatgtggtgctacagtaaacatttgctaatgacagattaattaggcttaataaattcatctcgcagtttatatgcgaaatctgtaatttgttttgttatagtctatgtttaatacttcaaatatgtgtccatatatttgatgtgacacgttaaaatttttcacccctgatctaaacacagcctaacactacgctagatcggctcacatgtgatgggtcaaaagtacttgtcacggatggcctcatctttaatggattaataagggcataataggtgaggccatcggccgaggcctgtcatatttatttggttacctgtgatgggccaaaatttacacctgactgaggtctacctttgccgggtgcaaattctggccctttatcggtataaatttcagcccaacacaagtaaccatatacatgtgatgggtctcactattttagccaatgattgcaatttcggttgaagttggtcaaagtttatttaaattcagttaaaatttcggtcaaaaaagtgcaaaaaaatcccgaaattttggtcctaccgaaatcaccaaaatttctgccggaatcaaaagtgtaaaccttgtgttctaacctgtcaaaggtgagtttaactcatctctgatgggctcaaacactgacccgttagaggtgttggaaccctatatatacccttaccgtcaattgctttccatctcaatcctgcacacttttcacttttcgggtggtaaggtaggaggcgaatttttgctggatgcatgcatcttattttgcgggctaattaagagtgatcgagattatcacaattaattaaatacaaactgcaactgcatatatacataatacatgcatgcagcgctgcctgtgcttttggagtggctgaaggacgtgacggtggacgtgcaacaaggcgaccgtgctatcagggtgcctcttgtatcgcatctggcgcagcaaagggaccatcagacggggagcacgcctcttcacctggctgcatcgctggaagggtggccatacgtgggcattctttctaaatggttcccagatgtttggccgcggccgaaatcagcagtcgcgctgctgctagaagccaacacatgtgcagcgtatcaaccggacgctgaaggattataccccatacatgtggctgccttggctgacagcctcgacgtagtcaggaccatgctgcagaaatgcccggactgcgccactttgcgagatgccaaagggaggacgttcctccattccgcggttgaggcggagggatacagagtagttgaatatgtctgccgccgaatgccaaaagaattttcgtccgttctgaacatgcaggataacaatggggacaccgccctacaccgagctgtccatctagggaatctgccggtttttaactgcctaactcggaatccgcatgtacatctgaacataccgaacaagtatgagttgacgcctcttgatctttcatggattacagtcccttcatcgttttattatgattcggtaagttactagtgctattgttcttatttcaagaggcagttccctccacccaaactttataagttatccctccatccaaaagtttaatacctatttcattttaccatcaaaactaaagagtaattaactcatccactacgtaacaaaaccattaaattatacacaaacaaataagtaataagatggtttctcggattctggtcaacaatttaatttagggactatctatacaacattcaactgaaaattagcctaaaaatctatcaaatgtaactgtaacataattacaatgtaattttcataattacactatatttatactataattacatatgtaatttttataattacactatatttgtactataattacatatgtaacttgcatgtaactcacgtgtaattatagtataagtaagatataagttcaagctagatcataaaaatatagtagcccaatggggcagtcacgccttcatcccatgaggtcaaagatcgacccctaaatatggttttgtttttcttcctaaaagcacatatcttgatgcgtattaaactgttatagcatgaatctaggacacattcaacggtttagaaagtgaaagatttagccataaaaaatctgtcaacaaatatttagcaattccatttaatttagtatatagagattacaaatacggtttaaacttttggaaaaaccaaaaggtgaaatagattttagacttttgaatggagggagtaatatttttatacaagatcattgcttaaatgatactagtatattaactgttcattctcgcagaatccaaggggtctcatacaattatcattgcaatttgtgggagctccatgcggtgcaagtcgaccggacctcttatcccaaaaacacatcccaaagatagacaacggcaaggtctcggcgcatctaacaaatgcatcgcaaatgctgggcattgtgtccgtacttgtcgcgaccgtgacattcgcgtcagcattcacgttgcccggaggttaccaaaccgggtcggataacgcggcaggcacaccactgcttgctgggagctatgcctttgacgccttcattttatctgacacgctggcattcatttgctcgtgtatggcgaccttcagcctgatcttcgctggggtccctgcaatggacatctctatacgctgcaggtacttcgaaatttctgccctcttgctgcggagttcgggaagaagctttgtggtcgccttcgcgttggggctatacctggtgctggctccagttgctcacacgatcgcgactgcggtctgtgtgattatctttgtgtcttcgctctacgggaattcggaagcctggcagatccttcgtgtcgcagacatggcccgtgctagattgggaactcgaatgcatgtagcatggactttaggactcacgttctataacgtctttgttaatttgtttttgaacttctggtccttcattataatctttggcctcccagcagtaattcggaaggttcatgcaagggagtagttttcgctacctttccatttccttcgttagcattcggttaaaactaaatctccatgtgatcaattagcaagggacgcatgggctatatacatgtatgtaatcatcccatgtacaagattcatgccccttcatgggctatatatatgtatgtaatcatcccacactactgaaaaaattatctttgttggttcactcaaaaatcacattagtcctggtttgagtaaaaaccaggattaaaaatatctttagtcccggtttgaaaacacacaggtattttttgatcattactccaggttagtaacaccaaccggaactaaatattacttttactcctagttcaaaaacatatcagagccctgttatttttagtcccggttggtgtccatctttagtcccgattgtttataccaaccgggtctaaagttaaaaaaagttgcgaaaatccttgcaccgagccacgcgcgctgcctcgtccttatcccctcctcttctcctcctcccctctcattttctcgatctcctccacctcctccccctccccctctcctcccccttcccctctcctcccctctcccctccctcctctgacgatgacgacggcgacagcgggtggcggcccggcggcgcacgatacggtaggcgggcggcagaggtcgggtcgccaaagcggcagcagcacacggccgacggcctaccctccgccagatccggtggaagggaagcccgggtggcgccgaacgggcaaaggcggcctggcggatacggccgggcggcggaggccgagaggcggcacacggccggacggcgtgttttgtgaaaattttatttttggaatgatatgtaatttttgttgtagattattttagattttggaatgattttgtgaatgactcgtgaatgtggatgattttgtggatgggctaagaactgtggatgatttgttgtgcatgatttggtgatgatttgtgtggtttggggatgatttgtggggatgagggtgacaataaatgcaagaagcaaaaaaaaataaaggaaagaaaaaaggctaaccaaccggactaaaatgggactaaaaatccattaagtatctttagtcccggattggtcgtcccggtttacaacctgggactaaaaggggttataaaccgagactaaagagcccttccccagtaatgccatgtacaagtgaaaagtaaatacaagaatcattcatctctagagttctttacttctaacatgttatcacgcacgttagttgttccacttaacgatagaaggccaagaatacgttcttcgtcaacaggagattggtcgatttcttccaaggtaagaacatgaatcaatttcattcttctacctttgccatcggcatcgagtggctcttccccaaaacctttcgcaagatgccgcaatggtgttgccatgccatggtcactgctaaaaaaaatactcattggtgctggctccaaaggtcttataggtgccagatttggaaccggcacctataccaccgttgccgccaccttcaccaccacacgcgtgcgacgtgaagtaggcgggtgccaggggaggaggggccaccgccgccggcacgcggaggaaaaggggggaggaggggtggcggatgaagaggacggtggagaggaggagaccagtgtgagagagatggagaggagacagtctcgaaaatataaggacggagaggaagaatgatggcctattttttttaataggtgccggtacctatagttatattataggtgttggtttttttaaaagtccaacacctgtagtattggtacctgtttttctctaaaattgatacctgtaatgtaagtgtaggtgtcgattcttctaaaaaaccgacacatgtagtattggtaccagttttttccctaaaactgacacctatgtgtttaaaggtgccggttctatatttttttcattgtggcagaggtgagaaaaggggtataggtatcggttttaaataaactggtacctatgggccagtcgtagtagtgggtctttggtccgatattgcacggagaaatttggtgccgcccatgcttgcatcttcgttggcaaccccgacggcaccggccttgctagctccggcagcatcggcgccaccaccacagccgacccattttgactggccacggcaaaggcgctggccatccactcaaatgatggcatcaccttacagggggaggatttttttttgaacttttttatttttaaattataaaaacagaccattctaaaacttattacagaatctaaacctttggccatatcaactagtctggcgtggcaaaacaatactgacaccccacacatagcgagcataataattttgtcctactacactagcgagaatagtgtgaccaaataacgttgccacgccagccagaccgacgtgaccaaataacgctgccatactagccagaccaatgtgatagtattattttaccacgccaatctaactggtgtagccaaaaggttcatatcttgaaaataagttttgaaagagtttgttttaaaattaaaaatttaaaaagttcaaaaaataaaataaaaatttgagggagagaacggccgcctgccgaaccccactccattctctccaccgcgtggtgccggaccagacccccctcccccgggtgtgattggtcggtgaccagccgcgcggggctgcacccgcacggtcagttttgcccgccttagtccattagtataactactgctgctacaaatactacaactactactaatactaccacattaccactaccagtaatagtagtaatagtagttctattaatactagtactactactataattatatatatatatatatatatatatatatatatatatatatatatatatatatatgcgcgcgcgcaaagtttatatactacgtattaaaaaatttaaaatactaaaaaatatatcatgtatacaaactttgtatatacatatacaaactttatacacacgcatataaagtttgtatatgagcatataaagtttatatacatgtatgtatataaagtttgtatccacacgtataaaaaaccaaaaaaccaaaaaaaaagaaaaagaaaaccagagaaaactattttttttaaaaagaaaaccaaccaaaaaaacccacccacgtgggcttcccacgcgcgagcgactgccccccctctccgcgtgccacgcgttcatccacgcagggggaggggcgcgccccgcgtcccacgcgtctatccacgcaggggaagggcgcgcggatatccactttttagcggatctgcccccaaaccacgacatatgtcctacttccctgcccacttctacatggatgtgcagccactgggggatggggatgaaagcgatggagtatgtgtagctgtggctgatggcagaatcgcggtatccctcctacgtcgtggccccgggccaatgctcctccctcctcgcgcaatgtgtccacgccccgcccgtctctgacaaagtgaaaaggtggactctgaagaaaatggcagaacagtttcagagcttcaagggagatctgtaccagaaatatatcctgaaggggcagacaccgaacttcgacacattcccaaagctaagggatcactgggacgagttcgttgcatataagacaggtgaacaagggcaggcgatgatggaaagaaacaaagaaaatgctaccaagaagaagtaccatcaccacttggggtcaggcggctatagcgtcacgatgccgaagtgggaggagatagaggctagcttgcttgagaggggtatcgaaccggccaccgctaattggccggaatgatcgaagttctggtactatgctcacggtggaacgctcaacccagctgatggctccctgatcttcggcgatcagatacgcgaggctgcgcgttgactaacagacgtagtggaagcctcttctcagggcacgttccgaccggacagagagaaggacgagctgttactcgccctgcagactccagagcatccaggacgaacacgagggaaaggagtgattccttggaagattgggttcaaggaggacatccacacgtataggagttggatgagagcaagagagataccgaggcgaagattgcagattttgagttcagggtatcgagctacgagctcagcatgcaagaggaggtggcaaggaaggttgatgaatgtcacgcccagaaattcccgaatagaattccaagcagaatgtgcattaaaatccccgtccaggaccggcgggggtacacaaacgacaatgttgacattcagatccacgtcttacaaatatcataaaagtcttacataaatgcagcggaaagaaagaaagacaacaggagctaagccttgactagaactgcagcgggaacaccactccacaggcatcctcgacggcacgggcaaagcctattcctcggagaaaccttcatctgacacatactcgtactctggggttgggaaaagtagagcaagactgagtactacccactgtactcagcaagtcataccggaatagaggcatgatgcagggaatcatcaaagaagagctaaagtggatcatttgcataaagcgagcatttataaacagaagttgaaagattaaacagttgtaataattaattagtattaactatccactgtccaacgctatcccacgttgcaacaggcccaaccatccacctaaactatccaaattctaaagattacactagggtgatactaatcacggtgaatctggttgaccgcccataaccgcgggcacggctattcgaatagttttactctgatcagaggtgtacaactgtacccacaagacacagccccacaacacgtttccatgcgccgacatgccaccacgacatatcggaaagaggccgtgacaggacccttcgcataaccccctctagccaagcacaccacacctcaggtttcacccccgtccccagcgggcaacgggcagtcccctctcgtgcctaggtgaatccggaagcgacagaggccgtcgcagggcccgccccgctccatcacgcccacccttgcctggatgcgttgactagaggagagctacactacaagcccagccgttgcccacgctggcttgtggtaagtacgataagttcttccagggcatcccgcgaacaggtccttaattgccatgggtgcgaccagcaaaaccatgcacccacaacccaccatgtgatttattttaattaaccaacaccaaagcggtgtcactaatccaacaaaaccattagaaccaacagtctaaacattaataggattttccccattgtgcactagttg

SEQ ID NO: 6925 - DNA, 4979 bp, Oryza sativa
tcttgtatagtaataagcacagtgaatcttctaaaattcataactaattcatccgagctccgtttaagcccattcaagtctcagtaaatcaagaaaaatgtgtagaatccattaaaaatggttttgttcctgtttcagtagtcttatagcctgtttgcaatgtttgccttgtatgtcgctagattccggttcctccgacgctccggtgtacttcgaaatagtcgccgaggttcctccagcagcagagcaaggcaagtcatgcttgtcacttgaacatgttgatcctatattgcaaatgctctattgtttcctttcaaatattgcattgttttataatgttactatgggatgtttacctattgtcttagccatgttattgttgtaccttgtccctttgtcagcttggggttataacatgactagagattggaccagggattgcttagccatgcttagttcaactagtgcacaatggggaaaatcctattaatgtttagactgttggttctaatggttttgttggattagtgacaccgctttggtgttggttaattaaaataaatcacatggtgggttgtgggtgcatggttttgctggtcgcacccatggcaattaaggacctgttcgcgggatgccctggaagaacttatcgtacttaccacaagccagcgtgggcaacggctgggcttgtagtgtagctctcctctagtcaacgcatccaggcaagggtgggcgtgatggagcggggcgggccctgcgacggcctctgtcgcttccggattcacctaggcacgagaggggactgcccgttgcccgctggggacgggggtgaaacctgaggtgtggtgtgcttggctagagggggttatgcgaagggtcctgtcacggcctctttccgatatgtcgtggtggcatgtcggcgcatggaaacgtgttgtggggctgtgtcttgtgggtacagttgtacacctctgatcagagtaaaactattcgaatagccgtgcccgcggttatgggcggtcaaccagattcaccgtgattagtatcaccctagtgtaatctttagaatttggatagtttaggtggatggttgggcctgttgcaacgtgggatagcgttggacagtggatagttaatactaattaattattacaactgtttaatctttcaacttctgtttataaatgctcgctttatgcaaatgatccactttagctcttctttgatgattccctgcatcatgcctctattccggtatgacttgctgagtacagtgggtagtactcagtcttgctctacttttcccaaccccagagtacgagtatgtgtcagatgaaggtttctccgaggaataggctttgcccgtgccgtcgaggatgcctgtggagtggtgttcccgctgcagttctagtcaaggcttagctcctgttgtctttctttctttccgctgcatttatgtaagacttttatgatatttgtaagacgtggatctgaatgtcaacattgtcgtttgtgtaccccggccggtcctggacggggattttaatgcacattctgcttggaattctattcgggaatttctgggcgtgacattcatcaaccttccttgccacctcctcttgcatgctgagctcgtagctcgataccctgaactcaaaatctgcaatcttcgcctcggtatctctcttgctcctcatccaactcctatacgtgtggatgtcctccttgaacccaatcttccaaggaatcactcctttccctcgtgttcgtcctggatgctctggagtctgcagggcgagtaacagctcgtccttctctctgtccggtcggaacgtgccctgagaagaggcttccactacgtctgttagtcaacgcgcagcctcgcgtatctgatcgccgaagatcagggagccatcagctgggttgagcgttccaccgtgagcatagtaccagaacttcgatcattccggccaattagcggtggccggttcgatacccctctcaagcaagctagcctctatctcctcccacttcggcatcgtgacgctatagccgcctgaccccaagtggtgatggtacttcttcttggtagcattttctttgtttctttccatcatcgcctgcccttgttcacctgtcttatatgcaacgaactcgtcccagtgatcccttagctttgggaatgtgtcgaagttcggtgtctgccccttcaggatatatttctggtacagatctcccttgaagctctgaaactgttctgccattttcttcagagtccaccttttcactttgtcaagagacgggcggggcgtggacacattgcgcgaggagggaggagcattggcccggggccacgacgtaggagggataccgcgattctgccatcagccacagctacacatactccatcgctttcatccccatcccccagtggctgcacatccatgtagaagtgggcagggaagtaggacatatgtcgtggtttgggggcagatccgctaaaaagtggatatccgcgcgcccttcccctgcgtggatagacgcgtggcacgcggcgcgcgcccctccccctgcgtggatggacgcgtggcacgcggagagggggggcagtcgctcgcgcgtgggaagcccacgtgggtgggtttttttggttggttttctttttaaaaaaaatagttttctctggttttctttttctttttttttggttttttggttttttatacgtgtggatacaaactttatatacatacatgtatataaactttatatgctcatatacaaactttatatgcgtgtgtataaagtttgtatatgtatatacaaagtttgtatacatgatatattttttagtattttaaattttttaatacgtagtatataaactttgcgcgcgcgcatatatatatatatatatatatatatataattatagtagtagtactagtattaatagaactactattactactattactggtagtggtaatgtggtagtattagtagtagttgtagtatttgtagcagcagtagttatactaatggactaaggcgggcaaaactgaccgtgcgggtgcagccccgcgcggctggtcaccgaccaatcacacccgggggaggggggtctggtccggcaccacgcggtggagagaatggagtggggttcggcaggcggccgttctctccctcaaatttttattttattttttgaactttttaaatttttaattttaaaacaaactctttcaaaacttattttcaagatatgaaccttttggctacaccagttagattggcgtggtaaaataatactatcacattggtctggctagtatggcagcgttatttggtcacgtcggtctggctggcgtggcaacgttatttggtcacactattctcgctagtgtagtaggacaaaattattatgctcgctatgtgtggggtgtcagtattgttttgccacgccagactagttgatatggccaaaggtttagattctgtaataagttttagaatggtctgtttttataatttaaaaataaaaaagttcaaaaaaaaatcctccccctgtaaggtgatgccatcatttgagtggatggccagcgcctttgccgtggccagtcaaaatgggtcggctgtggtggtggcgccgatgctgccggagctagcaaggccggtgccgtcggggttgccaacgaagatgcaagcatgggcggcaccaaatttctccgtgcaatatcggaccaaagacccactactacgactggcccataggtaccagtttatttaaaaccgatacctataccccttttctcacctctgccacaatgaaaaaaatatagaaccggcacctttaaacacataggtgtcagttttagggaaaaaactggtaccaatactacatgtgtcggttttttagaagaatcgacacctacacttacattacaggtatcaattttagagaaaaacaggtaccaatactacaggtgttggacttttaaaaaaaccaacacctataatataactataggtaccggcacctattaaaaaaaataggccatcatccttcctctccgtccttatattttcgagactgcctcctctccatctctctcacactggtctcctcctctccaccgtcctctccatccgccacccctcctccccccttctcctccgcgtgccggcggcggtggcccctcctcccctggcacccgcctacttcacgtcgcacgcgtgtggtggtgaaggtggcggcaacggtggtataggtgccggttccaaatctggcacctataagacctttggagccagcaccaatgagtattttttttagcagtgaccatggcatggcaacaccattgcggcatcttgcgaaaggttttggggaagagccactcgatgccgatggcaaaggtagaagaatgaaattgattcatgttcttaccttggaagaaatcgaccaatctcctgttgacgaagaacgtattcttggccttctatcgttaagtggaacaactaacgtgcgtgataacatgttagaagtaaagaactctagagatgaatgattcttgtatttacttttcacttgtacatggcattactggggaagggctctttagtctcggtttataaccccttttagtcccaggttgtaaaccgggacgaccaatccgggactaaagatactcaatggatttttagtcccattttagtccggttggttaggcttttttctttcctttatttttttttgcttcttgcatttattgtcaccctcatccccacaaatcatccccaaaccacacaaatcatcaccaaatcatgcacaacaaatcatccacagttcttagcccatccacaaaatcatccacatccacgagtcattcacaaaatcatcccaaaatctaaaataatctacaacaaaaattacaaatcattccaaaaataaaattttcacaaaacacgccgtccggccg

SEQ ID NO: 6926 - DNA, 4415 bp, Oryza sativa
ttgagaatggcacaatgtcaattttctcccgcccccaagccgccgcccccagaccgccgccgcgccggccgccgtcgcccccaggccgccgccgccgccctctgcgccgcctccgccgcgcgccgtcccaccgccgctcgccgctacgggaggcttagacggcgcctgccccgtcgcgcagccgtcgccctccgcccaccccgtcgttcgccgcagccgcggccttcgctcgctgcagccgtcgcgcagcctccgcccggcccgccgcagcccggcgcctccgctcgtcgcaaccgcggcattcgctcgccgtggccgtcgccccgcctccgcccgccccgccgtggcctttgctcgccacagccgccggccttcgctcgccttcgcctgccccgccggtcgccgcagtcgtcgccccgcctcagctcgccccgccgctcgctgaggcactgcccgtcgccccgcctccgcccgtcggcacgcaagtcgtcgtcgccgttgccgtccgccgtcgccgcaccgagataggtgcgccagtggggaaggggaagtagtactggagggagaagggagatgtaatatggccatgggtggggaaaaaaaagatggaagaaggtatgttgaggctgacatatgggttttatttgtcattgacttgtaatggaaatgatagatggagaggctgttcgagtaaacaagagtttgacttgccaaattagatggagagttggccaaatagacatttggagagtcaaaattggagaggctgttggagatgctcttagtgatggtgatgactgatgaaacatactccctccgtaaaaaaaaaatctggacagatatatattcagattcgttatactagatgtgtcatatctattactaggttgattttttatattcactactaggttagttttttatgggacgaagggagcaaggctcttggaaatgcagaatcgtcaatacccggaaaagaaaaaaaacgttaaaatagatgccatgtttattggatttttatgaaatttagaaacatagaaaagtttcaaaaatgttgtttgataatcacaccgaaaaacctaggaattcaagaccagaaaacatgaggtaagacctcatactaattttcctacaaaatttccgtataatagtccattcctaagaatttcaaactgaataaaataattataatgcacgggcatataagtagttgctgaaaaataggacaaagcaaaatagagagtataaaagtgagaaaaaagaaaagagaaaaactatagagaaaatattatagttcatatattacaatgttagcttttatatatgggcttatagccagcatttagctctactattaaacttgctccatgggtgtgtttagatgagcaattggaatttgcttttcctcgtacacaaaacgaaatggattattggtgtatgattaattaaatattagctaatttttttaaaaaaatattaatatgatttgtttttttgaacttagttatggtgatgcacggagttagtataaaatttcctatctctctactactttaaaaaaaagacatatttccgttaatatctacttagtgattgagaagggtctattatgtgctctcatgcgattagccccctcactgttaatatctattcacgcatttacattgaactgataatcggacaaaattgcaacttggcctctttttcttagcaagattttatttatttttattatgcagacaaatctggcacttaatttagggtgtgtttagataatgggaaatggggggtggggttgtgatttggaaatgaatgaagggttagtattaaatggaaaagggagaatgaatggttacgatttaaagcggcgcatcgagcttgtcaacgacggaccgacctcggagttgcggatgaagctcccgtaccaaacgatggcgccgctgagctctcgccatatccgtcggctctggccttggacggaggtgacatctcggcagcggtggcggcacatcgtcggtggcagcccgaatacggcgtctcggcagcatagcagctcgaccgtcgccatcttcccttccttccttctcatctgacacacacatagcctcagagataacgcaaagctccgacacactaacgagggtgctttgtttggctccgcgttcttcacttggtagcgggcggagcatacgtggcagggaatctggcagggaatctttgatgtggaagcccaacgagattgcgaatgggcgaacagtcgcgcgccccctcccctgcgcgactggacgcgtgtcgcatgcggagagggggcgcgcgggcggcggcacagcgcacggtttttcttctttttttcccacaattccgcacggtttcctctcttttagttttttttgtttttttctttccgcggtttttttgtttgtttttttgccgcacggtttctttttttacttttctttccgtatattttttattgttttattttttaatacgtacatatacatatacaaagtttgtatatgtgtatttttatatgtacatgtataaactttgtatatatacgtatataaagttggcatattttgtatacatacatatacaaactttgtatactacgtatataaacttaatatatgtgtatatattttttataatatacatatgtcggtgatatgggaccgggagtatcatgaccagaggcttgaggcagacgcaattgcccacgtggcctggcaccttcggggacgtcgggcccgagggtgaggtgtccgccctcctcctgatttcccccgagggggggggggggttgcgcttgccccggccccgagggccgaggcaccccgaccccttaaggaagtctgcgacacatatatgggataagtgagcacagctgtgctcacctaacagcatttattgcagtctggtcaagcgtgtcacgctgcatgcgacgcagtacagcgcgttcctttatccggtctgtgaccagtcacagaccggtcagatcacgggttaggtggcgactggcggtctgacgcacgccttgccccatcccgtcaagacgaaagcctctaggcactcgtctcaagccggagctagcgtgttatctcttagagatggcacgttagccctggtcagatttataccaggcttcatcctaaccattacaggcaaggtgttacacgaagaagggcaaacatgcacgttgttaaactgacgcgtggtggacaagaatgaccagtcagacgctggtcgcgtcagcaacgggcagccacgatcccacgttgcgcctgtctccgccgggagtggaggtaggtgtgggctgtcccatcgaagtgtcattcggacagcgaccataccaatctccgtccataaagagaagaaaagtccagtttggaaagggaagggtgcatgtggtatccccttgaagtataaaaggaggaccttgcccatagagaaggggttgattcttttcgagattgagagcctagaacgggggagaagtcggctcacactttgtagctccttcatacacagatccaccaaaacacaggagtagggtattacgcttctcagcggcccgaacctgtatacatcgccggtgtctcgcgttctcttgctagcagacaatctttccacaaacagagagagcttgagatctcaccctaagcccccggccgaaccggcaaaggggggcccgcgcggtctcccggtgaggagccacgagctccgtcatctggcgcgccaggtagggggctcagtgtgtgttttctgagctctcagactcttccgtgtgcgccaagtttttcttgttcagcctaatggccgagcaaggaaaagcgcacgatctctctccgagtgtgagcggcgacgacggggagccgaatccacgccgtcgagctcgtactcccccacctcctccgcgccaaagccctaagcagggggaggcgcttgagagggtcgacaaatccgtggcatcaccagtcgcaggtgatgcaggagaacggcgagatggggagcgtcgcctcctcgtctacggcgacggcagcacgcctcagggtgcgcttcaggctgctagcgcgctcctacgtcacccacccgtcgtccatgaccctgagtctccagctcagcgatggctggacgacgtggccaacttggtcgtgacggcccagcagcgcctgggtgctggttgtcacaccccgaagttttcctcccaagccaaattgtaaattacaaatgaccccaagaaaatgcagaggaaatcaggataaaaccctaagaaaacaatgcaaataataatcggatttgacatgtggaatttttcttgaattctacatgtcgaaatgcattaacaggatttttagtggaattttcagagctctagaaataattttaaccaattaaaaatcactaaagtg

SEQ ID NO: 6927 - DNA, 23640 bp, Oryza sativa
cgctgtttttcgttgtctttgtgtgctgggccgttgttgcccgtgtaataattttatatacgcttccgcttgttaaactctgatttgtatcaacttttggtgtaccttgcctcctgggacaaggaataatacacgcacgtcaggaacgcctgttgggtgatttccggtcgtgacaattgtatcgtgcgcgcgttaattatgctcgccgaccgaagcggcgttaccgtatctccgggcgagacaaatctactcacccagattcgcgcgctgctcaattggtgtggcagtcttgaatagaccgcccattatggacaaccaaagttaccaataccaatgtgcatggattgagaccgttgggtattttgcccaactacggagaccggtcccacctgtcaccaggctttaggggtggcgtcacacctgaccgcttcccttgggaagggaaattgctctggcataacgccgggggctactgtcggtgatatgggaccgggagtatcatgaccagaggcttgaggcagacgcaattgcccacgtggcctggcaccttcggggacgtcgggcccgagggtgaggtgtccgccctcctcctgatttcccccgagggggggggttgcgcttgccccggccccgagggccgaggcaccccgaccccttaaggaagtctgcgacacatatatgggataagtgagcacagctgtgctcacctaacagcatttattgcagtctggtcaagcgtgtcacgctgcatgcgacgcagtacagcgcgttcctttatccggtctgtgaccagtcacagaccggtcagatcacgggttaggtggcgactggcggtctgacgcacgccttgccccatcccgtcaagacgaaagcctctaggcactcgtctcaagccggagctagcgtgttatctcttagagatggcacgttagccctggtcagatttataccaggcttcatcctaaccattacaggcaaggtgttacacgaagaagggcaaacatgcacgttgttaaactgacgcgtggtggacaagaatgaccagtcagacgctggtcgcgtcagcaacgggcagccacgatcccacgttgcgcctgtctccgccgggagtggaggtaggtgtgggctgtcccatcgaagtgtcattcggacagcgaccatacatctccgtccataaagagaagaaaagtccagtttggaaagggaagggtgcatgtggtatccccttgaagtataaaaggaggaccttgcccatagagaaggggttgattcttttcgagattgagagcctagaacgggggagaagtcggctcacactttgtagctccttcatacacagatccaccaaaacacaggagtagggtattacgcttctcagcggcccgaacctgtatacatcgccggtgtctcgcgttctcttgctagcagacaatctttccacaaacagagagagcttgagatctcaccctaagcccccggccgaaccggcaaaggggggcccgcgcggtctcccggtgaggagccacgagctccgtcaacatacatacatacatacatacatacatacatacatacatacatacatatatatatatatatatatatatatagacacacactttatatacatacatataaactttgtatacgtgtctatataaagtatatgcatatacatgcactgtacagagagactaaaacgtgagaaactgatcgaacggcacgcgaggggcgcgactgatcgccaatcagtgcctcccgaatcctgaggctgaatgacataagtgtgcattgtgagaattgtatccaatgtgtagctttgttctagatggcatagctttttcaagtgaagcactatggatggccttgggaggtcagtcgcccccccccccccccccttctagtctctcttacagtatacaatgtatatagtatatccatacgtgtgtgtatatatatagtaatatatttttaatgcataaaaaatatatacacacaaaatttatataggacgtatacaaattttgtatacatacgaatacaaacttagtatacatacatgttaaaaacacccggaaaaaacggaccataaaagaaacaggaaaaaaaagaaaaaaccaaccgaagagaaaaaaaaaacagaaaaaaaccaaaaaaagggaaaacccgctcctccctcatcccgcacggcacgtctaccgtcctctctctccacgcgcgacatgtgtccagtcgcgcggggaggggcgcgcgactgatcgcatatactagcaatctcgcttggagcaggtacaatagcaggctataaggcagctacaaacatattttaatgagataaaagatgagagagaagagcagcaggttacagatctgtagccagctgcagcacggacttcaagacacagtgtgtgtatgataggtgggaccatatattaatagtatagtaaagcatctattgtataaattggctattagattggctataaacgaattagagctagtagtgggctatactatactattaaacttgctcttagagagggcggcgaacttatcgcactggcacgcgaccacccgcgcatcagccagcccccacatgcattgtgtccgagcgtgacactgacaactacgtctcatgtaggggtggaaaaaaaagctcgggctcgtgagctcagctcggacttggctcgagcttggttggcttggctcagctcgtaagtcaaacaagccaagcccaagcctcctttttagctcgttgctgaaatgagccgagccgagctagctcgcgagccgcttgttttggctcgtaagcctaggccatcgtgtgtttatattgattattttactttatatagtgttattatttgtcaacttgaaatttatcattaagattttgaagaattgaatataaaaacttatttaaattttacatgttgatgatttgtttttacttttttttaataattattaaatatatatgaagaggtgtttcaacagaaaggcttgcaagccagctcgagctggctcgagccaggaaacgagccgagccgagcttaagttttagcttgtttttctaaccaagccgagccaagccaagcctagttttttgcgagccactacaagccaagccgagccaggcttgactcggctcgtttccacccctaatctcatgtatagttggccatgtgggccgcccggcacggcacggcccaggcccggccgtgcctgggccgaggcttgtcgggccggcacggcccgaccgacgcaccgggccgtgccgtgccagcccacgtgccgcactcacggcccaggaccggcccaacacgcctcgggccgtgccgggccggcccgaaggcacgatgggccgtcgtgcttttcctcagaataagtttaaatttcctccctcctattgggctgtgacatatgtacagctacaaaaagtctattttacctccctcttctttgggctggggtatataaatagctaaaataagtctatttaaggtccctattctttagacagttacatttatatgtctatttttagtccccatactttatgtaccgggcctggcctgccggcccatcgtgccgggccggcccgaccgtgccgggccagcccagcgtgccggtggggaggcccaggcacggcccgacggtcgggccgggccagcacgggcccgacccaagtcgggccgtgccgtgcttgggccgggccaaaaaggcgtgccgtgggccgggccttcgggcctcgggccttatggccaactataatctcatggcatacgtacgtactcccgagtcggacatctctctgtcggccgttggttctatcccgagtcggacatctccctggcctcccggtgcatatatacgcttcgctccatataaggtacgagagagcggccgcccggcgtgatcgatcgatatcaaagtatagctagtagaacaccatggatcagaacggtgctctttcaggagctggaagatcaatctcatcaacgacaacgaagaaggccgaggcggcgtcgcggtcgccgcagcagcagcagccggatcacgacgtggaggcgatggaaccagatgcggagtgggaaatactacgcccgttgtcaccggaccctcctgagttggaggaggcgctgcgacggctagcggaagccgagcgtatcacgggcgacgagagagctgctgccgccgcccgcgcgaggcccggggagaagaggtccgtgtccgagctgccggcgggctggaagtaggagtgggacgactccgtcgcgatggccaagcgctacaagtgcaactactgggacgaccctgcgtacgatggcgtgctccaggatatcggtcctctcctggctcgtggcgccgccgtcatcaactacgccgaccgcgacccctaactaagccttgcattccttgagggaaaaaaaaacagattttctttctttctgtgtttgtttgatcaattagtttttatttgcacatgcaccgtggtgcatatatataagatgtacatttcgctaagaaatactccctccgtttcacaatgtaagtcattctagcatttcccacatttatattgatgttaaggaatctatataaatatatatgtctagatttattaacatcaatattaatttgaaaaatactaaaatgacttacattttaaaacggatgaagtagttgtcagtcgataataaaagaagtaaataactcgatggttaccgaccctctcattctcttttgcactacccctcctacaagaacatgctcagaactggctcgtggctgtttttttttctcttttctttttctagttttttttaacaaaaatatattaatataagatatatccactatataaacatgtaaaattcaaatttagatttatacatgttgtaataaaaataacaaattgtataagttaaatttgaccttgtatacaatttgcgaggtgatatatcacatattatttatcttataaaaaaatttaagtttttttatgaccatttagatggtatgtaagagaatgacggaatgtcgtctactgaaacgaccaaaaaccatctccggaagatagagattatattatgtggcaacactgaattagcacaggtcaacagtacgtgagcacgatcacaaagaagaatgttgtcaaccaacatgcatattaagtatcaatttgcaaacaccctaggcttgcccaagtaatagtctataacagagaggcaggcaggagttatcaagctaatactaataagagagcaaagtgctaaggagaagaaaccgatatctagtaggaacaaaccgaagatgaagtcaaaatagttggagctagcagaaagaggagggagggaggacgggcgaagtagaagaagatcgagtagttagcctcctttgcgaggcaaaagatgagacgggtgtcgacgcagccgggggggaggggagatgggtctcgtctgcaagttcaccatcttcaaccgcagttcggacgcccgtctcgaatgagaatcatattgcttgatcagatcgtcaatcttggcctcgctgcgttttgtggaatcaattgcagatgcccagtcccgcgtcttcttggctatttctctgttctttcttcgttcttcaacctctcgctcgatcttaacccatacggcctccatttgctggtacaccactcccagttcaattgacgccgactcccgcgcggctgacttgtcgtccgcgaccgcgacgacgacggcctcgccaccctgcgccgcgtcgccgactcccgccaccaaggcctgcggctcagcgccgacgcccacgccaccctccacaaccgctgggcgaacacgcagcggcagagccccgccaccctcgacgtcctcaacagctccctcgaccgctgggcgaacatgcagctgcagcggcagcggcggagccccgccaccctcggcgtcctcaaccgctgggcgaacacgcggcagtcgagcctggtcaccctcgaccgctgggcgaacatgcagcggcagagccccgccaccatcggccgctggcggaccacgcagcgacagcaaagcctcgccaccgcgcctgccgcgcgcctcgacgcgacgaagcggggccccgacccgaccacggactcgccaacgcggcgaacgcagacgagcaggtccttgtcgccgccgccgcaaatctgggcgtagagctcccttcgaccactgcggtctggcaccaggaagccccgaactgctgcgcccggtgagtacgcgcgcttgctgtccgtgacttccaaaacgggaagccagaatggcccgtcggtgttggcgccgatcttgggcaaccacactggagtatgaaggggtggaggaggaggaggaggagaagcgacggcaacctggctaccgtgctggcgtcctctctccacgtccacgacttcgccacgcacggcccgagagggagcagcgtgcccacctcctagtgcgtggccacgagcgacgggatggagatcgccgccgcggcgtggctgctggcgcggaccagcaatccattgggcgggatcgcgcccggcgccgcctcgtgccccagcaccatcgagctccagctcctccaggacgccgcgtcgcggttgccgtggttcccccgcgacgaggccgtggccgccgtggcgtggctgaggacgtggtggaggagcctcattccacgcggcgcggtggggaccgacccgatgaggagggcgctcgtggtcgtggaggccgccaaaccgccgcggagaagcatggcgaccaccgccctggccgtggcggttgccgaagggaagccggccgcgggcgcggcggcgtggctgtggcggagcagccgccacccatggcgcgcggcgcggctcggccgcctgttgattccgcatgttgcgtgttgcgcttgcggttgcggaggaggaaggcggttgcgaatgcggcggtgggtgggtgagggaagggcggcgattggggtaatcgtggatgggagccgtggcggaggggattttattgaccggcacgcgctgcacttgcacgagcgcgcggcggcaagcggctcgatctatcgacgaggatgagaggaatggagaggcaggtgggcccagcctctctgcttccagaagcttcgatacaaagctctgctctctgcttagcttccgctgcaagccagagccgagagggaagggaagaagaagaagaagaaggccgttgcatcgctgcttgtcgatttctctgatttatacctcgtccaatcagtagtgtacactgcacgtttccttccttggccttgccaccctaccactcgcgccttcctcgccgccgtcagcgataccttcgccgtgctcctcgccaacctgtcatccagcggtggtggtggcggcggagccactcgccgacgcgccggcgttggccatggcgtagtgccgcccgtacgtcgcgggagcggactgcgtcgcgtgcttcgacgccggccgccgcgtcgcgcctccgcgccaggtgcggcgccgccaacagcgggcgcgccatcctcgacggctgcgtcgtgaggtacgagagcgccgcctgcctcgacggcccggccacgctgcctgagaacacgcaggtgtgcaacggctccgccgacgtcgccgacggcgggttcgtggacgcagcgcgtgggctggtcggcgagctcgcggccgcggcgcctcgcgcctcgtggctcgcggcgtcccagtgagtggagactgttggggagggcgggtgcacgcagtgccaggaggtggcggcgaggaacatcgacgggcggccgccggactccgacgggcgcgccatggacgccggctgcttcatgaggttctccgacaagccgttcttcccggcgaacgcgacaatagaccgtggcggttgccaaatgggagccgaccgtcgcggcgcattgtggtggtcacgccgatgcggggaaaccagcatctccggccgcttcgctggcggcgatatcggaagggtggagccacgtcgtgcggcggcggaaacagccatcgaggcgacgagcggcatcagcgcccgttctcttcttctcctcttcccgcacgacgcggtggcgcgcgatggtaatccgcatcgagctcgggactcaggagggcaggtacgtggagagccctcggtatcgaggagccccgtggcgtcgccaccggacgaggcgcaagtcacggcgaccttcgacttcgacgtcgctgatttcgacggcatcaagcactcgctgcactctctcgtgcgggtgatttcatcagtgtggtgccgactgccgacagccacggcgtgcggctcaatgcaatctgcctatctcgccgcttgacatggcatcccgacgccggtggcgattcgtgggttcgctgcctgccttccgccgccggtggccaccccgtaacgcatagagccgccggtcacctcctcggcgcgggcgaggcggtcgcagtgcttctcctccgctacgcaacggccggcctccacgaggttcctcctgttcgggtccgggccccgcacgtcagcggctccaaggggagggcacacggtggaccaagtccaccgcggcctaggcggcgccgtggactaggagcacgggcggtccacgggcagcgcccaaaatcggcaacggagggagctgactcgccaggcgtcggcggcacacggccggacggccaccggcggcggcggcgcgacgcggcggcgaaaagaggggaaagggagaggagacggagggggtcctcaccgaggggcgccggcgacggaacgacgacggaaggcggccggcggagcccggcggagtgggggcggcggcgttccggcgacgggcggcgccaacagaggggcagccaaggggcgccgtgacgtgaggaaggtgatggatgggttaggcgagcgcagggtggccgggaaccacgaggaagggtagttggaggcaacaagcacggcgatggagctcacctcgcgcggggcagatggcgttccggctggagccaagggactcctcgtccttgcagagccgaaggaggcgacgacgcatcgcgaggtggtctgggacggcagcaggaggcggccggaggcggaaaatgcggcagcggcctaaggttggcggtggggatggtttttcggtggtggttgaagggagaggagcggctgccggggtggagctcagcatggcgatgctgacggcggcggcggcgcagcgcagcggccactagggcggtagtggtggccggctggacgcgacgggaggcagtggtggctcggatgcacggtggaatggcgttttggtggtggttttgtggatttggagtggaggccggggtggagcttgatgtggcgaagccgtcggtggaaacggtgcagcacggcggcgacgggaacggcggtggtgggcggctgaatgatgccggcaagcggcggaggttggtggcacggtggggcggctttccggtggctattggggaaaatggagcagctgccggggtgcggcaaagagcggcgaacgcgatggcgcaagcggcgcggcgcggggacagcggcagcggcggcagcggccggctggagggtcgctggtgagcggcggcgcttgggctcacgtggggagcacgggagagggcgcgatgagctcggggaggaagggtaaacgaaagaggagagcacggggaggctttttatagagcgagggagcaacggggaggccggggagtggcgaatttggagcggcaacggccggcgacgtgggtgacatcgtgggcgaagtggagctcgatcccggcgcgattttctggggaaacgtggggagagtgttgagcaggtggaggggaaccgatttcactcggtttgggcgcgagggcacgagtgggagggctggaatcggcggcgacgtgggcggcaacaggcggcatggcggcttcgggcggttgctggccgggatggaggaaggttcgggatggacctgacaagtgggtcccgcagtcccacttgtcggcctgagggagagagggagcagggggttatttagacttcaagggcgagcgggccgagggggggagatagaggcccgagagggggaggggcgcgcgggccgcgggggaggggaaggattcttgggccgaaaatggcccaaggaggaggggagtttttaatttgtttcctttttatttaattgattcaatgaactttgtactattaaaattacttcttgagctccgaaaattcacggaaaattccggagagtatattagggcacaaaaaatattacaaaatattcttggccaatgatttttaaaggaaattttaatttcctccataatttcacttgattaaattgatttatcttttatttaatttctagacaatgcaatattaaatgatttttaatcccgaccgaaaatcggggcattacagctgtgaatgccctcacagtgcaagtagctctcccagtgaggttcgcaggttactggctgtgttgggtgggctccacgagccaacattttgatgtggttcacgtggccttgcgaagacccgagaggcatagcagaggtggggcccgcgtcacatgtagtgctcggggaaatgtttgttttggagcaacaagtgttagccacaagtaaaatcaacttgaacatgtggctcataggattttaccgttgcaattatcacctcatgagctatctctaccctgacatgataatctacaaggttctcatgagaacacaaaagttcatcatgtgtttcttgtaaatccatatacttgttagtgatctcaccaagtttggaatttggagcacataaaaaaccaatgtcatctcggtaacatgtatcgatattgatttatcttgtatttaaccttgtgtaggttgtattgtattctcatagcatttaagaatttacattccttgcatatgtgaaagtcatcatttatgcatttttgagcaagataggttgtggcatacgagtgtttagtactcaatcatattcatgcatatcacatccctcatatgtgctcaagttggctaagtgctagttggtaatttcaaaataaaccatttagccaaaagtgaaaattttgaacaagtatagcttttctatgagaatatatttggaaatgattttaaagtatgtttgaaatgtctctcaatacttttgtatttcaaagaagagctaattttcaaagaaaatgaattcaacaaaaatgtagctctaagtatcttgttttagcttttaacttaaatgttttgtatacttaattctaaaaggaatttgtgaatggtttcaaaatgaaaaagatagtttggctaattcaaacatttttggtattcaaaatttctccaagaagccaatcaatcaaaagaaatttaaatctcaatcttatccaaaacattatcttgaccataaacggccacctactagcacttagatgagttctcattgttgggttgcataaatgcatcattctagctcaaatgggtacataagattcattcatactcatttctctccaaaaccatctcatttgcttcttttcgcttttttagagaaaggtatttgagaagagagcttttgtagtcttttgtaaaaaaaaatggcctttactatcaaatcttgaattcatggagcaaaaatgagggatgcatcaatggggagcaatctgaatcaaatccatattcctcttgctctcaaatttgaattttccgaaaagttgcatctatagtctttcaaaagagcctattttggtcaaaagtcaaaaatcttatttaaatagcccaaatttgtgaaaatcctttcaaaagtatcctaatatgtatttcaaatgttttgcaaggcttttgaagtaaaaattttcatttgtgaaacaaaatagcaaaattggtctcaatagtatcttttatgatcttgtttttgctcaaaatgatctatctccctaaatcaaaatctattgcattttttaaaatatttctaatataaaagtttgagggttggtcattccaaacatttctctaattcaaagtttccccaaaagaccaattattcaaactctataaccttttgagtttcagccaaaaccttgacttgaccatttttgccaaaacttgcatatggtgtgttaagccttttgagccaaagttctttgtgagtcttggcttagaagtgtttctataaccctcctaaggtcttacaaatgtcaaactccacagatttaaaatttgaatgtgatttgaactctcaactcaaattttatcaatctaaaggcctacaatgctccttttgtattttcttttgatagaaaaaagatttttaagaaattctttttggaaaagttactcacaagtataaagatcataactgcacggcttcaactcatttggatttgatttgaaattattttgactttttctctttttgctcagcttactgaaattttcagaacaagggctgatttgtgatttttgtatctccaaatagattgcaaatttggaagagatcaccatatgacttttgttcctctgtagttgagctcgattgccaaatttacccagaatagttagaggtcatttgggtgctttttcaatgttgttttataagctaatatggagttatcaaaaatctgaaaaatctgaaacttccagtttattgaaactttgagatgtttttatctataaatgggatgcaaactagaagtaacttacataacaacttttgatcctcaatagttgaagtttacttccaaatttactcaaaattttcagtggtcatttggatgccttttcaactccttttcagtctcaaaagtctgaaaaaaatcagaatgttttagttggctgaaagattttgagcttcatttctacatttcggttgagatctaggaaatggtcccaaaataaaacttgtgtattctttcatgatctagctccagaatttatggcatatttttttgatctcgtttccacatgtttccattgccaaaagttgccacctttgctatatgcttttcagcaaaacatggattcaagtgcatatcacttcttgttgattatttgagcatggtggtgaaatataagatatttcaagtaatgagacctttctttttagaaaaacttcatgaattcttgaactcttttggatgtgttccttgcttgaactcttttggtttttgaaatgcccatgatatatgaatccaccgaaactcaaaagtcatttttatacttttcagaaccaagcctccatgggtagactccaaattctaatctttgccaccaaatacaagttgatccttgctatcaaagccaactaccatttcttgattccaaatttacacttgcatacacaagtagtgtccatataaaatggtagtatcttttgatcatcttgaactcggtatttactaatctttgtcattccattaccgggattacacacttgaccaaaaatctctcaagtatctttgatcaaactcctctcacagagaaaataattgatgagtacatttcgagagaaagttcaaatgctcacaatcactccctcctacaaataaaatccattctaattcttcttatctaagtgacaagactccgagagtaagggggagcatttcttacatggatcttttctcaaatttttgctttgcactttcatctaatttttttatttggtcttatgaatgtttgttcttgttttgcttgagcaaaattgtttctctttcggttccatgcaaatctttttgtgattaatgccaaaagggggagaatatttgaggatcccatgtttgatatgatcgttgatatacagggggaaaatattctaggatcccacaattggtgcatatcatcacttatcaaagcatccagcatgcactatatgcacaagcatcgcatgcatagcatacaacatgcaccatatgcacaagcatcacatgcatggatataaatcaattgccattttctcatatcatgttgatatcatgttaatttatatcattgatttcacccttcatatccaaatgtggtcattattaatggatttgtcgtaaatcaccaaaaagggggagattgaaagttcaagtgccattaatttggttttggtgattaatgacaaatccaattacacgagactaacattgttataagcatatctttatctactagtctcatatatgaatatatgaaagtggaatacattagtgagataagagaacaaacaccaccagccgacatttctgctcctcaaagaactccatcacctccagcacatcccacttacaaaccgagggtatgcatttattttctatctattgctccaatcctttatgccgattctcaacttgtactattgtagaaaaagaagctagcttccaagaaaccaagagcactagccccatcggtaaactaaacttgaaatctttctttttaagtttccaaataactgatgctaatccaaacttatttcttttcagcctcctcgttctccaactcctattcctcatgaatcaagcgaacgcactccatcagctgcaggtagccatcatgtggaggaagaagtagcaccagcccctgccatccctgtaagtgcctcttttgaatccacaaatcatatcggctatcatgttacttctactaatcagtaacctcaatattcccctttttcatgttctagccgatatgttttcttttgacatcaggtagtttatggatgaagaggaagaaactacaagtaaagccttggtgcctctagccgataatgtgaaaacaaccttgctggatatctcaaagtggcttgaaggctccctagaaactctggtggtcagttgtggatcaatcagagatagattccttgtaatctacgaccaactcccagatgaactagccgatgttatcaccccagcggcatacctcgaacagcatcagctcaagcttgaaaaggctaaacaaagggttgctgatcgccgtgaaagaaaagatcttgaggccaccatccaggctagtaggacttctattaatgaagaaaaggcaaaacttgatgagttggaagctggtccaaggtccactcaagccaacatagatcggctgaatactcggaagatagaactcctagccgaattggagcagtgcaatgcacatattgctattgaagaacataaacttgccgatctgcccaaagctactgaggatcagagatcatagctcaaatcttctgtcaaacatctagctgatctaatcaagtccctgaaagtaattcttggatctgatgcagtcgatacccagatcattgatgaggtagaacagattaggcaacgaattatatcggctatccaaaaatatgtatgtggatgagctaaacatgtaacatgtgaatgtatttagtttgttaccaaacattgttaatgcctagagaattttgacaacaacatatttagtctatcgctctatcctatcaaaatttagtaatattgtcaacttgacaaaattttggtattgctaaaatttgaaaaatgtttattttggcagtataatactctctccatctacttttgatagttatattttcaaatttgaaaaatttatttttgataggcatatttcaatccaacaacttatcatcttaatgactttctcagatttaatgcatgactctccattcttccacacaagattggttgcatgggcatcgagaaatgtaaatattaatgaatcgcttgtttacgagaaatgactagtagcatgtttaaatggatgataagtagaattatttatccttgatctgtgtgtcaagataaaatatgactatcaaaagcagatggaggaggagtaataagaaggctaaaaaaaaattggtgtctaaacggggaagatgcattcttaatggcagcaatcccccacgtcgacacgcagcccaagcgaccgtggccctccaggccccgactcccgagcacgagtatgcggcaacgagccggacaccagcaccacccaccaccgtggagcccaaccgaacccgaaacccactctccccactacaatcccacaaaacacagagaatatcaccgaggcgaacgaaaccgaaaagaaagcgaaaccccgatcccccaaaccctagcgcgtactagccccccgggcaaatcgccggcggcgatggcgatggacgcggagcggcggcaggcggagctgatcgagcagttttccgcgcaggcggccgccctctccttgtcggcgccgcagctgtcggcgctcgtgctagaggccacctcccacccggcccttttcgccttctccgagctcctttccctccccgccctctccaaggtataagggaccccccgcctctcgctccgcctgcgccccgccgcgccgcgcgtgtttagggttagggttttgggggtggaccacctctcctcccccctctgatttcgatctaatgtcagttcgttgatgcagctcactggaacgcagtatgcgtcgtctctggacgtgctccgcctcttcgcctatgggacattgaaggactacaagagtaagatcaccccctcccgttgcgattcgtacattacattgcccttatgtatgtgttgtcatgcgtcatatgtgtatgcttatttggtgcgtgagtctagtgcattgtcttgttgttgtgtgttaggggtacgccctatgaaatagccgcttaccatggacgcgattggcatgtgagggccatagcccatatgtttaatggttaacaatagtgctgatttgtgttaatgttaattcacactttttttttgtgttatattgttataggttaattttttgatgggattcacatactaattaatcataattcatctttgtcttatggtttatattctgcaacaatatgtggatagaattatcacatttctgtgcttgaaatcataatttgagctgtgacaatcaatttgccttttcacccaccaatatgatcagtgtgtgtcaggctgtggttgctagaattttgttgtttcctctctcatcggcatgtcattaaaacggtctgcagtttgtggtattctctgtttatagtaatatcagataagtgcagaacatgaacatttactgtttcattaattgtttttaattttcatacatgtaggtaattctggcaatctccctgcattgttacctgatcaagtccggaagctgaagcaactcagcgtgctaactttggctgagtcaaccaaggtgcaaatttaggctgatactgtctaatatgctatgcatttttttttttgcttatcctgtgtacataaagttactaagggagcgtttagatccttggcaatggggattttagccttgcatagcaaggggagttatcatttggtagtaaaagaaaacaaatctaactttctctgtcaatctagcttaacaattgtcagaaaaaacttgctgtcaaaggagagaaaaaatggccccatcttcatcgacaagcatgtgagcatgaactgttgatggcaccaaatatcgtgcctcgctgccttgcttatgtgggccatagatgaaatgagcaggtttatgccaggctgagcaaagataatttaagatccaaatgtatcctcacagttgtttcatcaaataatagctggtctgcatgtttattatctaggtttttcattcttctttctttacgtatgatgggaaatagttctatgcagttatatgtgttaagtgatagtgattctctgaacagataacaaccaatgccagaaacaagcttcttccatcctattatgtgtgcccaatttagctttacactatctgtgaatactatcttattctttatgtgcatagcctgtttgagtgtgcactggaagtcaagttcatgtagtattatcttttaccttaaaactctgttctatgtttttgctttagacaatactaaatgtgcttggtttttattatcatttctattcaggtgctaccatatgatcaactcatgcaagaattggatgtttccaatgtaagagaactcgaagatttcctcatcaatgagtgcatgtactcggtgagaatttttttgccttaggcacttaaatctctattttccatcttctaacctccctaacaaaaaccatgtcattacaaatatatcttgtgtggattattgctcttgtaagctctctagcctttaggatcatcggtttgtttcttgaacttttacaccatagatgctagtattctagtcaaatattaacgtttaattgcttccctagggtattgtcaggggcaaattggatcagctgcggaggtgttttgaggtcagatgcttgttcttacaagtacattgttcatggtttcattgtttagctggcaaatgatccccctaaattctgtctgtacttgacaggtacaatttgcaactggaagggatcttacacctgatcagctgaacaatatgatagatacattatctgactggtgtgtacctttacttgagtgattgttgcatcccatccctattttttgttcacagaagttttaatgtttgcatttatatatggttctccctcatatctgatatgaccttctgaaagatacattgaggtcatgtgttatgggaactgcggctgggttattttgctatgtttatttgttctagactccatgtgtgttgtcccttcaggctactattgtagatggtatggttttggttgttttttgtagttgggtgctgtagggataatgtgaaattgtgtcttctcttgccaacccactctgtctgccttttaacctttttaagttttaattatacactatccattgtttttattgtcagttcatagctttatgttttaaatcatatagaagtgtttccttgaatttgttaaaagatgaataacctctgaggtttttcatttagacaatagtgtatatgcatcatttggtgctgatattgtgcttttgacatttcacaagtaatcagtttatatgctcgtgctttgacatttttactcggtccattttatgttgaagcattatgaggtgcatgttaacgggaccaatggaagtttattggtaccaactcatgctgatgtaaattgcacaggctggaacatcggataatttattgcatcagattcaggagaaaattaagtgggctgatacaatgagtgaagtgaacaagaagcaccagaaagagttcgaagacaaggtagaagaagccaaaaaatcaatcaaggtgagttggatcaatttgaagcaccaactatactgtagtttttcagatattgaatgatgaacagtaaaaaaggaaaaaaaacttgcatctgttttgttttttctagcgaacatcaggcttttgcataattcttatgatgtttttctatgttcctcattcttctgatgacctgttgacccatgtccatttactgtcatgtgttccattctgattttagtattaaatgcttttaagtattcatatagtattaaatagtggaattgccggaccatgtttcttacttgatggcagaagttgaacaatttaagcaggcagacatcgacttacgggggcatgacgactttctctctgaacctggaggaataatggattttgaagaggaccgcatccgaccaaaaaggtaatatattttttctctctcttgtgggtttggatttgcttaccttacataatatttttaaattttgtttagtatagcctgttaaaaatgtaaggcagtttgctgtcaagttgttagggacagctatcagagttatgttgtcaagcaacttttactagtgaaacaattggtggtgttaatggaaccgcagttgtagttcgtagccttatttggctaaggattgcctagtaaccttcagctatttttaaattggttgtcaacatgtttaataatacggatgtatctttaccttgtggtgtatacaatgcttttcattgtataaaattgctctattaccacagctacgaataattttttaaaatctgattgcaggaggcgacaaccaatggcatagtttcaatggcatacttacctgcctccccacttgtggaagtgctgacgccctaccttgagacattttggcaccagagctgaggaaacttccccacatcaatttatttatggtgcttccttttgaagcgagtatccgttatcattgtctcttctggagaaaatattcgttttggtacgagatgtacaaggttgacacttaccgtagcatttgtttgctggtaaaaaaaaatacaggtggctggcttagcgttgtaaagatcatggttctgaaagtattttttggtgacttaaagttcgctctgtttgcattttggctgtgtttgtagctgtgattcatcagccacgctcatcaagttgaaacttgaaagctatcaacttacgaaattattttataggaattagttcatatcctacggtcatctggaagaactgccgtattgtaaaggagccctaaattgttttgggtcgtacttagcaaatgattttaactattaattcatatgatcctttggacaccacaagttttatcgaccttgttgaatggtgcctcatgcttccagatccacgttccagcttggaatgtgaggcctactcttgtaaaaagaacaaccttaaaatgcccaggattgtctgagagtctgataaaatgctaggttgtctacggacatgttgaaacattagagtcgttaatttggctacacaaaattgaaagcatgaaaatactgtaggatttggtggtaaggcagacagaaaactgtgatatttacaaatattggtttcactgagaactaaaccacccacacgcgtacagaaatagtcaaggttgtccatctaaaaaagggaaaacaaattgtcctctcaaaagaaaaaaaaggttgtcccctaaaaaaccaaggctatcactaacatgatgttgacatcactcattgcttgcagttactgaggttagcatagctgcttgggtaaaatttgctgccatctactctgcaacaagagagcaattttggttaagtggtttaaaaaaaaaggctgcagacttgatctgcacatctaggtgttgagacaaaattcaggtttgcacattctatacttataatatacccatgcagtgtaattcacatattgaatacgaaacctacatcacatttcacgccacagaacggcagacatgtagttgaagtgtgcactatgttgtgctcacatagacagtaaaaatgcacagctcctgaatcagtgatcacagtccaccagttttagctcacacttaaatactgaaatcagtgatactaaccatgctgaaagtgcattgactaaatacatcaagctaattttttaatgtcaaagttgaatccagtgagaatccaaatgaaattttatgctcatggttcacataaatcataaacactgcagtttatgagattcacttttctccaataaagagtgaaagaacaaagatctaaagcagccactttcataaattatggaagggcacatcaatgttaaattcaatttgcattgttggtaaaagaaactatgctacactatgctaaccacacaagattatgtatctgatccaagcaaatataagtaacagaaagaggcatacattcagaactctgatttcacttgtcttctttattcccgctatgatcagcaatcatcttctccttggtattaatgcgcaactggacacttccaacctgattcatttggctttcatagtatttcttcctcttcaagcactgcattgctgcttgcttatttcctgattttgtgaactccttggcacgttccatctcctgagagatcttcttttgcagaactgcctcttttgccacgaagacatcacgggcctatagagccatagtaacataagcaattaactcacaaggtaataaaacgatgcgttcatagagttgccaacagtcctgaatatcatacaattgtttagctaagtaaaacactttcagattatttagctcagaaaggcaaaaataaaaacaaaacgagataaaggggaaatagctcttaaaaaaccagagctttgccctgtttttttaattcagcagtcaagcaggcacaaatgcagcaacttactgaacttaccctatttatgtaacttaaaagggaaaagaaacagcaatttcaaagagacctttttttttcccatcaacagtagtaagcctaacaaatccatggcaggtgctaccccccttttttcttaatcctcttatttgaatatgaacatgaaagttgcattcaaagggtgtttccctttaatttcttactgtgcttttcacattataatttggcatcgctactaaagcccacattgacactaaaagcaccccaaaaccagcatctgtttttctctttcacaactccctgcatcagcaacaggtgagaaaaaaaaaacataatttgatctaaccaaaagaactagtaattcaattaacagatactacatccattcagtgccatcaggaggcctcggtaggagggtagggcactaggcagcaactggggtctgaaccatgaacaactcgcattgtacgcccgcgatacagagtcctagaagatcactgtggacaagaaagtcatgaacaccactgaagaaaaaaaaaaaagaaaaacacacgaatcgctcgctccatctcctcctcccaccgggggcgcagggacgaaacaagcacgcactcatcgattcacccactgggggcatgacaaaccgtagcatctccctctcttgagtcgacaaacgcaaaaaaaaaaaaaaaaaaaaaaaaaaaaaaaaaaacgcattccgcccccttttctttttgctcactatcgcattcaaattggtgggagagaagattcttgggggatgagatgggagaggaaggagacggacctgcttgagctggtcggaggcggagcactcgtcgcggcagccgcggaggagccaggcgaacatcaccgcggaatcgctcgccggcggcggcagcggctactggcaggaggagagagagagagagagagagaaagatggtggggagcaacggcaacggcaacggccgaggaggaaaggggaaaaattagagcaggaaaaataaaggaaaaagcatatggggatggcaagtgggcctctccgttttgatttttttaagagataatccattatatgccactgactttgtcgcacgtctacgatttgccactgactttgtcacgttctacaatatgccatcgacttttgcttaacttctacgatttaccatcaccgtccggttagccaccgttagtactgtacaaatttgtcgaaatgaccaaaataccatatgacaaaaacttccaaaatttggataaaattatcaaaatattatattataaacataagattgtaaacatccaaaatttgaccaaaaacttgaaatatgatatttcataatttttatccaaattttgaaaccttttctcccaggggtattttggtcattttgacaaatttgtacagtactaacggagactaaccggacggcgatgataaattgtagaagttaagcaaaagtcgatggcatattgtagaacatgataaagtcagtggcaaatcgtagacgtgtgataaagtcagtggtaaataattgattctctctttttttaaagtgaatt

SEQ ID NO: 6928 - DNA, 7709 bp, Oryza sativa
acaataatctctacatggcagtagccatatgttatcccggttgttttgaccattcaaatgtttgctttctaggcctcctttggaggacttcttgtgggatctgtgcaaatttcatatttgctacagcaatcatgtattccaaaaggaagctcaatccatacagtagacatcagaactagaaattttacaggagttccacgtgaagtctaagggcttgtttggcacagctccagctccacccctcctggagctggagctcggtcaaatagtttcagctccaccaaaactaggagtggagtaaactaggagtggagttgggtggagctctctcacaaaataaactagagtcatttccacaactccactccagacccaatttctggaactaaatttaggagttggagctataccaaacagaccctaaattctcacaaaattgcactcgctcctgctccggctctggctccggatctcctccccctcgccgccttcctccaatcgagggcgcttgctgcgcgcgccgtcgtgaccaccagaggagctgcgccatctgctcgtgcggcccttgcccgggatctcaatccctcagatgggccaaccctaaggccctgtttgtttaggcttatgtttagctgggcttttctagttaggacttattttcttcctggctttaaaagtagctgtttggtggatggcttactattgaatggtaaaaaacacccatcaggtttgggtttcttgtttacaagccgaggacattgtaggagtaattttctcacgtaataatattacttttttttcttgatgtatcgcttttaacactttaattgtttccttatttttaatatatacgaattagagatacaaataaatatccgttcctaaatccgattgaggaataatatgggatagatacgagatgagtgacatgttacctggcaccgtccgtaccaggttccaaatttgaagaaaaatatgttaggatatgggaatatcgtgatccgaccgaacccgcccgttttcacccataccattaccttggcagtagtatattagtgaaataatacaatcacaaatatttcatgataatatacaagtaaaataatataagcacatatccttcttctgtaaaaaaaaactggatgtttttaaggtttctcaccaaaattagtaactactaaaaatgatttaccccatgattcaggtgtcattttaataagtgtatatatacactcaggtactggagaatatttactgattgcaaaaggtaatgaatgctttcacagcttgttgccacatggtacatgacttacacattgcgccatggccataaaaattagggataagtccatttttcacccttcaactcttcgctttatcttaaaagggttaattggaatcattccattgcaacttcggctatttggaaatatgccattataattagcgaaaccggctaggtgccatcgcaatttcttccaaattggaaccatgccattatgtacgtctgaatcgccatccatgccgtttgtcctcgtacgtatttccgtatggacgcttgtgcccctggctgagacgatacaagccagccagccatcccggtccggcttaaccatctctgttccccattccccattgtctgcaaaccctagctcgccgacggcgatctcgacggcgacgacgacccacgatgtagaagttcccctgaagatcgcaagctcccctacgacatcatcgtgcgcagcgaaattgccgatggaggggatggatctgggaggctcgattcctcctatttcgtcgataccatgagtaacttgaactcgaatatactccttggatatctaaagtagaagtgcattgggtatttcatcgtatttacatgtagattttcagttgatgttctctcctttcatggtaggcactggttttcagtagaggttagggttggtgcttatgtcacgatagaaacagagcgaccaccgccactggtatagctcgcctccatcgccgcctccaacctcgttgccacgttgatccatctgcgccgggagaagctatcggtacagctgccgccgtatccctagcccccgtcgtcgtcgccggcgccgtatccctagcccccgtcgttgtcaccggcgctgcaccaaacgccgccgagatctctatcggcgagctagggtttgcagacaatggggaatagggaatggggaatggggaacagagatggttaagccggaccgggatggctggcttgtatcgtctcagccaggggcacaagcgtccatatagaaatacgtacaaggacaaatggcatggatggtgattcagacgtacataatggcatggttccaatttggaagaaattgcgatggcacctagccgatttcactaattgtaatggcatatttccaaatagctgaagttgcaatgacatggttccaattaaccctatttaaaatacaccagagcatttctagcagggaccctaaatatagcccctaaacagattttgggtgttgaggcttaaaaaactcaatccagcagagcccctatcaaggatcctaaattaggcaggcacccaaataacctttccaagcccccaggggctctactgcacagcccccatccacggttggaaaagcgcgggagctgcccgacgtggtcttggtccgtcggcacctcccctgcccagtgcggcagtgcttatccccggccggtgcggctcctccctgcctaccgtgtcctccttcaggtgccctcctctacccgacgctcctccccggccgacgcgtttgccgtgcctggagtctcctccagcctgcactctccacctgaactcgatgaaaaacatggcccagtgaccgagtcatgcgatggcgtcaaggcactggatggtccaagtgctgctgcgggctgcgaaattgagacagtagtagcagggtagcactagcaactgcgattgtgggacgaaagaagaatggggaaagtgatacatgcgatgtgctatgcagcttttttgttgctttgcttggttgttgcttcgtgagagaagtagcaggtctattggtggatgagaggacaggaaaaatcagcacatgtgagaaactgcatggaagcgcgacagcagcagaagctcgtttcacccgagctatgaatacaggctactaggatttgtatttccattttaatttttttttaaaaaatcgaatttgaattgtgatgttttgaattgtgaatttaaatatggttggattattatggttttatactaggagtagcgtagagtatataactatagattagtactttaaagtatatgttaaaatagaagatgaaatgaaataaggggtgagaaaagggactgttgttggagttaaaaggtattttttaggtactcagaaaatggggaagcccccattatacttttaggggttgtaaaataggagctattgctggagatgatattttacactctcaaactttctatactgtgtagattatcccctttgacggtttctagcatggtttttgcaattaattatggggatatgcaatacagggaagaaatcgtacgaattcatcagttatttaatttattgatgtgtttcgctgtgcaattgcacgccgctggaacagctagatgacggagcgcgctgcgagcaggtcggcgacgatacgtgcgcgtgacgagccgtgatcagcggtcggcaagcggtttcgccatagatggtccgtgcgtggatgatggatcggtggtgctctagaggcggccgagaagtgcctcgtgtgctagcttctgatcatcgatcctggcgtcctgcggcggccatggctgttcaacgttcgccggcggcgcgcggggcggcatcgacggcgaccagtcgaccaccatggcagcggcaccgacgtccgcattccgcccagcgcgcgtgctcctcctatgtggcgcgcgcgcaccacaccgtcctgagagtgaaaacggtcggaaataattaatcatatttatcatttaaactgtacggggccaccattaatacgatgcagaaagaaattaaaaaatcagaatatataaatagccaataatgttgcggtcggaaacgataacctttatatggaaatggggtgctcgatcgattgggaattttcttgacctttttcaccccactgcagatcgattcgagggaggttggggaggctacctacctccgctagttgccagtggaaggaaatcccaggctcgaggtggaaatggagcttgtggaagggtcgacggcagcaatgtaggaatcgtagttagccagcagtttttcccgccggcgagcccctgcaaagttgcgcatttaccgtataaaggtcggtgtcagatgacaccgatgactttcggtaaaacctatgagaatttttacggtacaatatactatcattatatactaccaatatataaaagggtatattcggaacttaaaaaaaattgaataagggatttttagtaattcgtcagatctgatggggagcaggggcggatccaacgtgagtgcaggggggttcgagtccccctgcacccacaagatctatggatacccctggagcacccccttcaattttttcaccatgaatgataaattaaaggtccttatatggctggagattgaagaaactgtgtaattgagcactctcaattttttgtttctatatctgccccctgatggggagtaatcggtcttggatctcatcatgcatcgcgagcgcgattagattatggcgcgtgtggcggctgcatggtttgatgagcaacgagaagccgaggagacgctggacgcaggccccaagcattcgcggtggcctgtggcctgccttccggctgagcctcaccggccacggcaagaaactgcgacgagctgattcatagtgtacattgagcgatcttgttagttcaatgtagattctactcaaaattgttggctagtacggacaacgtgaggcaaataaatcaggtactgatttagtgctcttgggcttgtcttgcgttcagtaccagatcggcagatgaacatggaagttcataaaaccgactgtgtacattgcccttacaattttatactggaatctcattaagtggggaggagaatgaatctacaccattggatcatttatgctagcagtgtatactggcagtatagtgtaccgtctaaacataattagcatactatgacatcgataaatacgttatgacaccaacgaatcgattttctatatccgccaccactgcaaacctcacacaaacgctacagcgtaacaacttgcttttctgatgcattatatatatcccctctacttaaaggaaattacatgcaatgcgcgcgagccgcgcacgactgaactcctgctgtcctgcacttgccgcgcagacccacgactcaaaaaagaaaagatgccaccgcatgaactcggatacttaggcctatagctgtgcacatgaacgtgttcgtgcagatcctaagaaggatactgtggtacatagcgtgactcgcctgaaatatgtcaacaattctcagtacgggcccacctctgacggtccacaaactatgagccaaagtgctcaaggatgttcacagctttgatgaatccattgagagatcgtaacaggtgaagccaccggccgaggctcgtcccaggtatctagacacatgtgacgggccggcacccacacctaccagaaggatacctctgtcaggtgccagtgcaagcccatcacaggtgaccaaatacctgtgacgagcctcgcaattacgtctcgtttgaggtgagtataactcatatctaacgggcttaaaccctaacccgttggagttgtcttgtcgtctataaatacccccaaccactatatgtttttcatcccaatcctacgcactgttcacattttgggcgggagaataaggggggtgaatttttgttgcaagaaaacgtgtgataattatttgatgacgaatattatgtattttgtctgatacttgtcatcttattgtttgcagatggaccaaagttggatgtacggtattgatagttggtcccaagagtatagggatggggtcgctgaattcctaagaattgtagataatgataggataattaggatgagcgaatattagaggatgttctctgatagttcatgggtgcattctgtaacatcctgaaaattcctgacattaaaaatcactaaaatttcaaactttttaaaactttttgcatcatgctggaagttatggttgttattgcttgccaaaccataaatcgacgcaatggaaaaaaaatcaatctaaagatttacacccgagcaatagttacgatttacaacgatacgatatttattatcaatcccataaatatttatgcacatggaagccaggccaaataaagtacaagtcaattattaaaccctgtggtataaatcacaaatcaaatattaaataatcaaaccatgttgatagcctgatttcatatttaacaaaaggaaacaacatagttgaatataattcacttgaatccaatctcacatgaaatataagtacacatgaaatgatgatcacatcaatggccccatctataatagagtatctcactagaatatataattaatatttgaaacaccttatcaagctcctcatagcatgaaaatcactcatataaaataatggtcatataaataaattaggctttatacataaataagaatatgtgagtgtttaattaaacaattagattaatgttgtactaagtctcaatttatatttatagaatgagtagacccacgtaaaatgcattgttatacaaataagttcattcaatgtgctattgtaataataatggccacattaggatattttaaattaattttagaaccctcaaagcctccaaaattatctaggttaatttttgatttaaacctcatttaaataatacaataggaaaatatataaaatatgggtaatattaaattttggtcaactttcatctaaaataaaacatatattgggtaaaactctaattgtgtgaaatctagaaattatgggacaagttttaataggaaataggcctcaaaagtggataattaggaaaaagtcactgttcattatggcctaggtgtttgatgtggttccctagcccttcccccctccactgccgcgctccccctcgcgccccgtgcccctgcacgcgccgcgccgcgccgctgccgcccactgctgcgcgccgcctcgcgccccgcgccgctctcgccgccgcgcgccgtcgcgccgcctcgcgccccgcgcgccgtcaccgtcgccgtcacgttgccatcaacaccgcgccgcgcgccgtcgacatcgccgtcgcatcgtcatgatcgcctgtcaccgtcggctgcgcagcgccgagccccgcgccactcccgtcgccgcgttgcgtcgcccgtcgcgtcgccatcgccatgcgccgcgagccgtagccgtcggccttgcaccccgagccgccgcacgcccgtcctctcgctgcctcgcgcctgcgccccgccgcgcggccgtcctgtcgccgtcgccctgagccgctgccgcgccccgagccccgtgccgctaccacgccttcgcgtcaccgccgtcgccatcagcgcctcgagcccgcccgcgccggcactgtcgccgttgcgccgcgtcgtcccgccgccgcacgtc

SEQ ID NO: 6929 - DNA, 1545 bp, Oryza sativa
acatggcaggcaatagtagttgatgagtttcaggatacaagtggtatgcaatattatcttttaaagacactagcatcccacaaccgcataactattgttggtgacgaagatcaggtgcacaaattatggttcatccatcatcctataatttgaacttgtgatatctgtttatttactagtgttttcagatgcaatatgaatttattttcattctattcttctcattttcagtccatcttcagtttcaatggtgctgatgtctctggctttgattcatttcgtagagattttccaaatcacaaagaggtaattacggcatctctgtaggagtttcctaacatgcactttgtctttgatgcacaatcttgattctcagcttgatgtctgttaattgtgttttcgtgctgatgagtttaggtcagattgagcaagaactatcgctctacacgggcaattgttgaagcagcaacagctttaattcacaacaacactaaacggcaaagccacaaacttgctgagaccgacaatccctctgggaataaggtgtccttaaagatgccacatattgcttcttcttgcatcattccagttacttattctatccatcattttgtatagatcattgttaaggagtgccacagtgaagattcacaatgtgcatttgttattgacaagattattgaaaccacatctagttcagttgaaggatgtcattttggcaaaattgctgtcctatatcgcagacaggttgagaaatcttccacttattgctgaaccatattttttggttgtgtttatggtctaagttacctgtacacagatcactggcaaagcattccaggcgtcattccgcaacagaaaaattccttttaatattcatggtgtggctttctacaggaaaaaggtgcttggattaatttttactcccaatattatcgcggactagcaatttcttgtgatttcttgagttgctttcttactgccaaattatcaatttataatccttggttctattaacattttaaaacatgaaaattactggtaccttttcaaattaatactttagttgttgctgaccataatttttctgtgtatatgatatgaagcattgatttggtaaacacaagtgcactatcatctataattattcaagaaaccaaccatgcaggctgattttgtttttttcaccaaattattttgggaatgttctgtgttattatatggtgtattgtgggggccaagggtcttattagtttttgaccataaagtttgtttggttgctgatcgtagtttccttcttttctagttttttcttcgttgtgtttaaccctggcccttaagggcctgtacgagtctttctagactcactcccctatcttcttaatataatgatgcacagctctcttgcacgttcgagaaaaaaaaggtggtattatggaccggatagggtaagggtcaaaagactgagggataactcaccctctaatagtgccagcaaggcttctccttgctgagttaagagaggctttgaggcttagagctaac

SEQ ID NO: 6930 - DNA, 2158 bp, Oryza sativa
ccataacaattcttccaaatgacagaattggcattttttatcacccttcctccaaccttttttaaacaagttatctttagtcagaatcttgttcttagcaaacaaccaaataaaaatcttaattttcaaaggtattttgaatttccagactttcttaaaagggaacaccacctgtttcattttgagagctttataaaaagttctcacactgaacttgccatctttactaatactaagttcccaccaaactttatctctacaatgtgcattgataaccagggagtcccaaccagccttgattttgttctagtccctaagtttttcactatgctaatgctatcaatccccttttggttaatatttgcaattgtcaccattttttttcacaactatattataagagcaattttatggtccttgaggaggtactatgaagtaccattttttctattataaatttggtacctcatggtatctaagtactatgaggtaccatgaggtaccaaaatttactaaaattttggtacctcatggtacctactcaaggaccgtagaattgctcatattataaaggtcaggaaattggtcacacaaaggtctactcctatccagctgtcctcccagaagagagtatctttcccattgcccaaaatttgtgtaacatgtttgtaaaacagatctttaatctccatgatgccctgccaaaaatgtgagataccaggtttctgttttactgcagacaaaggttttcctttcaggtatttctctcttagaatatcttgccaccacacatcctcattttcaattctccacacccattttcctaacatggctttattcattatatctagatccagtacccccagatacccccccccccccgatctctaggtgagcaaaccagaagccactgaacaaggtgaaactttccaataccctaatcttcttgccacaagagcctccttttaaaatagtccatcctatccctaacaccctgtggaagtctgtagaaagagatcatatacaaagggatattggttaggcttgaattgattagcaccagtctccccccaatagactggattttgccttgccaacatcctaacttgtgttccattttattttcagccatcttccagtctttgttcagaattcttttttttgtcaatggggatacctaaataggtcatgggaagctctccacctttacaggtgaaaatctaactgtacagggattgcttctccttagcctccccaaaacaaaacacttcacttttgttgaaatttattttgagaccagagagctgttcaaacagacacagctagtatttaagatgtttagcttgttcaagatcatctgacagcaagaaaatcgtgtcatcagtgtattgcaaaattgcaaccttgttatcatcatttatccccaacccctctatcaactcattattcacagctctctgaaccagcactgtcaaagcttcagcagctagattgaaaagcaaaggggataaaggatccccttgtctcaatcctttatgtcttgaaataaggcccaatttgatcattaaccttaacagccacttaccctcctgtgatcacattcatggtccaatcacaccatttatcaggaaatcccttagcatgaagcattctataaatgaaggtccaattcaccttgtcatatgcttttcaaagtctactttgaataaaatccaatttgtttgttttgatgcactgagttaagaatctcatgtaaaataacaacacccttcatgatgaaacgactcttcaagaaggcagtttgatatttggagatgatgtaagccataatgtcattgatcctattcatcatcacttttgttatgattttaaaactgacattcaaaaggcatattggtctatacttaacgcatgtggctattacggtagctcctttattgtgagtatcttacactcgaattgcacaaaaaaatgccgagataggagcaattcaagaaattctaatctgcacgcaataaactggtgcgcgctatttaaccttttcttctgcaagggacacaatggaacactatatactcctcatgtatagacattaacaccgcaacagccgtgcaaaagggtgtagatcttgacatattggatgctttacggttaggat

SEQ ID NO: 6931 - DNA, 3766 bp, Oryza sativa
ttttgagaggatgtggttttggaagatttatattgagtaaagagagtgtggatgacttgatatgcaacttgaaaattgttctgaaggaatgtgcgtcaggcaaggcttacatagggaaatctcgcggcacaccactgatggcgataaagatgtcaactgcagttacagagaaatggaaagacatgcttgggaatgaaatagctgtccaatctagaattaagcacatgaatgttgccaagcttatcggttactgcttagatcattcggatggtacagtgcttatatacgagtacggtgcaattagcttgtatgatgttctttttggtgatgcggggaagatatatcgtcccttcacttgtgacctgcgcctgaagattgcgattggtgctgcagagggcattgctcacctgcattcacttggcgtcgtgcatggcgatgtcagcattaacgacatactgctggatcatgtctcttcgtccctggtaaagattgctggctatgggacatcagggctccctgacatcgacaaggctctggattcgcttgaaaccggtcatgggaagaaggagcatgatgtgtacagttttgggcttgttctcctaaccctcttcacgtggaagaaggtgtcactgccacatgatctcaagtccgagcctgacaaacctgtgctactgcaccaggaagccatccgtgggcgtagatgcaatcatcttgagatgatcaagggcttggcttcacggtgtctgacgtccgaggcgacgaagagaccatccatggtggaagtagcaaaacatctcaacttcatacttatttttcctgaaaggaggaaaacttgccatgacctggcgatttatcaatctcgaatgctttcggactaggctaggctgcaagaactagcagtcgtacatgggttttttttttagtaaaggtgccgtatacgttgtagatgctatatataattcaagcaacatgtgtattttatatcctgacaaaaaaaaacaatgactcttgcttcttctcaggtttggtggctctttcttgtttctaattcttattcagtgcatttgtctttttttttaagataatggagtataattcagtgcatttgtctacatctggccctttggcctttctttcttgtggccgattttgctcggtcaaatttttgtgtaacagaagaaattaagccgcatcagtttactttggatgttgcttggattggtactgtttcttgttttcatgtttttttgtgaaactttatgtaggatcgaacataaataatcaagcctacgagggggggtgaatggtaaggaaaaccaaaaacccaaaaacttttagcggaaataaaagttaccctcaaatcgatggaaatctcgacgtagtcctgtcgccgccggtcggactgctcgtacgccgccggtctaaccgccgctttgtagccggttgaaccgtcggtatgtcaccggttagaccaccgaacccgataaaacacaaatcgaagaactcttaaaataaatgacaactttattgcttctctctgtgtttacaaagtgcaacaacatcactccttacaaaaatctcgactaaacttaaaactaactaaattatcaactccatgctctgaaaagcgatacaggaaacctcacgctccctctctatttataccacaaaaaccctctattcaaagtaggtgaagaactcctatacacaatatgactcgatacttcaatttcctttttctccaaaatccgcagccgcacccaagtcagactcctccttccctagctgctgctgctgcttgccgcctgagccgagtcggcttgtcaccaccgagcccaactcggtcgcccaggccagaccaattgctgctgcttttggaccacgtgcacagcacctgcgcacacccaagcccatatgcatgacagccttccatccaatcggccacacacacgtgcccaaccaatctcagcacatacacacacatgcatgtactgatcacacacgtacaacacacgtacatgtatcatacacgctacagtacatcaagtactgtagcaaccatgcactccaccatacatgaacatctctatcttctctcattcctcttcgcgaacaccaacgcttgcacacacacctcgtgaagcccgttgcgaagatctttcccacactatgtccatccgccgtgtgccatctcgtattcaacttcgtcacccggtatccttgaccgtctggacctcaactcctccctgagtttagttccgatccccaccgttgaccgaagttgacctccaagaatcctgactctagtcaccttctcacatggtatcccgatcgcactagacctctgttcctccctgaacatagtcctggtcctcaccattgaccaaggctgacctcaagtcacctgcacacaatcagacaaaacaaccgtttctgggcatagatatcacaacctgacccacattagtcacacgcactcacaccaacatccacacatcttttcaaaccaattcattgattaaatcatttgcatagccaattgttcatcacaaatattaatcatgacagtgatttcacactttccagtttttacctctctcgtgggctccaggtggatgtgtgttttggccaaaaaaaaaagatcttctgaaaggttctgccttaaaagagtttccaattttcatttccaaatgtggagggatgatggtcctgattgtaaatttgttattggtgcacataatttgctatccgtacaatggcaccgttgcaacttgcaatctaaagagaattggctttcctacgcagatgatgttgaaacagcacaaaacaagtatcacaatgcacagaggggaaacagaaatgaaaaaagttcagacgcgccagcacagtcttcttcttcatcttcagatctctagcctcttaacgttgggtctccagccaaaccttgattgataaacttcacttgcaactcgccttatgagcctggcccccagtagcaagtttcttcggcttgtttcctgtttctgcaaagttgtccaggtttcaacccaataacaagcgagaaagatcagatcagtaggatcatgtggaagtttttttttcaaaacaagctttatttctaatcttccaaatagcccagatcatagcagcaaggccaaccacaaccagattcccagtcaatctgtcaattttgtttagccattgtccaaacaagtgctgaaaattaaggataggttttatgttgagagcacaacaaacaacattccataacaattcttccaaatgacagaattggccattttttatcacccttcctccaaccttttttaaacaagttatctttagtcagaatcttgttcttagcaaacaaccaaataaaaatcttaattttcaaaggtattttgaatttccagactttcttaaaagggaacaccacctgtttcattttgagagctttataaaaagttctcacactgaacttgccatctttactaatactaagttcccaccaaactttatctctacaatgtgcattgataaccagggagtcccaaccagccttgattttgttctagtccctaagtttttcactatgctaatgctatcaatccccttttggttaatatttgcaattgtcaccattttttttcacaactatattataagagcaattttatggtccttgaggaggtactatgaagtaccattttttctattataaatttggtacctcatggtatctaagtactatgaggtaccatgaggt

SEQ ID NO: 6932 - DNA, 23685 bp, Oryza sativa
cccttactgccaaattatcaatttataatccttggttctattaacattttaaaacatgaaaattactggtaccttttcaaattaatactttagttgttgctgaccataatttttctgtgtatatgatatgaagcattgatttggtaaacacaagtgcactatcatctataattattcaagaaaccaaccatgcaggctgattttgtttttttcaccaaattattttgggaatgttctgtgttattatatggtgtattgtgggggccaagggtcttattagtttttgaccataaagtttgtttggttgctgatcgtagtttccttcttttctagttttttcttcgttgtgtttaaccctggcccttaagggcctgtacgagtctttctagactcactcccctatcttcttaatataatgatgcacagctctcttgcacgttcgagaaaaaaaaggtggtattatggaccggatagggtaagggtcaaaagactgagggataactcaccctctaatagtgccagcaaggcttctccttgctgagttaagagaggctttgaggcttagagctaacttaagaatttatatattgattgattcataatggagtacatgtggtccctttatatataggtaggactcaggactgacttgacatctaaggagctaatctctaatattgtatgaaccaatccatctctatctcttgtttacaaacctcgccactttcctaactagataatctcctatctttatttgacctattccttatttataatgcctaaactgtttcagggcctggccaatgcccataacataacatgtggactgagcttcttgacattatttcttttagggtttagcaaaaatacatgtttgccttgtgaacaaaaggagcattctgattattttactcattgtttacaattacttggaacttggtagaaagtaacaaccctcttcatgctgttagttctgtaagtgcaacaatttaagtgctttaccatgtaactatttcaggttatcaaagcaattatggccatacttaaaactacattaccaggctgtgatgatgatgccccatggcatcaagccttcaaggccattcttcctggtgacaaggaagaaaaaaagaaggttcagttttacctgattatattctattttttgtatttgttacattacatttgcttatatttaataaattatcgtaattcccagattatacatcatattgaaaagatttcattggctagaaagtgtagcttcatatcggctgctactgacatcttcagtgcaaaggtctctggtaccttcaaaaggttgttatcttccgtgtttacttaccgttctacagtccatgtttattttttgtttctgcagggttctttattgctatcttccaatgctcatggtgcaaatataatgtgatgctatgctgagtgtcccattctgttggttgtagggcccagattactcaaggaagaaaggttttatcagccttggatagcctatcaaaacttgttgaaagggtatgacaaatggtctggccattatatctgtatttctgcaaactaatgaacatgtttcaaacttttaatttatttgatatatacaataatgtttaggaataatattatcacaaataccatctttggaaagggtgcaatactcacatacatagacaaaagtgttaagataataaatttatgaaactttgatctcgtttaccttgtctgtcaacagaaaataggattctaatttctgtgtatgactattgactcatcccctagtatacatcaatcataccatttctgttttctgcactggtagttagtcattaactagtaaataggattctaatttctgcatatcacccacaacctactgacaatacatcactggtacaattttttgctttccaaaatgagttgctaatagccttgagctatcttgtgtcatcaattcaataaatatatttggtaagctatgctttttgtacgatcaattgagcaatgatatagtattacttttacaattttctgtatctctcattgaacctcaagagctacaatttattacttctttgtgatacaggaacaatcagtttcagtggtcatttcttctgctggagatatgctacctcaggttcaattaatttgttgcagttgtatttaatgagctttgccttcatgtatgatctgttagaagtagatttagaaacgcgccatttttttttcttatggtgcaagtgctgcactattcactgttctctggttcacttcaaggtattttgtttcatcctagaaaataaatcaacaatttatcggcgccatacatttgtatgtgcatcatgacttcttgaggtcctattagcatgttgtggtcataaaaagtattaatatccctgatgaccatctaagcagtattctgttgtatggttcatggcaagaaaagctacaaagccatgctttaggccctaatgcacttttgcagtacaaactacaaagatatgctatattttacgtattttggatcaaaatagtgatgcacattcaaacttattgagtctgttaggtttactagtactgagcttcattaaacgtttaatatcactgtgcttgattctgttcaatttctttaattacagctactttatcattttttgacagaaatacctacttgaaaagcgtgcgattgttgatgctgatgggggtaaattattaaatgaagataatgacatcagatcagtaagtacagttcatacacctttgatgctcttagtgttttgcacattgatcctcgagaaagactaaactttgaatgcaccaagaatcaattttggattatactgtctcaagcattcagaacttgaagaaattatggcaacagagcttgaaggatacaaagatgcatttatatttacatatttgtactgtagtagcctgctgctttgggtcagtcagaagcatccatcggaagacacttattcttgataaaaatgacttaaaattgcttttttttttgtcaatcaccatggttggacactcaatgtcaattgtctatttccaggacttaaaaccatggactatgtctaatttaccataccatcaccaattttattgatgaaacaatagtgtgttacacaaggttatgaatagttaattctagcttagtttcccatattgtttggactccttgttgattatgtttataacttcctgtcccctattacttgactcggtgttttggcgataattaaaatggttgctttggtatgtattaagaaccagtacatgtagatggaaatcataatcttcgtctgcagcaacttgcacgaggtgtttggtttgcatgtgcagctccacctaaggttttcagtagggaatacttaagaataaaatgcaccctaacatgacataagaggataggagaggtcggggggcgggggagctatattccaccaaagttcttttttgttctgattgggcgttgcaatatatatcaaacccaagtacgctaattgttgttgatattaccgatatttgatttggtttgttagactcatatgaggtctctttatgaactttcttttttggattttgaacattttttgtttggatggtttatatttgacatacattttgtatacagagaggtggtgttaacttatcctaaatcaaactgcaggtccttcagtttttaatggatgatgtgtctgacttcttatcaacacatttttctagttcagtggatacaagcaagactgaggagaaaggctgtgcttctacacttaaagcctttattgattatatctctttgagagaaactgaaaacttcagatcacgaaaggaggaaaataaaaactctatcacattaacaactatccaccaggttctttattcccttaactgcaataaatttatttgtgccatttggcaattctgacactaaaagatgtatattcccttctatgattcgcagtcaaaaggtttagagtgggatgttgtgtttatcgtgcaggtattgtactttaatcagtagggaatttacggtttgttcatctttctatgtgttataaaatcatagaatttagccgtaatgttttctcattttttatcagaagtatgctgttttatgttgtgacgataaaaaaatgtgcaagctgggaatggtatatggtagacatacattaaaattcagaaaggttatgatatatagagctgtggataatgaattatgaggaatttgaaatattgacttgattcagagtaactttgtactattcttgcctgtgacaacatgagtgccatcatagaggactggtcttgttatatgcctttgtttttctttgatttgtaatggagagtctaaacactgcaaaatttatggatgggtaacatattttggttcatgtgtttgttttattctgatattatgcaactacgttaatttttccaaaggagtattttcttgcttttgttcacttcagtccttttgctcaggcaaatgattcagaaattcctttgttgcatgagtacaatggcactgtgaaagaagctggaagcacactggaggtttgttcaaattttttttctttccctgaggtggttttctgtatgtattctgcaacttggttgtaattacaggaggagagaaggctattctatgttgcaatgacacgagctcgaaagaaactgtacatcttacatgtcacggttgactctaatcgccaggcaggtgattttatattgtattcatccttataaagtatctagatttcactgacttaaactattactggcgtctagctgctgcaaccttcacgcttcctcagggagattcctgctcaccttcttgaggtacaggtgagcactattttgagatcctgttttgaatggtatcgagacctgaagaatggtatctctatcccatattgttgtgtattccaccatacaatctgcttggagcattttaaaaaattgtaaattttagatggtatacagctatatatcaatctagaaagtcatttatatgagtaatataatctattatagcaatagtagcttaacataattttctcttttcaataatgtgaagggtgagggaactgtgagaagaactcctgaacagccggtgaacattccatttgatcaacctgaaggagatacatcagttgaaaggcctatggtggtacggaatgaaacttcacctttcccagaaatggatcagccatgtcttgctaatgatttcttgaagaggtaaatcagcgtgatatgatctatttcccttgtgagttgtttttgtgcaagcagttatttttcctgcacaatgtatttaaagaacagataatttgcatctataacaaacacttgctattttatgttatgtcatttgctgtattttgtttctcccctgaccaaaacaaattcgttcttctctttttgcaggtttgaaattgaggatagagcaataatttcacatatatttcatcaatgggcgaagaaacaggcatttcaaaatccaaaaaggctgcttgataaggtactgaatatttcattttacattggatggatgccatatgccattgattcgttcctataaggagaagtagttttttttttttgtacaaggaaaatatggtcagcagctcactggcggactgaatgaagtcggtagtatcagcaaattacatttatgccatgtctgttgctgtattatttttgctaggagtcaggatctgagacatgttagttctgaaacagtcattggtattgcattgctactgtacatttcatgttcagtctatctatgcttgccttttcagattggttttgttattgatgaacgtttacgaggtaaaggatacaagcgcaaggttggttgctttgttccattgattccactatctccctttctgtcacatcttttatttcatgattgtttattatattgatgttctttatatcatcttgttcgtagtcagtgttatacataggtaatcagtgatattttgatcatacaaattgttatttctcattcaggagattttaccctgacatattaacatgtgagttctttttttccaggatgtattgtgcaagctgaaatcattcttaagtggtgatgaagcgtttggttatgcacaatatgtgagttaagctaaaacgatgaaaattttggcagtctcttgaccttgagcgttgattctctttaataaattatttttttgagaactttaataaattattaatttcatattgtgaactcttaggttatcaagtgggaacagattcctatcgacaagcggagccatttgatgagagagagacaggcaagttcctgaattacgatctgttatgaattaacttagaatttcttttctttttaatattaacaaggcatctacatgatggacacctgtccccaagattctcacatgtttgtgatcttccaggaacatttccaaaagcagaggatagagaactccatgggttcctcagaacctacacctaagcaggtcagttatctttgccaatgctctcatatctttacctactttgactagctggttcatctgacaatcacattgccattatggtgcccgttattgacaatagaaagcccatagttttttttttggcagaaaatagttttactggtttccttcgctttatatgctattcccacctgaatggattatcattcaaacactttgctcatcctttggtgcagatatcgtacctccggaacctggggtgcaccatcacacccacgtctcgcctgcacgcgtcgcatcttatcgagaagtacaaatctctatgacttttcactgcttgaacctgcaggggacacatgatttcaagctcagtctcagaattgggaccatatatacagcaacgctggtgaaagttcctcatattaactgtacatgctgtacatatcgatgtacttttcccgtggacatggtgtggttagagcaaacgtcttgttacattaccaggctgttcttgggccacaagggccaaccaagaaacgaaccgggccttctctttggggaatctggctcggcccacaaaataaccagctatgggagactcagtcacatccctcatgcaacgtacatcctccgtcttgtaaaaaaaatatcaacttctagctatgtactttatgggatggattgagtacgggttatgtgatcattgcctcttgtttttgcgatgatccttgtacgctagtgcctagtggtataaaatgagctttgtatataatttggtccattttttttaaaaaaataaacctgcaataaaacgttttctagaaactggacctacaatatggggccgtgatattcaatgtgatgtgcatacagcatggtgttgtataatttggacgtcgatgtaggatattttgtgagaccattatacgcggttgcctacatagcctcaaattatgtgacacggtgccaatgtgccataaacatctctatctctaaaatgctaccgacggtctagaatatatatgatgtttaggagaaccaaaattgacttaaatgttgttatatttttctgtcctaaacgtcgtatatgatcatgattggatggagtattttattagaggcccacatgtaaaagatatttaagaaaaaaaaagactaaattaccaaaactaccccgctatgtactcctatactgcccagtctgccctacaagaaactcgtgcgtgaacttctactgtcactgcactcttcctctgcacacacgtttcagtctctcatcagcccgacgtttctgctgcaaaaccacggcctgattccgattcacgcaaatcgcggccaaatctcgcaaaccaaaaccaaaatcgccacctgtaatgtaaagaaaagaaaaacaaaaacaaacaaaagtgaaaaacagccaaaccgacggcccaaaaagaagccgcagcggtgcgtttccatgtggcgaatatttccaggatgattccaatcggcgcacggcacctcagcacatcacaccagatatataattaaccaccccgtctctttcacgacccactccgcctcgcctccactcctctcctctccgcatcctcctcatcgcctccgcttctgcttttttttttcttttttctcgttgatcggtttgttcgatcagatcggttctttggagagatggagcagtccttcatcatgatcaagcctgacggcgtccagagaggcctggtaatctgacttctttttttcttttaatgttcttcttgtcgttttggccatcgattttcgagaggaattttgcggtttcggatcggttaaatagcgtagttgattggtgtttgtttgtgagattttgagttgttttggtaactttttgtaccgttttgcgtggtttttaatggggaattttgattttctgttctgcagattggagacatcatcagcaggttcgagaagaaaggattctacctgaggggtatggctgatccttttcccctctcgatttgatcgtatggattcatttttcataactttcttttgtatttttattgatctaattttgggttgacctacccgtttttttcaacacatattatgaaaagcagaggctgacgatatcataatactctgtttcatatgggtaggttggggttgtgagttgtgacatggagaatttgatgggtttaatacatgattcaaaagcaagatttttttatataatttatatgttgatgattggccatttttaactggggacaacagactgacacagtaatattcaatttagtatatcaactgattcgttgtcaagtctaattttgcattacatgacatgggcaacttatttattattatagcagagatcgtcaaagcctcaaagatgtagtctactatttgtacttgtaatcatggaaatatctttctgaaaagaaaacatcatttgtacttgcaatagagttcaactaatatctttggcatgcatttaacgtgctcttttccattttttgttccttattaaaagttgttgtactttagtggaaaccaaaatgttttataaagcattacagaacaacaaaaacagctgtcttaaggaacagcaacaaagaacagaagtaaaggactttcatttaacttcccctgtttataacaactgtgtagccatgtattggttgatgtggcgattataacaactgtgaagcccatttttatgagaattattcgaaatgcacgcaaaacatcatccaaaaacttaatttcatttaacttcccctgtttaagaaatatacttcctccattccaaactataagcatttatgcgtgttattcacaatgaatctcgatcttgagattcattctgaaaaacaagtataaatgctttttattttggaacggaggtaatattcggttgagggatgatggtgcttacgaattactttttgaactgcaatgatccagggatgaagttcatgaatgtggagaggtcctttgcacagcagcactatgccgacctttccgacaagcccttcttccctgggttggtggagtacatcatctctggccccgtcgttgcgatggtttgggaagggaaggatgttgttgccactggccgcaggatcattggggccaccaggccctgggaggcagcccccggcaccatccgtgctgactatgccgtggaagttggcaggtgagtcattcttgtctgtcttggtcatcagctcattattgcttgaattttcagtcagttcttgtgatccttttaatcatgtaaggatcctgagcgatggatggttctttatttgttttgctgctagcatcaaacgatgattttgtttgaaaatgggtggttaagtggcttttattttgatctatataaatgtgtgaacctctgttttttaccagtcagaaggtatcagatagtgaatgtgctgtgatatgatttacaaaaacttttgcatgcattatgatgttcatcttttctatatgttacgatgttagtgtatttagacataataactacttggattatgttaaactatgttcaattctagcttttgtttttgaaaataaaaatcataatgcttcctgcttatcgatgcctaagctcaagctgttgtttcttgtgtaggaatgtcatccatgggagcgactccgtggacaacgggaagaaggagatcgctctctggttccctgaaggtttagctgagtggaggagcaaccttcacccttggatctatgagtcttagagcttcgcgcctataatcgatcacctcttggtggctagttctcgttaaatatttgagttttgtttcagagttgtcatctggctgcctcctgagtcaccattataattctgctgtgatacaatcacagttatatgttgcctgaacttatatggctttttaagtttctggattggatgtgatgggaaaataatactagcagtcagtttttgcttataaatgtcgtaatatcttaatcatgctctttccctaggttcatccaagataagcagatggtgttgcctgattttcttgtggcacataaagctcttagatttgcaagcaacctgctgttctggactttgttggaaaatttactagaactaaccaaatacccgtgctttgctatgtattaaaacaaattaacagtaagatttttagcacaattttgtcatgtagagatgtggagatgaaatatgatagaatcctatatatagagggattattttataacaacatgatagagtaggtgataaataaataaataaaaacttggtgagctgttggtaggttcattatcaccagcattgttctcttttaaaaggagtatagataatgttgaatgcttcaagtttaaaatggcaaaataacacagctgattcttacatgagaaccttatctattcaaatgtacagatgattttgcttagaattggggagaaaatgaatattgcaaatgaagtctggtactctgattggcattgatgagttgattcacaagtttcctgaagaatttctagtcgtgaagtttctgaaatgacaggagagtttcagcctgtctagcaggattgttttttcaattaaaaaaacataaaacagaaccattcttaaaactttcgaaataaatttgaaaactttttctgtgggaaattattttgatgcattgaggggatgttttctcttatttgcatgtcactaaaattgttacgaaaaaaatttaaaaaaaattgagaagatgtattaacatgtgatatattattacacaaacatacaagctcaaaatcaatttctacatcttgcaacgaaaaaacaattaatcgttgcaagatgtagaagttgaatttaaacttacacatgtttgtatagtgatatattaaatgttaatatatattcttaattttttttataaccatatgtaaacaacgagaatccactcacactgtctgctttggtgagtgactctcaaccaggtgcggacgtgtcctgtgcatcatcttcaaggtaagtgtggctcccgatcgtccacctctccaaaccatccatcgcacaaaaaccaccaccacactgtccgcgcatggcgcccagctctccatctcgtgtcgtgtccaagaaacgcttccggctgccatcgccatggcgctcgccaccacctcctctcacgcgctcagctgctacctgcatccccgacggcgccgccgcggcaatgtcgccgtgtcgccgcggtctgagggcggcggtgcccggaggaaggaggaggtggagatcgtcatcgtgggcgccggcgtggcgggcctcgccacggcagcctcgctgcgccggctcggcgtgggcgccaccgtgcttgagcagggcgcgtcgctgcgcgccgggggcacgtcgctgacgcttttcaagaacgggtggcgcgtgctcgacgccatcggcgtcgccgacgagctccgcgccaagcacctccgcatccaagggtacgtctctctcgctccctcccctgtatctccatggatgatctccgagcttctcccgtcgcgttctgagctccgttggtgacgttccagctgaccggccgcaggatgaagatgcggtcggcgtcgtctccggcgtcggcggcgggcggcgtcctccgcgagttctccttcgaggaggaggccccgggtcaggaggtccgcgcggtggagcggcgcgcgctcctcgaggcgctggcgtccaagctgccgccgggcgccatctccttctcgtcgaaggtgcggcgcgtcgccgtcgccgggcagcagcaggggcccggcggcgccaccgagctggagctcgaggacgggaggcggatcgtcgccaaggtggtggtcggctgcgacggcgtgaactcgccgatcgcgcggtggatgggcttctccgagccgaggtacgtcggccacatggcgttccgcgggctcgcgcgctacgacggcgacggcgggcagccgttcgaggcgaaggtgaactacatctacggccgcggcatgcgcgccggtttcgtccccgtctcacccacccgtgtctactggttcatctgcttcaatcgaccaagcccaggttcgcgaaatttgcttagtttataaaaacaaataaatatcatatgtagatttgctttcgaaagtattatcataataccatgaaattaaaacacgaatgttagggaagaactaatatcaaataattagaaagggcaaggcttcgaatccagatcatctagcccaccaccttgtgaagttagccggaagactcctaggagtttcatgaaattaattattagattttatgaacttattttgatataaaatcgattaacatcattgacttaggattcaagtttcaaaagtttaaccaaatgttatcctaaacatcgcgcatttacgaccaaacagattaacaagggaaacaagtgaaattttacatttgaaagttttttttaagaaaaaaactgttcaatgttgtatagcactctctaaatttgttagttattcttgcttgaaatcttagcatttttcgtagctgatgtgtttgaataatctttgactctactaacttagggccaaagatcacggacccggcggcgctcaagagggaggcgctggagctcgtccgcgggtggccggaggacctcctcgccgtgatgcgcgacaccccggacgacgccgtggtgaggacgccgctggtggaccggtggctgtggccggtccttgccccaccggcgtcgaggggcggcgtggtgctggccggagacgcgtggcaccccatgacgcccaacctcggccagggcgcctgttgcgcgctcgaggacgccgtcgtcctggcgcgccgcctcgccaccgccgccgcgagcgagggcggcgaggcgagctcgtacggcgaggctatgcgggcgtacgagcgagagcggtgggggcgggtgttcccgctgacggcgagggcggggctcgtcggcgcgctggtgcagtgggggaacccggcggtgtgcgcggcgcgcgacggcgtggtgatcccgaggctggtcaggctcggccccttcctcgagcacaccaacttcgactgtggcctgctcgagccgtcggcggcggcggcggcaccgtcgccatgacagagccaaagctgttgtctgaacagtggcgcaactgcagctttctcccacactcactctctcgcttcaatgtaactactgtattggatagtggatacaaatttcaatgctagcattttctaactattgttagacaaacatttgcaataatgtgagaaaagacattaccaaaattttgcaattgatacgaatgaatcaatatataaattgaacgtaaccccatatactaatgatgtttaaggactatctactgctcaactctttgctttatctaaaatacattctccaacttcaaaaccagatattatacgctccaaattatgaatacccgaaacatataaccattaaagtcagatttagtacaattggaagccatataagatgctacttataaaaatatttcaaaaaattagtagaccccacatgtcaggggtcaccctcttctttttctctatcttttctctccttcctcttcttcctctataaagactgagcaacaaaggagggaggagggtttatacgtcggcgctccggggagggaatgacggtgatggctgtggtaggacatgtccaacgtcacggagcagccagcagtggtggaggccgaaacgaaaactacgagagtagcggaacacatgcaacaagagcgcagagtttcaaaggagagattttaccaatattttaaaatatattttagccgtgacacgttttttaatgtctactaataaattacacttattttgggtgttttgtagtaaaatttacttttggacaaagctaagagttgagagggttgtaaaataggcttatccctgtagagtcatagatattttagcgcatggtaataggaaacgtataaacttaaactttgtgggggcaacatctcgtggcgggccagacgctgatatgcacgaggttgggctcaacgtgttggcgtcaccaattaaacccagccagctaagttccttcagggggattttgggtgacacgcgaaacaagaaaaaatatcgagtattagttatgataaatatatatatataatttaattatttttaattctttcaataaactttcatatagaatagagcttttttttaaatggaactgctagaaagctttcgcaagttttttgccgtccaaattttcggatttgtggccatcgcatcgtttaagtgtacatgaaagaaagaaaaatttctagaaacaaatttgtacagttttgctataagttacaatgcagttacagtacaactataatacatttacatctcaattatattatagttatattaagaaaacttgcgggaagcgtcgtaattatactataactaaatctgaaaaaaaaagaaaaaaaaacttgggggaagcaccataacagatacggaggaagaggaagcgtgataacggatggtgcggcttagcagagaggagcgatgtggtcgagctcgacggggaggccgtcgtgcggcgtcggcatcgggtccctgagaaacgtgttcttctcctccccgaggcagagcttccacctgaaatgcctcaccaggtagtgcgccgtcaccagcgtctccaccctcgcgagctccatcccggggcagatccgcggcccgccgccgaacggcacgaacgagtacgccgccgccgccgccgcgccgtcgaaccgcgacggctcgaacttggtcggctcgtggaagatggccggatccatgtgcgtcacgctcggcgaccagaagatctgccaccctctcgggatcgtgtagccctcgaactcgacgtcgacgggcgctctcctgaagctgcccaacaccggaggcaccatgcgcagcgtctcctgcgcgacgcgccacgacagcttcatcttggcaacgtcctcgcatgtcagcgcctcgccgtctcgcttgcccctggcgatctcctcatgctctgagtgttcgtcaggggaggggagagttgggtttcttgggcgagaggagaggaaagttagtgctactactacttgccttgggccatggcggcgagggtggccgggtcgttggcgaggtggcggagcatgaaggtgaggaggacggcggaggtgtcgtggccggcaacgagggcgagcacggagttgtcgacgatctcctcctcggtgagcagctgccggccgccgtctcggaggctgaggaggcagctgatgagatcgtcggatggggaagactcgccgtgctccagcttcgccgccttctctctcacggtcgcctcgaccagccggcgagccctcgcgctcgccatgaggcctctgcggaacggggtgaacggcaggtccaccggcaccgtccacaagccctcgtgcatgccgtcgaacgcgtcggcgagctgctcccggatggcgccgcggtcgaggccgaacagcagggtggcgatgacgtcgaacgccagcgtcttcatcagcgggaacacggcgacggtgcggcggccggcccacctggcggcgaggtggcgcctcacctcgctgtcgatcttgccgacgtaccgccgcaccatgtccggcctgaggaactgcaggatggcgccgcggacgcgccggtggtcgtcgccgacgagctccagtatgttcctcctcccgatgatcgccgccaggctccggggctgcttgggcgccagcgcctcgtggtggaacaccaccttgttcgccgccgggccggcgacgagcaccgtcggcgcgccgaacagcgacagcttggacaccgggccgtacctgtcgatcctgtcctgcagccaccggtcggcggtgttgcgccgcatggcgcgcagcagggaaaggctctgcccgatgagcggcaggccgagggagcccggcggcaggttgcgccgcggcggcggcggcggcgacgccctcctcgccaggtacacggccagcggcgtcaggaaggcggcgaggagcgcgatgacgacggcgacggcgacgactgccattgcaacaatagccaaaaagagtgtagctgtgagcctgtgaagctaaagcttaattggaatgagacttgaccaaagagatatcgagcgaacttcatttataagagcgtgagtaactcgtaggatcagtttgcgtacttcccatggtatagaattattcacattcaagcccctctaaactgaacaaggctttagttggtactccctctgtctcactgtctcactcactaaggtacggtcaaacttgataaagtcttcaaaactaatatttgattttaaatttctcatatgctataatgtttgtagaaataaaatcataattataggaaaataaatttaaatgacaatccaataacactatttttatcaaataaaattaaattaataatatataaactatttattggtcaaatatttaaaagttgactcttaaaacgtgcgcgtcttagtgagtaggacagagggagtagtaactttgacaaataaaaatgtttatgggagtatctaaaaaactactataaattttttttgagtataaaagattcagatgtaactataattgaattataattgtaactgcactataattgtattgaaactacaatataagttatataaaacttgcattcaactatggtttgggtaactagcaatggaatctaatgttgacatgtgtgaaaatttatttctatcatttttcgcttcatatacaaatctcaaggcgatccaatggccacaaatctaaaagtttcgagggtaaaaatcttgtgaaagttttctaacaaatccgattgtttatttataaacatatttcacaccgcgtagaaccaaatatatactaatctcgtgtacaaactttgacatcttatcctttttaattttttttttgaaaatatgtcatattttcatgtatttttcttgcaaaatataattatagtactttcatttatcaaaacataataatttaaaagtttttattggccaaagataaaattacactggttaaaataaaaaggaaaggaaggggtgtatttttaccattgcagccttatccttacaattataaatcatacttcctccgtttcacaatgtaaatcattctagcatttcctgtatatttatctagattcattaacatcaatatgaatgtgaaaaatgttagaataatttacattgtgaaacgggggagtactagctaaatatcaatgcgttgtaaggagcaggttgaatataatttatcccatcctccatagctaatgcctaatgggtggactattgtttagtggctcctaaatgtcaccttacgttaggagtagttggtaccaaatttaacaatctctatggtcccacatgtcaattagtgagataaattcactgctcatcaccgttaccactttatagctatatgtcaacatttttttagaaataatacgattttaatggaaaaatgaaaaaaatataggtataccagataaaattataagtttagcatcatatcaaacaactgaagtgtgacaggatatatatcagatagcctatcgaataacattggttcggaccataattgtttgataagatcattggtccgagaaaaaaatagtaaaaggtgcaggcatgcatgcacgcacgcaggaggcctctcgaacattcaacgttctataggtacctcatgcacattagcccatgcacacacgtacacacatgcatcataaagaattgcaaaaaaatcctaccgtctcgtcaaacaacctctatccaacaaccgttgtttgatgggtcatctatcgaagaatagttgttcgataggatgttaaacttatgattttgaatgatcgaactttatttgtacaattttttattaaaaatgtattatttctaaaacaaaaatcgctttatgtacactagaatcttctaggttatccatctacgtctatttgcaacactaaacatatggtctgagtggcctggaattaatggtcacgagtggtccttgagttattgtcaatgtagggttataatcacgtaggttcacaattgcgtcatctaatcactattaagatttggccgcacacagaaaagcaagcactgtgcacatgaatagtgatggtttgtgcccgtatgaacacacgagcatatcttttcatgatcgaaaactgagcttgcatattttaaaattaacaaaattatcataaacgtttttatggatccctgtatcattgtctagttattattataaaaataatttatcgtaaatatgagttgtcttgttaagcctaaaacttagacatattccatcgtaaacgaccttagcagctcggttgtggtcttcctcggcagccaatacggatttctctgcctcgtaaaaaaaaaaaagtaataccgacttctacctcacgtggcagaaaaaacaaaggacactgtttctgtttatgtttgtgtttgaaataaaatatcacaaaactgcaattgtttggtcgcaacttgtatcatctacttatatgccatcacaacccacaacatcatctagtgtctatagcatttaatatattgccgcataagtaaaaatctgatgtggcttaagagttaattaggagagaggtaaaaagatgaagaaaccatttctcatgaaaaaaatcatctctacacaagaaccaagattgaaaacagaaccaagattgaaaacagagtataggtggataaaaggagagagaagagaggtgaaaattacaataataacaaactgttttattaaaaatactccctccttccaaaagttttggaagtttctgttgatcagttcgtatttggcgtataaacatgcatgcatggatttgttaaacatgcatgcatgcaaatccatccgttgcctatttgcactgcagctacacctctttgtttttaagcaaagcttgatgcagctgccattgatcgatccatcctgtgtcgttctatccactacatggcctctgcttgcagcgatccactgcagtgatcaataggaaggatggaagaaaggctcgggcactgcgtgagctgggcaccggattccgccgaggccgacgatgagcatgatggcaaatagcggatccaatttgcatgcatgcaatttcgttcgagtgggagagggagggaaggctccacgcaattttggctgctggcgagggcgagcacgcacggacgcgcgcgacgggcgagggaggacgcgaacggttgcgctcgcgcgcgggcatggacggttgcgcacgcacgtatcgcgaatcaagcgaagcgtcgcttccccctaaatccatgcagatgcagcgatggttaaatgcatcggaggggttccttggtctcagtgcaaacgtaatacgactggtacttttggaaggagggagtaacagttgtgtttggttaggctatggtttttaataaagcaactctgggctatgactttttaaaaagtagctttgcaaaagtagctgtgagaaagccaaaagctatggcttttggaaaagcttcttcctaacgagtagaccccgcatgtcatgcacacaggtatttttctctttctcttgagtcttgacacaggaagccaggggaacgccgctcgtcgctggcaccgttcgcgtactccttgccgtttgccgcgccgccggcctcgtgctcctccgcgtggagagcgggaactcgcgggcgagcgtgccgagacggagcgactgggcggcggcggcggcttatcgaggcggcgcggcgttagacggggtcggcgtcgggcggggaggaaaaggggcggcgccggcgtcgggcggggagggcggcggccagccggccggagggcaggggcggcccacggcgccgggaagcgccgcttgatccccactgttgcgcccgtgtgagaagcgagaggagacgaatagattagcgaaccgttttttcataatggtataggtgggtaattttctcctccaaaaataggggtagaggtgcttttgatttgtactacgtcaaaaactagctttgggcaaaagtagctgtggcttttagactctttggttggtttctgacttttgcaaaagcaggttaaaaagcccaaccaaacatatgtcaatgaacccctatcttcattttaagcggactattggacgatgtaattaccgaatgatattaataaagctcgccattaagaccttcaaaaattcacagcaccttcgacgaattttaacctttttttttgtttttgcgaaaaagggtaaattttacctcagccgcaatgttgcagcaaatgcattcggataattatggattgtttcataatattacataacataaaggtagaaagccaatgattaccggtcaaatgtcctaggataggtaaaatgtacatcttccactttcacagattctgaatctatacctttgcaagtttaccgcatacattgtcgttgcaagtggacatttttccacaacgttctgtagtttcatcatgtatttacttactacaccaccatgatggtgcactctaccagtctatcactgtatcgtacgtgtgccctcgatcgtaacatatccacacccacaggatcgatattgcttgcaatatcactgtactattaaatacaacgaacaacaagaaataaccaaactaaggtacgtactttgccctcagctttgtgtaaagtactcactatttgccgggtccatgactcatgagctgctgctcctcagtctctgcagcctttccagatgagacttgagccaggcaaactcatgttgcatcatctccaggtgactctccgccatccgcatctcctcgcctaataggtttaatctcttctgtacccactctatgctctctttgctataggagaagccgcttggggaggtctcttggttaaccatatacaccttgggggatctgagtagtagaactatgatggttacctgcaatagatgtacagcgccaaatgagtttggtagaagataacaaaggatattgtgaattagtctactttgttttaatttcaaacctttttttgttcgggctattgagttctgcagtaactagcaagactaacagcatttggaccagggaatctaaactataatatgtatgtaatcaaataggtaaaggtacttgcctgcaatagaacgatgatggctaccagtgtcagtgctaacaccggcccgagctgacttgactgtatatatgacaagagtgaacgccaaagttcttgtgatgtggatattatggaatcccatactatactttgttggtgatcatgaatagaaggaacgatgcttctcacaacaggttcatcaggtgcagaactcgagcctggatctgtgttttccaaaggattctcactactgagagtagtccctgatggatcatcaacattagttgagctggaaggtcctgaaagaatggacagagaaaatgatcaatttactgtttcagagtttcgaatatttcatgcaaatgaggacgtaatttggatcaaacaagttagaactgtagggaaagagcaaaggactgatgcagtgaagtggacattcaattaacagacctctcgaatgacagctgctatcctgcttcaaaagatcatgaccctaaaaaacatgacagggaggatcacttaagattcaaattgtaaatagctttgtagtaataatgttctgtgatgagaaaacacatacgagcttgacccatagcccaaaaacatcacggcattcatcttttgttgattgatcaatcttccctgtaattttgatatttaaaaaatgaaaaagcagcagcaagttaagttgtggtagatgaaacaaactgatcttttaagggggtagaaataaacaaataacactgcccccagacatgcaagaatagctcagaaataacacaaataagtaaaattctaaatatggaatgaatttgagtcagaactaagcaaaatatggttgttcactaaatctgcatatatacatttaaaaatgccactataaagaatttaaacgtctcaaactgctggagcgttcaggaatcaggatatatggggtgtatcacctctaaatatggttttctttgagaaggctacattaatatataccctgaggtagcaactgctttcatccaggctgtcttgttcaacatcccagatcccctgtttgaagaataaggaacagtagaaacatcatttcagtatctctacaacatcatcttatggtttcataaaaaaaagtgatatgttcccattgtaaaatgtaaggaagctggaattcatttccatggcagtgctggtcacaaaacccgtgcctagttctcatatggtcaagcttttacgttaaatctgtaacttctgatgtttgattattttgatctaggcgcacatttgtgcttttattttgcttaattttgattcaaacccaccacaaattgacccttagttgggaacaaccagtttatatgaaaataaggagaacaaccagttctagagaatttaaaccatccatctatggatataacaggaatgattgtctgaaaagaagtaataatattttggagagcagatcatatactcatccacaaagaaaagccaccatacaaagtaccatatttccagttgaagtttagtagtgctatatgatttaaaatcccaaatacatccagtcaacagtagtttgttggggaaagtggatttcaagcaagatgaaccaatactgacaaccgagttcctcacctcaacagtaaaatggtccccatatggcgcatcaccaatttgctgagatgtctgaatcatgagatgcctttgaaaaggtaaacaagaaaattaaacatcaggagagtttagcatcaattattcttcagagaacatataatttcttttagcacacagtcaccaaggttgggcatttacattgccatttactgcaataaaccataaaggtatggctaatcaagctaacatataaatgagaaataagaacacacacgattattttgctatgaggctcagatatgatccaccaacaagtgagtgtgaccaacaaagggcgaaaatgaaacaaatgttagtgcatctcaatgacttcaaaatcctcaacattttcagaaaactccattactaggtgtaaccgtgcaaaaatagaggaag

SEQ ID NO: 6933 - DNA, 2737 bp, Oryza sativa
tgtcatatgtattctaggaaagaaaaacatgatttaaccctaaattaaccacatgaacagcaaatgacatattacaaatgcttagcccacggcatgcatagcaatttcaatatcatgagcaacaattgacatatttcgaaagcaataaaacaaacggaacagatttgaaccatcggggtttaccatgcgctgaccatcaggaccgaagtcctcttcgtcttcgtcgttgccgtcgtcctcagccacatatgtcccttgagacgacgacgcaccgactcccggtcctcctccgaagactccaaagtcgaaggcgggtggcccgctgtgcgacatggatgccgcatgacctcggaagcctccatcgccagatgctgagccagggggaacccatcctcagattcccctgccagatccaacgccattggtcaacgacctgccgtagcctcatcctcctcctctccctccacgacttctgccgcgtccccctccccccgctggaggacgcgacggggcgatggtggatctgctccctgcctgaatcggaggtaacccaaggctacccggttgaaggatctgttagtaggaggggaaatcagggaaggcgtcggcctgggagttcagatccaggccccccgatccccctcccccaaaatggatgccagcgccagatccagcatatcctgaagacccctgcgagaagccgtagtcggagccgtccatgtgggcggctggagcttcattgaacgactgggagaagaaatcgtgaggatttccccccgccattgctgatgcgcgattcgtgaggcttgcgcgagtggcagcggcttgcacgacgccagcgagccaatcggcgggcagaggacaagctagcgcgaagcagtggtggaggctagcgcagggagatggcggcgacggcgcggggtcgagaggagcaagagagagatgacacgaggaagagatgaggcgaggaagagagtgggcgaggaaatggatagggttggctaccgtgaaggggcagcgggtggaaaagaggcactttagtcccaataagcacctccatttgggacttctggactaatgcactttagtcccattttaatccctcctgtttgggactctagggacttaaagtgacttaaagtggaggaacttcttttttagaccctcaaagaaacagggccttagctttgcgcattgtaagttacagataaataataaatgcagtgctttgaataatgcaccggcttcacgaatttgcaggcacaatataaccacatcttctgtgtcactcatatgggagattggtatgataaactttcacaatcttttagggatactgcgaaggaagtattggcaaaagcggatattgatccaaatgttaggtgcttcacaagaagacagatgaaacgcatcacaaataactacagcactaccttgggaagaggagggttttctgtggtgtacaagggtatgctcgacgatggccattcagtggcagtgaaacaatataattggagaacacagaaaaaggagttcacaaaagaagtgatcatacagtcccagtgtagtcataggaacattgttagattattgggttgttgtgtggaggcagatgctccaatgctggtgactgagtttgtcccgaatggaaacctttctgaacttctgcatgggaacattggtcagcttcctgtctcattagagacacgcttccagattgcattggatgtagcagaagcagttgtatatatgcattactctcaaaatcatccaatccttcatggagacatcaaaccatcaaacatacttctaggcgacaagtatgtggcgaagctatgtgactttggaatatctaggcttctctgcatggacaatgatgaatacacggggtttgttataggaagtatgggatacatggatccagtgtaccgtgagactggacgactaagcccaaaatgtgatgtctacagttttggggttgttctgttggaactcatcaccagaagcaaagggattgatgatcagaacagaagtctagctagagtttttgctcactctagtatagatgaaagatataaactatttgacaacgaaattgtaaccaacgagaatgtggacttcatacaggaaatggcaaaccttgcacttgattgtttgaagtctgaaatagaagatcggcctcaaatgaaagaagtcttggaacatctttatagtctcaaaaggaaaatgttggaacaggagaggaagattgcagagttgatggaagagagaaggattgcagagttgacagagcgaagaactgtggcatttagggaaatcaaggccatattgcaagatattggttttgaaagactcgtcacaaaagaaaaaatagattccatcgtaggcaacccgaaacaggtatcaacctcagaggcattttcaggaaaaagtagtgttctcattcagcgtgccattggcaagatttgcatgggacatttgaaaaacattcgatttatcgtgataaagatgtctgttgaggctgatgagatttggaaagagatgtttctttatgagatgatcaagcaatctagaattgagcattgcaatgtcgccaagctttttggctgctgcctagatcatgtggatgccccagtattagtttataagtatggtgacataggcttgcatgatgctcttttcggtaacgcgtggcagcagtttgattgtcctttcgcttgcgaaatacgtctagaga

SEQ ID NO: 6934 - DNA, 14346 bp, Oryza sativa
ttgctcacctgcactcacttaatgtggttcacggcgatgtcagaactgccaatgtagtactggatgtttattctaaatctaagctcgaaatgcctgggataactgcatttatggcaaagattgcaggttatggaacacaaaggctcctttccttggataaggccaagcatgaaatatttctaacagagaacatccattacaaggatccacacttcctcaagactgggctcatggctaaggaatatgatgtatatggttttggcgtggttcttgtggagctcttcgcacagaacatggtgcaaatgcatgacgtaaacatggtgctcaaagaacttgatggcattcctgctagatgccatcatcttaaggaaattaagaaacttgcttcttggtgtcttgcatccaaggtgacggagaggccagcaatggacaaggtagtacgatgccttcgagctgtcttgacaaacctgcaaaatcttcatgatccctgcaactgcaagtcaatgtataataagtctgcgatgcagtccgagcaaattaccagtgccaagtctgccagtagctgatagctccacaattgtgatataggaagttaatacaagttcccaattaatgtgacctaaatgtaatattaatatatattggtatatatgtgtttgtagaactatttgctggtcaaatatagggcaaagccataaacagtaataatatttcttgctggattttctgctgggatccagcgattggagagacagaaaatgtactgttagtagtagagatggcaataatgacaacacaaacccttctaattgtgtttccagcagatatccagatcttaagatgctgtttatatatgtgtaacattatccaattttacaataaccctcgtgatcgacaatacgggggttaaattcatctcactagagcttttttggttgttttgttgtttgttctgaggtttggttgttgcatgtttgcggaattgcatgcgccacagatagcaagtagcaaccgctgtatttagttctactagttagcgtgcacgtgcaaggcacatcgaattatatctaatggagtacaccatgttggttttttacactaacaatgaagaggagaaatatcaattcaaaaaaaacacattgcttgaaccaatcgagatacaatttatgttgtcaatcatgttcgaagaacgtgcggaagcattaggaacacagagccacctaggagtgttcaaccctagcacatgtggtggttagtgggggtgtggcgtcacaacgctccatatttaaggttagaggacttttacggtacattctacttcaagtattcaagtatatactgttagtatataatagggtaggttcggtatttgttaaaaatctgaaaagggttgtttagtcatttaaaatagagattattttggtttttttaatcatgaatagtgataaactttcccgtggttttttttctgttgtggatatcgtcatccgcgtgtagcgcttcttttcatttcatccggcgtccccggcgacggaagctcccggcgcacctcgctcccgccccggcccagcgcctccatcccgatattacctccggcgccgggagaagccgatcttccatgcgcccggcgtcttccgccgttccgcatccccggtgccttgtctctagccctagcctgttctcccccttatccgacctcccacagcttctgtcttccccaaaccacggcggcgagggttgatggttttggagtctaaacatggtttatatcgtataaagttcgaaacgatgttaatggttttggagtctgaacattcttctttcacggccttctctggaagactggaacgtgggagttgaatggatagtagtcacagaactgttcatacattagttatattggcatataaccatgctaattatacattagttatgctaattatgccgccctgccgctgccacctgccgccgccgggctgcccttgccgctgcgagctgccgcagctgcacgccttcttcccggcgcccttctgtagctccgcctgcccgccgcctcccgcagacagggcgtatgtcattgaactccgagttgaggatggtgtcgaactcaacgacgaagaggtggttggtcgcgttaacgtcgccatgccatcaaagctgagattcgcgccagtgaacccgttgaagacgaactgctcgtggccaccgcctttcgcagcccgccggcgccgcctcccgcaaacctgacgaattggggattttcggaagaactaggttttgggtgaggaaagggggagggaaattgaatcgattcccgatggcagcgacgccggttgtggttgtcgacggcggtgcggcgcggcgtgctcgcagaggcagtcagcgacagtggtcgcccacgcgcggcttcgagaaaaattcgctttgcctgtgcacctaaaggccagatctgactaagtgagaaacacgaatttacaaaattacccccacgcaaatagataaaaaagacaaatatgccccattcaatttatactgcagaataattgggagaaagatcagatgaatttacaccgttagatcaaatatattggtagtatatacttcaagtagaatgtatcttaaaagtcctctaacggcttgtttggttggagggagttttgaataaggaaatgggagtttaggagattgagctttttaatctctagtttgattagaggacttgggaattttagagggactggcatagagaattaatctatccaactcccaccgatcccatccctggggacctgttaattcacgagacttggtgggaattaaacagcagaagtccgaaatacccctctcccgcacactccgccgtccattgccgcgaaaaggaataaaaacgcgcgaaaaatcctgttcactgccgcgaggaggagtaaaaacgcgcgaaaaatccccatctcagcgccactttcctcgcccactccgttggccaccacgagaagcaataaatcctgtgaaatatcaccagcgattctccccattcacacgcgaaaccacagccaaggttaggttctgacgcaagtttgttgtgttcttgaaaactctccctctttctccctctctcctgtacagatcgagaccacagcctcatgaggtctggattctctctttccccatctttctgcagtacatgactgagaaatttgtgtctttctcctgtacagatcgatggaagcagctttgtaaggggaaaaggtggggggggggggggaaaaggtggttctgatctgctgttcgtacttctacgtctgttgttgctcaaggctgatttttttgtagttttgctctgcagtttatcacaccaaaagctgtaggtactgatgttattctgttctctatttttttttcatcagtcgattgccttgtttgattttccaagacagatcaatcagatttggtattttagtattaatggtagtaggcattttcccagtgtatagagtagacctgttcttaatttttttttcatcagtcgattgcctttatagattttccaatatagatcaattcgatttcatattttagtattaatggtagtaggcatttaatctgctatagaatgacacatagtgtattcgtcaatttcatacgtgatacatacagaatggagggggatatgatcagtatcaaaattcatcatgggggatctttttcaaaggagggtcaactttgctatgttggaggccaagtctctatttttcgcaattgtgacagcgaaaggatgtcatacttttgtctagtagacatggctaaagatgtaggtttcaagggtggagatgaactattctatgctatccctggttatagtcttgaaaatggaatcgacaaacttcatgatgatcattcagttcgtaaaatgttgaattttgcaaagaaaggcaagtcaatggaaatttatattaagcatcttgaataaggtgtaagtgctactccaatatttggacaggatgttgaagataatcatgtggaggaggtactgtacttagaaacaacttttcttttccttccgtattttttttctgatgtgctgacgtgtgatactgtgtcatttcgctatgtttttttttgttgtttgtgctgcttgtgcattttttttcctcatgagcatggtaccttgataaagtatagttagtacttgatcttgacctatttaaaatcctaataaatttgcaatataattttgttgacagacatggctcgccctccaaccaatcgagatattgtaatcttttggaacagaatgagaacacgtagagtgaaaatagtgatgacattgtatttattgatccatagcggactgtggagactaactgtggtgttgttcaaggccaccagcatcattgaggcccctggactggcagcggcagcgagaggtctcagcggcctagggtcgagtgaggattgatgtgcatagatgtaaatccaaacgatatcgtttcaatgacaatgtgagaataaaaaataaaataaatagaatatatagattatttgacaaagcagagataaccgttctttcgtttacaactatgccgtaggttgccttcaatatgaaataatcattctagtgctgcgctgttttaaagctaaacaggttgaatagagaattgacaagcataacaagtcataatagtgtcagtaatcagttacaaaaattgtcatatatcatgaactgaacatacaggaagcaaacacattctgtcagttagaaaaaaatgaaaagttatcaaaaaaactttcattgattttcagcctacaaatcataagaactctcattgattttagcgattccagttttcaattgtttcaatcgatctctagatcttgatggtactaacaacccattcaatataacttgattgtttctaggaagggatgatcatggacgtaagtaatacatacacttgattgtgaatcaatgagagtttcttttgttgaacgactgaaaaatttctactgcacttttgagtgaaatgatggcgaaaagaacacagtgaaatcaagaacggcctgctgctcaccgagtcaaggaggatgttggatgccttgaagacgctagatgaccggtgtgtcggcgtagtgaaggaaggcgagccccttcaccgcaccaatggcagtctacatcctcctcatccatggtacaggactatcgagaccttcacacaattacagttcaggtcagcttctacaagtctttccggaattgacacagaggtggtggtgacaaactgacggtgaaggtagcttttgtagcgtgaggttcagaatgaataaatgacattgcagactattaatatactgatggaaaacattgcaagatgtgtctagacaatgaactcaggagataacgataaactccagagcaaaacatggctgtccaaggttatgaaagattacaacgtagcccatattaatttggtaaatgttcagaattaggattataaatttagatacgttatatgaactataatccattgttttccataacagaacaaagatacaagtccaacgtagcccatattaatttggtaaatgttcagaattaggattataaatttagatacattatatgaactataatccattgttttccataacaatacagtaattcacaatccaaaatgcagattcaagtttagtttatggactgaaaaaaataatgtatgacaaggttcagaatcatttaatcaataataaatactgtcaaattttcaaaataatcaattcacgttcagtttcatcaaaacagtacatgtaaaaatgcaacattcaaataatgctgtacaagcatcaattgcatcgttccctcggcctctgccaagtgccaagtgaccaacatggctaaagagatcaatcatacagcattaatgtttcattgttggcctgataccgtaatgatacaacatgaaatattcatgaagtgaaaaatttctcaaaggtataaaataaaaaggaatttagtccatctaaaggcactcttagttttatatgcagagcatgctcaaaaccaggaatgacatggcaagctcgatgtttacataaaaatctctagaaagtttagaatgcgaatatacttaaacaaacttcaaagttttaataccaaaatatattaaatgaagggattttgtgaatctaaaggaaaaggtatcatcaagcagagtagcaagtcatatatatgggattagcatcatttacctctctcctgaaccccagttgttctcttatttgctgctggaccaatgcattccattcattccagttattgcatcaacttctgctacaggatcactaacaaatttcacaattccataaacctattaacacacccttaactgaaaggcaatggaccctaaatgcctcttgtagcatgtagtctgcaatatctgcagccagatcccaactacaatggcccaattcaatcgaaagaccatctcaacattcagcatcatttgtgcagtgtccactatatgtctgatgaagaacttgatcagcagctgcctgcaacgcttgtaatctcaacaaagtcataaccctgaagttgtccactttgtttatcccagataagcttcacagattgaacctgcaaatcaatgcaaacatcacaatatggtcaggcaaaaacacaaagttgacagcagtagttgttgtcattcatccattatcactggagcaaaaaaaccaagtcacatatagcagctatgtaactgttatatggtctgcaaacttttttttttttttgaacggaaaaaacagcacagtagtgctttttcattgaatatagaaggagaaaatacaacccctaggggtaaaacaaaaagatctttagactatacactatacagagtgcgggatgagctcgcgcaatcttttagccccagctaaagcccacaagctggcctcctctttgatttttgctaggagaacacctgtctgcaaacttagcacccatgtggaaacatgtggaaacaatagataagtagaaacaatcaaacaaaaccttccaaagcccataaattagaggaagtaacctgttcatatttcatgggcacagctctagaaaaaaataatcagagatcagattgaacaaatatctgctgctgctaacaggtcaacatctatctagccaaaagcaaaagggttgcaataaagttaagtggaacctgtatcataaagattatttattcttcgttaagcaaaatataaaatgcaactattgaattgcagtgtgataagacactgcgcatgttatgaataaattagactttgtacacctttgcaatcagtattattatgatcaaatcctttccaaattgctctaaaaaaattgtatctcatcagtattgctccgatagaaatatatttccaatcagcattgctcctatcaaaattaattgagatacatgccctgaaaaagtatataatcacatccaaagtttaattacaacgataatataatcatgtgtttgcagaaacctcaaaaatatggattatacataaattgagctgtaagaagcatgcatgaactaaaagtaaaaatatagttagaatatgtatgcctattgcaaactaaaatgcaatcttaaaaataaaatcatgtttaccttgaagccaatgtcacatggattgaaattcaatctttaagctcaaaatagggtggtaggctgaggcgaggagatgattgacctaaatacctacaggcgcacaactcaaataactcccaccttagtacctgataatatcactggcttatttggagcagcacacatctgttctacttcctccgtttcacaatgtaagtcattctaacattttccacattcatattaatgttaataaatctagatagatatatatgtctagattcattatcattaatatgaatgtgagaaatgctagaatgacttacattatgaaacggagggagtaacttctaaatcaccttgcggtggctgtcattaatcaacccagtaatattaccctccactttaagtgtttacttccagaggctcacatgaagtagtcacattcaaaaataaatataaacattacttaactgaacctaacaaacacgttcacatattttactgttcaccaaaagaaaatgcaattattttgcctggtgatgttacaaagagtgcagaagacaaggaaaaatctgaaactaaataagcaaatatctgctactgctactaacatgtgacatcaattcactcaaaaggaaaagattagacattaagtgggattggaaatttttactacatgtgttcgtaacgatttaaatgccaatactaaaaattaaactttgatgaaaaaactttaaaattaagttttaaaatttaaattttggcagcggctgattttgtatagaggaaacgaggggagagtgttcggatcaccttttggttttacttttattgggacttgcatgttgttctggaactgaatttggcaagggcactaattgggtcagatatatgaacctgaaacaatgcacatgtgaattttcaaggctgaaaactcttaccttggtatattttgattccatggtataataatatgtgagaatgtaccaaaattagataaagcctttatctcagcatgacacgacaatgaatcaacagcttcgcagtcctggccgggagcaactcaatgagaccctgctcctacctacccgctggcagatttactgctccacaagcttcatactgcaggccaaacaattgtccggctggaactcaacataaattcacctttgtcttagacaggagcagcgagggagacgtgatccggatgagtttgcgtagggggggcagcgaggaatcgcggtggcggcgcagtggacaccggacatcgagggatcgacggcgaccggacagcaggagatccggtgccggcgcgaggctaatgcggggatcgacgatggccggactgcgtgggatcgacggcgaggtgcgatgcagacacaagggcgaagcggctcgacggagactagatgacgatatatcgacggcgccctgacagcggggatccggcaacggcgcgaggcggcgagggagaggcagcggggtggtgctgggaggatccaacacttcgtataagccgttggatgaatatatctaaggataaaaaaatatatataggtgtttgatgaagtcgtactttttgtgtgacaccttgaaaacctcaaatttgtaaaaatcaagtctaatttgatatatattaacaaataggtagaaccgagtctaatttgatcaattagcataggatttaggatttagttttagatttatttttcgagcctacttaagagtttatccgacggactttaatttgaaaaatgtgagccatattgtttgatcaaatttacttttggcccaggtcttcccaagcaggcccaaacttgggctggcccatcatcggcgagttgagtcaattcgacggcccttaagctgagcggctgagcacggcccacatatgcggggacggtccgatgcacttccgcggcccattgggcgcagcgtaatcaatagcagcgacggcccaacgctaggcaaatctgagccgtccaatctaatggacggctccaatcgtccccaaatccctctctcctgattccatttctctccggcgacgagcgccgagcggcctggacctcgtcggcggtaggggcgacgccaagccgacgcttcccgtcttcagcaaaggacggtggaggggtgcaccaggacagtgcgtgcgcagggacacgactgcgaggaggtgaaggtgcggcggtgccgcttcccggaaagctccggtgagctcaggggcttcaagtccgataagtaacccgaaccctcaggggcttcaagtccgataagtaacccgaaccctcagcttaattgatttggatttgactcttatggttattacctgaaattagggttcttcgaattcagagaattttgtcgagaaatttcaatatattttattcccccttttcgagttaggagagtttcattatcgtttatcctcttttaattttaggaacttcaatcaagtttatccctttgctcaattttgttttttttttctttggctggcgtttcatcgcgcggatggggacggagggcgccgctcgtccccttggaaagattgagattaagataagattttcacggacaacggaagtaaattgaatcgatctttttttttgttttaatgtttttttcgctattttttcgttattacggacaacggaaacatttttaattttttttaagtagtagagatagagaagatagagatatatagtaccgtgtcaaatataataggattcgatttttttttttccgcgtcacatataattcttcttttttttattccgacagatttgtttttttaattttttttttgctctttttttaccacgtccacgcggattcgtttttttctcgccgatcttttttgtcacctgtttttttttcgcccgttttttaggaatcggacagattccttttttatttctttcgccttttttttaccgtggaatcggattccttttttttttccctttttttttgccccttttttgatcggacgttcttttcttttttttcccccttttttgatcggacgttcttttctttttatgcccggttattttcgttcggtttttttcccgttttgttttggatcggacagattttttttcgcccggtttttttcgacagacgacagaagcaactcttattttttaagtagtagagaatagagattaatatcaatataaaaaaaactacatactacatctcatccatttggcatagacccaaactgattcgatgtaagctgcataaatcatctattcaccgatttcactcgtttgacaggtgccaaattctggtgcctggaatatgatgcagagaagtgtgctcactgctctgttttatcgtcaaggtaggtagcaagttattaaatctgtcaaatcccctttgaacattatatgaatatagtatatcaagttatcaaatgtacattacatcaaaattgttagtggagaaaaaaatacagcagggctggtctgctagcagtaacaggtaactgggtcctcttatttgtcaaaaaaaaaaaaaactcctaatattgccgtgtcacaggtatagcggttcttttccactggatctttcattagaaaatcaaacaatcctaggacaagttgattgaaaagatttatgggtaccgcacgatgcctctagtagtctagtagttaattggttagatgcgaccaacgtgcacaggtttctataactttcagcttatatggtttcatttcacatgttgtaaagaactactttcagattctttggagatatcgaaatacatttatcaataaaaatgttacttatgtgtatcctcttgaactcccatggtatgattcctcctctccacagaccactttaccattgtacacctaacatagtaagttgattagaaaatacacccatgactgtacattgatgtgatttgctaaattgttctcagcaaacctgtagcaccaaaataatttccagatgtgaatgtttgattggatcgcttgaacgttcaaactttagctattagggaaaaaaagattgctttaaaattcaaactttagctatgacaaaaaagaataaactgaaatagatggggttggcaattttttcttattagccaattaaaaccttataattgacaacatgctggagaacaagccagattaactaaaagtaaaagtagcacagtagtatcagattcagaaatgccacacaatcatgtcttggttgctcctttgatgtgaataaatcaaacgttgagaacaacaggaaaatattatggtccccttaatcaagatcaaccactcatcccccctaatcaaacgccatacaccaccaacagcaggtaaaatttggttagagaagaggaggaaacaggaggggaaccaccacacctggactcctagagacgagaaaatggacatttcgccatgttcaaaacgcggtttcgctagaatgccatctcaaaaacatgattcgataaaatgccaatatagagcgtgcgtctaccgccactttgccatttttgccattttattcattttcgaaaagattttctctcctctactaggtgatgagacaaaattgccccttatcaactcagagaacacggtgaaagatgagacagaataggcaaggagacagagagaaggggcggcgacgccgttgctgcccacaactactctaccggccggtgcgccacctctccccattcctcaacctcgccgctccccgccacaccccacgccgccaccacctgtgctcgccgccaactgaacagccaccccgccgacaactgccaccaactgtcatcgtcgtcggtcgcgccgggacctgcggcagcggcggcgaggaccgcatcagcaacctcccggacgaccagttgtgtctcgtcctacgctggctcgacacccacactgcggtcgccacgggggcgcttctcttttcttctcctcttcccctcggtttctcttcctgttccccttttctctcttccttcttagctagcgaggaggcgcagctggtgcagtggcgaggctgggtgcggcggcacggccgacgacccgaccaaggcgatggcggttggcccagcgcggcggcggcctaagggcggccaggcggcgtcgggtggatggggagagaaggccggtgcggcgaggaggtgccggggcggcaccggttagaggaggcagaggtggaggtgctgggtggtcacggaggcagaggcggcgcgcaaggaggcggtgctccacacggcgcggcggtgtcccagcgcccatgaagacggccatgggggcgctcgcgttgctcggccggcaagctcggtcttgccccatctcacaccaccgtcgacgccctcgtcagcaacggtgaccacctcgccatgctcgatctcgatcccctttcaaccgacaaggaggggcaatttagtctcatcaagccgaattccagtgaaaatggatttgaaaatgacaaaaatggagaaaatggtaaagtgactgtgatcacgcgcttcatattggcattttagcgaaacatgttttcggaatagcattccggcgaaatcgctttttgaaagtggccaaatgtccatttctccctggagacggcaaggtcatccattgtgtagatgaagtcaaagccctggatcttctatcggtcggcactgtcaccacgaggagagcgggcggggccatgggggcgtccaagcagcgcaccgccactgctgcccttgcgttcacgcgaatcaccagcacctcctacacccgatgcagcggcgcgcaccgtgggagtcgagctcaatggcggtgcttgaggtgccgaggggtggccctggttcctcctcctgatgcgacgcgcaacgtgggggtggctgcgactgcagctgtgcaccgaaaccggtcctctccaccgtcggctcggctgcctccctaagcagtccgtcgccacgtttttcctgatgtccgccatcgccggagctccatccctccgtggctgtcaacgaatgtggctggacacggtcacagagaaggggaaccgaagatgggaggccgccctgggatgggagtggtgggaggacgggatttagggggtggatggagacgggaggtgaggcggtggatcggcggcgagggtgaggtggcgtgggagggcgaggtcgggcacgacgattggggcgaacacgtgatggacgaggagcgggagtgcgggcacgatgacgttctggcgggggagatcgtcggcaacgtgtgaaacgacgagagggagagaggattagggtggcgtggaggtggaggagacgcagggcggggtggtggggttgagatctgagcgaagggcgtggggcggtgggcggaggagcgaggccatgaggggcgtgaagggatcgatgtggagcactggatgtcgcgatcgtatcattaatatcacgcgtgtctatcacgttagtgtcaccaataccattataaattttttaagtagtaataactaatatctctatttctatctctatctctatctctactactccctccgtctacttttaataggcatatttcatcttagcacaatgaccaagaataagtaattctacttatcatccatttaaacatgctactctctccgtctacttttgatagacatatttctaaatctaaaaaaaatatttttgatagacatatttcaattgaaccacttatcatcttaatgactttctcggatttaa

SEQ ID NO: 6935 - DNA, 22986 bp, Oryza sativa
aagacgaatggtcaaacatgtgagaaaaagtcaacggcgttatctattaaaaaacggaggtaatattaaactgtggtgttattttctcctgaagatgaagatgaagttttttttacgcaaaacgaggtggtattaccgtatgattgattgagttttaattattataaacttgaaaaatagattaatatgatattatagagcaacttttatatagacagttttcgtacgaaatacaccgtttagcagtttgaaaaagtgccactaaaattttaatcttaattcaactcttgttgaaaaaaaaacgagacctaagtaatataggaaacaagtgctttgtgctagcagcacgcattgaggatagatatcaactgtcaaccaaagatagtacatgactatgatttttctttgtattaagctgagttctttttaataacttgaaacggtttaattttctctttttcgttagcacttttttagaaatgctaaatggtacattgtatgtaaaagtttctatatatatatatatatatatatatatttttaaaaatcttcttaagtttaaaataatcgatacactattaagcatgaggtaatgactcttcgcattttcgtgcccggaaaatcaacgaccatccaacataatcaaaatagcccttaggctatgttcttcaatttctttcccaactcatttcattctttttaggcaaactttttatgtccacacgcttctcaaactactaaatgtgtgtttttttaaaaaaaaaattatgtaaaaaagttgcttttaatattataagactttttagcattgcccacattcatatatatatatatatatatatatatatatatatatatatatatatatatatgcgcgcgcgtgcgtgcttagattcattaacatttatatgaatgttggcaatgctagaaagttttataaactgaagcggaggtattacttaattaatcatgcgttaatgaggaacacccttttttcgtgcgggaaggtggagtttcgcaaactcagccttagtcgttgtttgctgtattaacgtgcactaaaatactgtaggagacattttcacgcaaaatgtagccggagttggttcttttcttgaaactggtcacatggctaggtttttttattttcaagcagaatcaacatactatttttcttcttttagttgacaagttcaaccagatggtttgatcggaattttcgaaaccatagatgttatatttttaatgtgacaccgcttacaagaatactatatcaatatattattaccattccaattagttccttaccatcgtatcatttccatccctataataatctaaggttgcgttcgtttgaggggttgttaaacaaaacggagctgtgaattagtatataactaattaaatattataaaaaacctaataaataaattaatataatttttaaaagcattttcctacatagatttttcaaaaaaaaacacacagtttaactgtttaggaaacgtccacgtgaaaaacgagacacatacacagtatacactaattcaaacaatatttcactcatgataataaaaattcaaatcacaaactgcacttcccctcaaataatatcgaaattgatgcttgaccagtcaacactacttaatcacacacaccacccagagccaaaccagattaaatcaaggtcgggggttgccttgcctaaaccaatacaaacaagctgctaatccaaaatcaatgtcccgtccgatcgcgagatcgcgatcgcaaactggcaaaatcgcacccgcaaaaatatctcggcacgagtcgacgcgacattccaatagcagcagcagcaagcagcattcgcattggccttcgcgcgcttttgcgtttacacccctcgcgccccctcaaaattgcagacgcccccctcccctcccctctcgtgctctcctctcctctcctcttcctcctcgcctcgcgtcgcctcctccgcggcgtaccctaaccctagcctcgccttccccccaatggcgcgtcacgcgtgaggagccgccgccggagcagcaggagcgggagcgggagggagggaggaggagatgtacaagcaggggggaggagggggagggggagggggaggcggaggcggcgcggggctggaccggaagcgaatcagcgacgcgctcgacaagcacctcgagaaggcggtcgcggcggcggcggcggccgcgtcgccctcgacgtcgagggggtcggcgggggggaggggcggtggtgaccaccagcgcctcgtcgtgccgtcctccgcgtcgtccatgcccaagggacggtgctccgaaggtgacgtcacgcgcgacgcgacgcgaccgactcgccttccccctcctcttttttttttattggccgtctcgcgtggcgcgtcgtgcctgagattgagaaatccgtcgtttgcgtggtgcgctgatgcggttgcggccatgggaggggatagattgcgctgcggcagcagggaactggttctggattggtattccgttgtgtttgatatgattagtgattgcatatattcgtctttatggggattcaggcggctgcggtagaaatttattgtttgattttaaacgttaggattaggatgtctgcggagctttcctaagagggaaccattcgtcacatgtggtgtttgatcgatggcatgagcttatgaacctgtttggaactatagaacttaacagggaataactaatttgacgtaggaatgtaattgattgttgattgtggattttcattagcggcgaagttgttggagcgttggaggtattgtgactggtttgcaatgatctgtttaatgtatcctaaatgtgttgaagactatgaaagttgatttatttgttctatatgtgtgtagagatgtcagtttaagtttttttggaggtgtttcagggttgtgttaattgggctgttgttttgatgatgtttgaagatgctgatgtaggatcttattgaggaagtgtttgcttgttgtatccgatttaccatctgcttgtttcaggcatagacgcatagttaatgttgtgtaaaagcacacaaatgccttaaatggccttacctcccattgggctttccatatgtgcaccgcaaaaaagattaacggcattgtctaacatcacttatcttcatgattttatatgcaaatacaacgcgtggcttaattacgtacaagaataacaaaaacaactccaaggacaacaaaaataaaaacaatcctgaaattttttgcatgtgttgttgatttaaaggttaattgaaattacattcctggagtggtctccgttaccaaaaccaaaaatcaagtggcccatacgatcagtaatatcttatttttatgcttcattgattgcttaaatttggttccattgcccagttctttgcatgaatgttgccagtcgggttgaggagtccattagtttaattcatctatgctattgcgggtctaactggagtataacttttaagttttttgaggtgttgattaagcatgctatgttttatttcagatttgatactgtgtttacaggtatgctgcatttgcatcattgtttgtaaaagcctttgcattgacaagtccatgcttgacattgcaggggagtctgaatctgatagtgaagcatcagatgttagtggttctgacggagaggatcactcatggatttcatggtactgcagtctaagagggaatgaattcttctgtgaggttgatgatgattatatacaagatgacttcaacctctgtgggcttagcagtcaagttccatattatgattatgctcttgatctcattttagatatcgaatcttctcacggtaaatgttccctgtatttacgtatgcaaatgaaacaaatggtggatgtatttgagcaaaaaatgtttcctgtatttcttccttgatctgcttaatagttgaaactggtatcttgtattgatgatgtccaaacagaggtcaacttagactttttaaacaaaagtacatacaattcttagatatttgttcaactcttaagctagatattagatattgtggagtaccatgactaatttaaggtacctctcctagaaagaacacaaaacatagatgttcctttttttctcctcgaattgatctctgttatcaacttctatgattatgaacaaataaccagtgcaggtcaaaaggccttttcttttactgttagttattgtgcttttgtattctggatgaccgtctcttttgcaactctgcatatggctgcaccatcatgcgttacttgtcgtttgctccttgatagtacccatagtacatgcttagaaactttctgttctattacatggaaaattaattctcactattattaaaccttgtgattttgttttgttcttggtcacctgtttaggtgccctaatgttattaagagtgatgttgctaatagattgctttaggtttctgtggcagtaaatggtgtggtagtaattagcaagcatggagaggatatgtgtgttgttttgtctgctattttaaatgccataacccatcagtaatgtaacacagccttctttatggcatcataatgcagtagctccctttaatccatgttctcttttctactgttctcattctttttgctaatgtttcttgattgtgtcaatatgtaggtgacatgttcaccgaagaacaaaacgagctagtggagtcagctgcagagatgttatatgggctgattcatgcacgatacattttgaccagtaaaggattggctgcaatggtacctttctttggtatttatattgttgtacttccgatttatgataaattgacagttgttaatattttttgtcacagctggagaagtacaaaaactatgattttggaagatgcccacgagtttattgctgtggtcaaccctgtttaccagttggacaatcagatatacaccgatctagtactgtgaagatatactgccccaagtgtgaagacatctactatccacggtccaagtaccaaggcagtatcctaaccactctcttatcatactgtctatatgagcgttccttttttgtttttctctggaagaaaatagaattcctttggatttccagcattactatattctaatagttttgccctaattcgctgataggagtggttggcaaatgctttgacaagttttaacaggcagacatatacagttgttaggacgactaatatcaatactaaggacataaacaattcagtaatctttaacgcatggtcttttgctttcttagtgttctcagtgccaatatatattatcgcttattagatgaagtccacacactctcatctgtgttacattgatatcatagttacatagaactgccattttgttgttatattctgctgttttcttgaccatgttcagacatcgacggcgcatactttgggacaacattcccgcacctgtttctgatgacgtacgagcacctcaagcctcagaaaccctcgcagcgctacgttcctcgtgtatttggattcaagctccacaagccatgaggcggagactggagttttgcagggcttggagacaccctggtggactactgcaagagtggggggcatttgccagcgatggtctctatcatgccgccactgccacctccacaggcctgccgcatgcatgcaccttggcaggcaggcccactccacattcgaagtgtagctataaaaagacatcaatcgatcaatgttgtaacgtaattccaattgttctttaattagcgaatctgtgggatcccgtaattctaaagtagccgatgttgtttgtgccttgattaaaatggtgtgctgccccaggcattggtttattttatcttgtaagttgtaagcaaggttcatgcctgcaattggaaggcgagggatgacaggggcaggccggtattctggtccatattgatctggtattctgttgcttgctcggagtatccacacaattcatcatcatggtggatggaagtgatgttcagtgctcggtattctggtaattctagtagaattttattttagaattattgtaatggttttaggcgccttccatttttcaatcctcggccttttgaactgctaaaataagagtagaagtgttataatcattcatttatttactttgctgctggtcatgaaccgtggctgtaaaaagacttccaaattccaaaaaggccttgtttagttggggaaaaaaaattttggtttggttgtcacatcagatatacggacacacatttgaagtattaaacgtagtctaataacaaaacaaattactgtagaattcaggaaactacgagacgaatttattaagcctaattaatccgttgttagcaaatgtttagtgtagcaccatattatcaaatcatgacgcaattaggcttaaacgattcgtcttgcaatttacacgcaatctgtgtaattgtttttttctacatttaatattctatgtatgtgttcaaacactcgatgtgattgcgtgaaaatttttgttttggggactaaatagggcctagcgataagcgataagcgattctcccaagtcatccaggccaaattatttggtctcatacaacttttcttgattaataaaaataagttatttggtcttgtactgtactaccagatagactttgtaaggagagccagccagcaactttagactgtgacagggactcgaagacacagggagaatgggaggctagtggcatgaatggttgctttcagtctgagagtcaggtaagctcaagctggaggcagtaccagctggtcatagcacagtacaaaaagtaccctttttttgttttttttctcccatcagttcgaccaggcaagcatatactcctaccagggaaacctagcaaactactccctccgtcaaaaaaaaaaaatctaaaactgaatatttattttttgcgagacgatgtttgttttttcgggacagagaaagtactcccttcgccgtagaattcggtctgcgcgtatacttcctgacttgttaaacaatgtctttttttaaaagagaagttctacgaaaacgttaaaaaatgcttttaaaaattatattaatcatttttaagtttgaaatacttaatactcaattaattatgtgctaatggttcacatcgttttgtgtatcttctcaatcttctcctttccctcctctcaaacacttcctaaggatgtgtttagatccagggggtaaaaatttttgccgtgtcacatcggatatatggacacacatttgaactattaaacatagtctaataacaaaacaaattacaaatttcgcctgtaaactgcgagacaaatttattaagcttaatcaatccgtcattagcaaatatttattgtagcaccacattatcaaatcatagagcaattaggcttaataaatccatctcgcaatttacacgcaatctgtgtaattagttttttttgtctatatttaatacttcatgcatgtgtccaaacattcgatgtgacagggtgaaaaaacttgccaggggaactaaacaggccctaagattttttttgtctttccctattgtcccaaaataagttatttttgagcaaccattgtaccgaagtttgtgaaaataggggataaatgtattgggaatagatagagagcaataattgcattggggtttgataaaatgaggatattgtagtcttttttttatattggtatatgtgggatatgtgaaaaataaacttatttgagacataactactaccttcgtccaaaatatagtaatttttagctatatatctgaatatgctcttatccagataaagatatatagctagaaagttgttatatttggggagtagtacaattttcgaccaacagagacattggtgcattgcttggacccatataattaggatgagtcagagacattggtgcattgcttggacccatataattaggatgagtcacattgtttacgatcgatgggtagcagatagggatggaaggagaatcaagatctaacaagtcaatggggtaggagataggtatggaaggagaattgagatctaacagcttacagctagtgggagaggaatggagacaactccgctgttaagagacgagaactagcgacacatccctaatcttactaaaaacatgttaaaagtctacttacatgtgcataatattcgtatgcatgaagatttgaaccttggtgggtgaagtcatgcacccacgactctacccgccggtgcttccacttggtgggatagtttttgctattctaagatcctcaatacaatgtttttaaaaaaatcctgagtaccatgaactttagaaagcaaatccttcatatttgccttaaaaaatatgatcccttattcactgcctcagatttcaaggaaggagacattgaggtaaataattagataaaatttcaggatatttttccttaaaatttgtgccagtgaatagacaatatcccctacggtaatttgagactaatgaagaggagtaatttcctcttaccaaaactgaagctccaaagatgtgggagatgataatacatggaaaatatatcgaagtcacatgaggttctggaggtaggattgactttgcttaatcatgcttaactttaaaaagagctgtttgatgctctcatatcccaagatcaatttacaccttcacctctcgtgggcatgccaattagcatagacttaaccattgtttaggatgaatagaaaaatactacctctatttttataaagatgatgccattgactttcagtgtaacgtttaaccattcgttttatttcaaattctagtgtaaatatgaaaaaaaagttattttaaagttatgttaatgataaaagaagccacaaaaaaataaatgatacttatatagtttttagtaagaaaatggtcaaacgccatgccaaaagttaatggcgttatctattgaacaacagagttaatataaagctaaaactcgttgagtcaaagataatgtttaagaaaggaactcttagtattcacaaattcaacagagacagtttatattgccgcagctttgctatctgcaaatttcagatccagaaatatgtaactcaacagagcaatatgtgtttcgatcagagatctgtttgacttacgaaaaaagaaactattcctagcatttaagacgatggggagacgttgataatggataccaggttccagtttaagctgacatgtcagttcttcagcagttacttcggaaataacagaaaacaataaacatgcagttcaatagtgtcagtggcacaaaacagggcatcattcctccatagtccttaatatatgagttgaattgatctttggagattttaaggacaaaaatattcactaaagaagcattttacttggtgtcctaagaagactccaaccaatattgtaagccatggacagctatgatcagaccatgctttgccattcttaattctaattgtatacttttagatcaatctaatgagctgtaatgaaggacagctaagaaactttacattgatactaagtttcacatgttgttctgaaacgaactgcttgatatccatgtccgttgctctcacattagcataatgtacatcagaagtagaatcctaccagattttttttttttgtaattcttatcaaaataaattcatacttaagagagggagatcatggaaaacaacgattgctgaatatcatttaatcatgtatgaattatttcaactagttattttttcaagattattagtaagtactaacaaggagaaaaagacataatttgctagacatgattgattagttttggaaatagtatcatttacgacatcaaaatgtggagattattctagttccacaaactaataactagattgtagatgtaaaacatgccaaaccttcagttactaaatgaaataaactgcatgggccagatatgtaacaagaagcagtccatgtgatgtaataattttagtaactaaattggcagaaaacattatggaactactacatgcaacaggtttgcaagtcccagctcccaaaggtcaaccaaatttactgaaaatgaaagcatcacaagagaatgataggggttgaaatcatcagtggggtcaataagtcaagagggttggtgtaacttgtaaggctatgtatttagtgctctagattaggttagtgaaaatacaattctaagctactagagaagagacagagaagaccagtatttcttccagagcttaccatgaaatcacactccagtctctctccaagcttcagaaccagacatctctcctcttctgtgcaatgaggtcttctaactttagtggttgaattttggcagtctccatgccttcttcacaagattatatatacatcagtttcaccggtcaaagtaagcacagccttccttgattctcttttgtgcgactttgtgatgccttcttgcattatatacactacatattaaagtcacacattcttggagcagagctatgtacctaaatcattcttagaagtaactaaccttcttcaacccttactttgtaaccatggctttctctactactgaaatctctctatgtagctccattggacttctaggaaaggaggtggtctttacatcttgagcgtccagaactgagctatttgaacagccttcacttgtttgtttttcttctggtgaaatattggcatcacctttctttgacaaagttgaacattcatgaattcttcttaacttttttttttatcctctcattttcctgagatcctacttccagctcttcagttggtcttgcaagttcatatgttccactgctttcttgcaaagaatccttgccttgtttacatgcctaagtttgttgctagcatcattctgcctatactttgattttctcttgttttctcttccttcttgcaatcgtgacaagatttacaattgtaatgctccactctgttctgaaaaaactaccatacttatccaaatcattctagcacaatcacaatgggctgcttcttctactcaagagagaagaacaagaataagaacaagaagcaatcaaggtcatcccctacactaaccgtagacaaagatgacttcagagatgaaatgtccaagaaggccaacagatcatgcagcctggttgttgcttcatcaccacggagcatactggagctatacgaggagcgtgcgcatgagctccgtgattttcgccttgccgagctgagaagtgctaccggtaacttcagtagagagctcaagataggggaaggagggtttgggagtgtgtacaagggcttcctaaaaacttcttgcggtcatttggggctcaggaatgacagtggcaatgtggtggtggctgtcaagaagctcaatcctaatggaatgcaggtattgattgtcttcgatagaccttatgaatgttagatgctataatcatgtttctatgtacactgcaattgttaaatggagttgaagcataccttttattatgaaacaaagggatgcagggagcctgggatcaaattgcataagtaaatatactgattctgcacatattggttactttcgaatcgtgccgagtatattatttaatgtaggattccaggctgtgtaacaatttttatacaaatcgcatttagtactctaaaaagttgggcaggatggtttggtcaaaattattatcacttatggaatggaatgtgaatgttagcctcaggatgactgatgacaaggattttagcaaaattattctcaaatgtagactactggtaaaatacatttttagttcatattttgcatttcccatgcataatactcagcaaatatataactgtcaaattatagctgcatgttatagaaaattatgcctcacgaatttcttgtgtcttatatgcaaaaaaggaaaatgaaccccccatggcttgtaagttttaacatctagaatgcagtaattacaacattttgaggaatcatgcacttggagtagcaatctgaaaaaacaaattcttccattaaatttgtttaaatgttatttatacttctacaattcttccagtatgaccatcaattcaaaaagttgatttattcctcaattacatcactttcagggtcataagcagtggctggctgaagttcagttccttgctgttgtggatcacccaaatcttgtcaaactcattggctactgcgggactgacgacggcgaacaaggtcctcagagacttcttgtgtatgagtttatgcctaacaagaccctagaatatcacttgttcaataaagcatacccaacacttccatggaaaacaaggcttagcatagccttgggcgttgctaaggggctgcagtacttgcatgaagggttggaaattcaggtattggtctaacaacttcgataatcgatatattgagtattgtcagttacaagttcagagaacaatgtaaatagcagtgctctttttttcctcctcttttcttctgctttttctgctgttttctttaatccttactattagttgttattagaagcttagggctctagagctatgttacattagtaaacaaataatacagctgtttcccattaatgctatctcaaaacccaagtgctcagagttaagtgacaactcccagttgttccagttttgcaatgatagtctcatagggatatgtatcaggagctatgattcagaaggctttctgatctataattctatacttgttagcgcaaattaacagagttttccagtgtttatattctgaactattgatgcttgtgttcacatgttgtagagttgtagacttgtagttatgacactctttatgttacaggtcatatatcgcgacttaaaatcatcaaacgtgctgttagatgaggaattcagaccaaaactttcagattttggattagcaagggagggcccagtggatggacaaactcacgtgtccacagcggtaagtcatttgtcatcagtactagcaagatggttaccatttaccttaagaactacttgcattcaatctgcacaaaaaaaaaagtagaattacagtattttcttgaataatttcatggttggttcgaatcgggcatcaaaacggtctagaaagtttggtaggcggccaaaccatcgtttcaggcatttgtcctgacatataatctgttttcacctggagagatgtgttttcacaaaaagattcatgcagttcaacgaatgcgaaacttccaccctttcaacaaaaataagctaaccaatgcaacccctagaaatttaagatctgagagttggcggtccaatttagttcaaagttcaaactaatggctaaacttttgcaaaaaaaataaaataaaattcgatcggagactaatggctactccctccgtttcataatgtaagtcattctagcatttctcatattcatagtgatgttaatgaatctagacatatacatctatctagattcatcaacatcaatataaatgtgggaaatgctagaatgacttacattgtgaaacggaggaagtacaattttaacattgggtgttatggttatcaaaagattggtacattagaaatcaattttagtgcgaagtaggacaggaataataggattattatgtattaatctgagcaatgcaagcatgaacaatcaacaacaacgtgtgatgtgtatgaaacgggcataaaatcaaacaggtgatgggcacgtacgggtacgcggcgccggactacgtggagacgggccgcctcacggcgaggagcgacgtctggagcttcggcgtcgtgctgctcgagctcctcaccggccaccgcgccttcgaccggagccggccacgccccgaccagaagctcgtcgactgggcgcgccgccaccccgcgggcacccggtggttctcgaggctccccgacccgcgactcgcggggaggtactcgcaccgcgccgcgcaggacgtcgcggcgctcgcgtggaggtgcctcgccgaccgcgccggggagcgcccgtccatggcggaggcggcgcgggccctggagcgcgcggcgcggcacggcgagctggatggtccccccgagccgccggaggagggatcgcccccgcctcctcgctgccacgccggctccggttcctcctccccggaggcgaagaaggcagcgacggcgaagcggcggcgaatggcgcacctggccaagctggcggctggcgcgagcgcggcgccggcggcgcggaggctggtgcacatgaagatgacgaaggcagcagctacatgcaacgcaggcacgcagcatggtgagacttgagacctccctgtgttcaaagttcaaacgcactactattctatcatgtaatctactcctcctattctatattacttcctccgtttcacaatgtaaatcattctaacatttttcacattcatattgatgtgctagaatttctcacgttcatattgatgtgaaacggagggaggataagttatttgattttcttttgttaaatttctttaaatttgatcaatttataaaaaaaatatagtagtatttacaaaacaaacatattatcaaaatatattcaatattagatttaatgaaactaatttgatatattagataaaaaaatatttttataacttggtcaaactaaataaagtttaactagaaaaaaaatcaaacaatttataatacgaaatgaaatggaaagagtactaatttttgggataattacgacctgattttgtttcgatgacttgctctcgcctgttctactaccattgcaagcctgtgctgtgcatatcatttttttttcaaaaaataagtgttttggtttctcttaagtacggcattgggatattcttcatttgaaaaacagcagcaatttctgatttcttaacatcaccacatagtttgaacacaggatgtgtaccgtaccaaaagtggattttaatcttgacgactacactctccacataagagaattcatcagaagctagaaacagaacggcttttgtgttttgtcatttgatccaagcgtaaactcaggatggaaaactggaaccagaaaacttcgactttgtaggctcggagaaaaatattcactattacaaaaatccatgcaggagtcaagttaaaagaagaaacagggttctgtctttgagatggagtataatttatttaagatcattccctccatcccatcatccatgagtttgcaaacttcagctcacattctaaaaatgaagatgcaaaagagagagagggacagcaacttaaaaacgtattgatcaaccagccaaagcggcattgagcgcactgtgaacatccactccaatctgagcttcggccttctccagttcagttgaggccgatccaagcttggcgttgaattccgcgagaccctgctggaccgcggctgggtcgatctggtccagggggacagcctcaacagccacgatatcagcgatggagtttgcatggacaaatgcaaagccactgctcacaaagtacttggtgatatcgtttccctcgtgtaccgagagaacaccaggcttgagctctgcgattgtggaaacgtggcctggcaaaacacccatctgaccagttgttgctggtacaattaccatgtcaacctgagtatagacaagcaaagacataagcaagggaaagaagcaacagaagacaatattgatgatgggggaagaattaattggtacattaacagtagtattgttgaatcaagcattgacatacaaaatctatgtgaatcaactgatagataatttgcctatcatctgttgaaatgcaacaacacaaacatagacaaccttcgaacaccatcaaccaattatatttcatacacaatagcaacaaaagaacatgacgctcagcaacatacttaaggaaaaattgatgatctgaaacttcttaatagtgccattaaccattaagtaaacagtaccaaaccatcaaggccaacaagcaagctaaaggaaacaacatgaaacaaagaaaatcaccacaaaactaaacaagtagtattagacttggttatcacagggcaaataacatatatcaaggacaaaagctataattggcgcacagtcaaaaaagaagctgcctatgcagcatagtaaaatataagtgaatagtaggctatattaatatgcagttttatttatagaacttcagaaggaaagattttctcaaccaaagaaatttacatcaggaacattgacagtgaatgttcagacacaaactctagttaatgtaaacaagagaaactgcaactataccgataaatccagacaatgcataaagccgcatagcactacaaacactagagataaacaggtctgaatacactgttgtagtcagaattaaaacttggcctggcacacagcaatcctagcaagagaaacttgaaatctataaataagaaacacccaaggagcgacctggaatcctcaatctgattaacaaaatgtaacggggtttccaaaagatacttcactagactactactacctctgtccccaaggagcggaccgtgtttattgaagattttgtttggttggttgtatgaatcacgaatttagccaggttcatagctaactaaaaacacagtcttttaaggcgaggaaatatcaatttatgaattctctatgctccttgcaattaaggcacacaagcaccccaaacaagaaaaaagaaatgcaatttgctaccaacactcaacagcaatcaaatgttgagcagaaattctatagtcatatgacatctagccacctggagaatcacgctacgttatgtttgtcccatgaaagaacatctccaactcatagcaacaaaacaaggaaatacctggtatgattcaacagccatgtacaaccgtaaaccgccacacattcgtgttaataggattgcaaatacgcacgcccaacaaatggccacatcacaaacattctgggcaaacgataaacggaggatagaagcattgaccatgatatattcctacggatgaagagtctggatgcgagacctctaccacaccagctcgacgaatcggatcgcgctgccttgacccacccaacccctatccctaatcgcacgacgcaaaccccagatcgcgcacatacccgaaaccctagcgacgccacacgcacagatctggggaccgaggaggacagaggagagggggaggggggggggggcaaacacggtccgcgcgtacctccttgttggcgatctcggacttgtaggggaggacgaagttgacggtgagcttggaggggatggccgccggcgtgggggggcggggctgcatgagcgacatgggcgtggcgggggcctcgatgttgggggccaccttcttccacgcctccgcgaaggcggagtcggtggccgcctcggccggcacctccgccgtcgagagcgccctgctgctgcggccggcggcggcggcggcgcgggtggtggccaggcggcgggcggcgtggcgcagcatttttctctttcttctttttctctctctcgtttctcctctcgtcgctgcggctgcgcgtgggtgggtggaatggggttccaggggtgtgggcgatttggagggcgaggtgaggtgaggagtgtgggtcagtgggagtggaggcgagtttgggctgggccgtttctatatttaggctaggtcgcctgccttcttttcatatcatttaggaataagttcacttgaggtcccttaactgatcaacgaatccgattttggtccttcaaccaaaaaaatagatataacggatcccacaactgtcaaaaccggcgcaatataggtcccatggcggtttggacggtggttttcgctgccatgtcgcttacatggctagtttgactcggtctttattctacgtggcattgccatgacaatttgatctgggaaataataaaaaccgtggacccatatgtcagctataataaaaataataattaaaaatggtgaggcccacgtgtcattctcactccctcctcttctctctcccggtcgttcttcttcctcctctgtcatctcttcatcatgtggaaagagagagagaaaggagcgaatgagaacacatttccatatcaaattgccactttaaacgtcacgtggatgctatatgggataaagatcaagtcaaactagccatgccagctaaaaccaccgttcaaaccattatgggacctatgttgcaccgggtatatggtttccggttgaaaggtgaaaatcagattcgttaacaagttaagggtctcaagtgaacttattcatattgtttattggattttttaaaatggattatttactccgcgtttctaagaatatgctttctaaaaaaagaatttttattggattgcttagaacaccttgttaaagttatttattaaaatgtttaatttatccatataatcaagtagataatccacagcacacatagttcttatatgttaaatggctactttttttcatgcttaatggacgaagcgttttgacaattattagaggatacaaacaaatgaattatctattatcaactcgaaaaatggatttaaaatggtattctaggaagttcatatataaaaatattttacaaaaattacatcggaaaacatgccaccgttccattcttctcctcttctaaattaaaaaaaaaaactcatttcttccttaaacattttctcattttttccggtaaagaaatatatttttttaatttatttatgggttataatacaaagcagaggtttgcaatgaggatgatcgcattctttctgaaccagactacacaaatagccacgttttggatgggaacaatcacaagttcatggcaaaatgatagtgcacccagaaagcatagacacatcataattgattatatttagcataagagcaaccaagctaggtatttcggaaagacacgatctacagaatgcacctgcttacatcaacctggtactagataaatactgtgacatagccatagtcctgcatttaactaaaattacaaagaaccaactgatcaatccaactatcctttgggttttataaacacagcacctgcagaaatccccaacaatgatgtcagccctaaagttaagaaagaagccaaaccaattacccgtgcttccaaagaggcaccgaatcaaataatgaacacaccaacagtaaagaaattgatatgtggaaacttagcatcagtttttaacgtgcaaagtcaaatgcaatatatgcttaaagcctaaaaactattagaagtaaaatatttcttgtaattgagcagctgatggacagctatgctcaactaaaaggaaaaacttcctaaaattagtattcatagcaatatggcatccttcaacatgtgagcgtttttaggtaaaagttggaatcattaagcacgaacatcaactgtgttattgaaacatttttcctgtttttgctctattatctgcacatatttaggaaatagagagtttccaggacttatgtcatatgactatattaaaaagaatatcacaattagaatatctgcctcaacttcataactgtgtcctctagaaccacagcaactagttaagcatgccaagttactgttcaagttcctctaaaaaaagttactgttcaagttgtgtaccccacatggtagtactggacaattctggtattagtgatggcaaaccttagtagccagtaaggtctggactgcaagtgctctatcaaactcccatcaggcctacaagttcatcagtttcattaaaaacttgaaatcggtaataaatgattgtcagagatgtcaaagtgtacaactgtttcaaaataataaataccatttgtggtctatgcaattgatcttgcttgtgacgtaaggtcaaggagtcggtttcccacaaaaataattacttgacaacttgaagcaacagcatgatcttctgtatcagcatagcctctttgtagaatatcacaagaaagaaacattactgttggtaagacagtagtctaagattgccacaaggccagtactacaataagattatcaataagattatcaatggtcaacatatttaaatgtaagaattagcaaccacctggaacctgaagaggaaatatgtgctgctatgagattcatgatccatgccaaaacagatgaaagaaaagacgggcaatttatataaaaaaaaaatcgatagttgaagccttgaaagttgatttagaagccttgaaagtggatttagaggtcaaagaagagaaaatccatgcatgtaagatgttacagtgagtactaaggaattggaactaaccatcaagaataaatggaaagacttgaaaggacaatacagaattatacaacagatgcggatgatgttacatcggaagaattctgtacagatgtgcatgcacaagaagagtgttctctaaatgcaaaaggattacagtgctgcagtcattttacctatttgacgcctgcccaggatctgaaagctctgacatcttctattcttttactctgttgttctgttttttcatgcagcaaattcaaatttctatacagattcttgtgtagctttagaaaaacttgcttgtatttccacttgtcacagtacattttacggtttgccatgtaacttaaaacctccatgactcttgcaaaatagccagcgtttaggaaattcaaaatcaagcagtcaagcaagtctctatccacagttagctctccatattcgagtctgcgctttatttctccccacagcatggcaatctccctatgcatgcctagtgaagaatatccacacagtatgtggcaaaaggtatgcagactgggtcttacattctgctctctcatccgcttatatgtgctcaaagcatcgtccatcatatttgccttgcagaagaaaagaattgaattattgaactcaaaagttaagtgctctcgagagctataatgttctatttcttgaaccaaactggaaagcaaagacgaatttctgaggggcatctcatccttgactattttggcaacatcctttatggtaaaggatggattggtatgaaaatcagccattgtatatgctttcttttgtatctgttggagaaacctattaacttcttccggtttattctccttctcatatgctctcaaaagagacatgtaagtacagattagaacaggaatctcagctgactctaaatcatccaggatatcatgagcagcatgcaaccatcccatcagaatgcatgcactaattacatctgaatgagatggcccctttagatcttccttgtgtaatgtaataagaaagctagacaatgcacgcactttacttgctttcaaacagccaacaatgaatttagcaagagccttctcactaggacgaatatttccatcaataacagcaagaaggccaaattgactttctgtatctaaaacgaaacctttgtccacttttatggggtcaaacattattctgaatccagttttcaggttgccagagcctatctgtattacaccttgtttatggacactatcaccaacaaaagcacgaggcttttgttgtcgatacagatcaaccaaaagctgagcagcggcatccatgtcattatatttgaaatgcaggttcagcagacttccataaaaatatagatagtgctgaatgaacggcaaagatgcaaaagaatcgatacttcttttcatgttcaccaattcaacttgctgcccaaccatctcaaagacaaggctagcgatagccactgtatttacatcggccacaaccccaaccagcgacataagctccattattctttgggccttgatcatgcatttgaaatcgacacatgacttcaaaaccatattaaacaaggtaacattactctttattggatccagttttttcagctgccttctatctccaatctgctccaagaaacactcgcaggtctcacacaaaacatcagcagcaagataggatcctacttgtgacttcaccatatgcaagtacaccatggtcagcatatcaacatcaggaagcttgccgctctccaatatgatcctcaccactgtggaggctggaatcggcatctgatctctggcaagcgccagagctagcttcatcagcgagccacaattaagaaggttgccattgcattggtaaactgacaagaccatgtcgaatgccctctgaagccatctcctgctagacgcataggacagcgacacgatcatcctgtccaacacccgcggctcaggaaggccatgcagggtcttgtaattggcaaatgcttgcagcacgtcgtcgacattgccgtcatcgagagcagcattgattgtcctcagtagggtctcacgagatggcgcttcccacggcagaatcttggctgcaatcgtgcccatgggaaggtgatgtatggccagagcggattgcctcctccatgacccgtagcaatcagcctaataacaagaaactatatgaactaaaggagaactattttcatttttttttacagattttagtaaaggaaaatatatccatttatcttatactccctctgtttcatattataagttgatttgtttttttcttagtcaaacttctataggtttgactaagtttataaaaaaattagcaacatctacaaaaccaaattagtttcattaaatataacacggaatatatttttataatatatttgttttatattggaaatgttgttatatttttctacaaacttgatcaaacttaaaaggaaaagttgaactaaaagaaacggagagagtagattttaggaaagcagcaagaaggctgcgccatacctgcttggagttggaggggaggatgaagaagtcaacggtgagcttggaatcggaggtggtggtggccggcgtgggcgagatggccattgtcgcaggggcttatgcccatcttcgaccccccccc

SEQ ID NO: 6936 - DNA, 14383 bp, Oryza sativa
cgcggtacggtacggtatatatgccctttgctagggtttcgtggagacttgattctcttgtaagccgccataggcgtgtaacccaaaactcttgagatagtgagattgttgctggctggtgcccgtggttttttcccctttcgcattaaaggggttttccacgttaaatcgtgtgtctccgctgtgattgtttttcgtttactttgtatttctatacgtcgttcataacaggctagcacaccacccgtgttgctagccactagaccccaagagtctcctcaatgtgctagttctgaataatgaattagagtttttttacggtcctttgttcctcctggtacgtacctagtatctcgtatgtccattaagctggatgcaaagacccaggtacttgccggtacagcttctaacaggaagtcacaggtggagggtataaccacacaaaggctaaaaaggtaacttcatgtaaagaatagatcaaggatttgactacatggaaagagattgcggcgttgatagacaagcgtgctgttcatcgtaagccctctccagtctccagtattgtttcacatcttttccaacagtgcccttgttgattgaacggttggatctcatttcatacttggtggtaccagtatggcagtagctagaggtaccaccttctggagcataacaaacctcaatgaattaagatactagtctgttggtagtaacaagtttggagaagatgtagtcttcgaatagcatcagttctctttcaagtttcaacaacctgttcaacttcaagattaagcgtgtcctaaagctacagccgcacacacattggacattgtacatttgtactctgtcgtgtttttgcaaaacaaatggtggggaaattgaactgaaatcgaaccctcgcaacctggagtgactgtgtgaatttccatgcgcatgtgctacatcttaaatccttgtaatgcgccattccattatgtaagaagaagaagcatatgatctagttcctaaagaaattaacatgatctcgctcttctgtcatgcaaaatgtgcaaataaatcaaaaatcaagctgcaacaagaaggtagaagagagtgaaatagcctgtgcacctgtagctgtagcttagtacttcacggacagtcggttcgccaggattgaagaaaccgtgttcttgaagaagagaaccaggcagatctgatgacgggagaaagagtgggcggacaaagaagtagggcgcacgtggtggttggggggagccgactagtcaaccatcaggtcaacccaaagcatttccctttctaaaaaaatatattgaaaaatcaacatctgcagctttctgagggctgaggcttggccgtacatttttttttccaggaagccgcaatcggcggcgggagggagcagggccgctccggccgccggcggccgctcggggccgtcgcgctggtgcgaccttcctgcctggcttgtcgatgcgccctcgaacggcacgtgtcccgggggcaagcaatctccgacgcgcggggacgagggagagaaaatgggcatttagccacttttaaaacacggttttgctataatactattctgaaaatgcgtttcgctaaaatgccaatatgaaatacgcactcaccaccactttgtcattttggccattttgtgcattttcgaaatcattttctctcctccaccggatgatgagatgaaattgcccttcctcgtgagcgcggcgagcaggggacaaaacaccatggcctcgccggcgtattgagtggcggcagtggcggcagctatggtcttctcccaactccgtcgccccatctcactctccaccctactgctgaccacatcgagagaacaagcatgggctgcctctttggtctcaatcccatcgccggacgagatgaagacgatgatcatattcaccaccaagccacggtcgtccttgtcccttttgcgttccatacttaactcatcttgccgaacaaactttcttttgacgccatcgcgtttgatccattgtagcaacgggaacaccgccgtgccatcgtcatgctggagcacgctctgaagtgccgccgcttcggcagcgtcgatgtccggttcctcatccatcctggagcaagccaccgcgccatcagctcctccttgaggtcctctttaaaacccctcaagaaccgagaagattggagcatcaaggagggagatcgacattgtcttctccaactttggctgccggcgtcaatcttcgattccctccgctccggtgaccccctcgttgattctttgcgcatgcaccatccctgggacctaaccaacctcatggatgcacatgcatggcttcacatcgaatggaatgagttgacgtcgtctcgccgaagctcggagccgccactgagacgttttcttgatcgctgccatcaaccaagccccatggcctttgctcggcctcgccctgtccaacaccgtcgtcgccaacttgttccaccgcatccccgacaggtcgacgcccttgtcagcaacgacgatgaccacctcgctgcgctcgaccatctccaccggcggcacaaaacgaagaaggagagaaagaaagagaagagatggaccttccattggccccaagggcatttatgtctaatcaccataaagaagaggcaaaatgattttggaattaagagaaaatgagaaaatggcaatccggcgagttgtgtggccttgatattggcattttatcggatcacgttttaaagatggcattctagcgaaaccgtgttttgaagatggctaaatgtccattttctcgatgagggatccctcgcccacttcggtaatgatgggcaacagaccgcctgatccgatccccggccggccgccggcggctgcttcagagagatcccccgaggcatgcgcgtgctggcaggatcacagccgcaactggcgctcgcccgcgccgcagccacaatcacccgacgaccgccattgctgcctttgaggtaaaggcaaaaccttgtttaccctcgccgctctcctctcccaatttcggtttttgcgcagatgaaagctttatgcacagtatagtgtcaaacttaaaattttgactaaacgacttatcatactctttttatattagaagaagacaaggatggtagcagtgaatctgtcaccactcaccaagtatagttgttttttttatttaccacctactttatcatattttctaccaactatccatgtactttaatgttataaaataattcctctaaatatatgattctatcatatttcacctgtacaatatagcacacatgggtacaaaattatcccaaaaatatcactattaatttgttttaatctattgcaaagcaggagtatttggctagtaatatgaaatagagggagtaacttactccgttgcattgtaggttctttttatcatcacttcatttagttcgactccgttgttgtatgttttttatgaacggcgtatatgtcatgctcacctagttaaatgtcatggagtgcttgctacatgtaactcaacatgcctgtaattttatatggcagcacaaagcaaataagattgagagagtgcattttagttagtcttaggaatataatggttaattttactgttatagcttatttagtgctactgtcgatcatttctacaagggtttatgttgagtgtacaaggcttatttggttccaccttttgagccttagactgatcgaactgttaaaacgggaagttaccacgtcaacgagatggctctcagtgttcgttgaggtgtagttacacaatttatcatgtttccctacctttcgaacttacattaatttttagtttatccaaattatttttttcctcgagtatcataaatcgacaatcatacatgagagtattcaataattattggtggactaaatttgttttttgatgtcatggtcggcatcacgtatgagcgcagacagcgtgcggcgaagaaggactagcagcgtgtcggatcagaaacagtaccgcgcgaattgctagagattggtttaagttgttttgctgttttgttatccctttgttttagcaagattagttcaatgtaaggctatttagagccacaaatttatggttaatctaagcaagattcaatcacacttctcatcccattttctctgctcccttcctctgttcttcccacttgccgtcacgggcagggtaaagtggttgccgaagcctcgccctccagtgacccattcatatccaatccgttcccttgccggtgctcgtaacaacttggtatcagagaccatggcaccagatcaatcctcctcctccacgcagccatcaccagatcaatcctcctccacgcagccatccactgatgccgacgcactggcaaagcttcaggaatccatggcgacggtgttgagcggcatttcgcttttggcctccaaaagtgacctcgccgatctcagtcgttctgtcgctgtcgcgacctcccgcatcaccgccttggagtagtcctcctccacttcctctggtccacgtctgaccggcggtggcctccttaaatcaccaccaccaccacccccccaccacctcccccaccacccccaccaccacctccgccgccacatgctagacacggcgcacagcacgacgccaactccggcaacgcagttcctcgcttttacaagctcgaatttccaaagttcgatggctctgacgatcatctcaattggcttaatcactgtgaacagttctttcatgcacagcgttcgccggatggggatcgcgtttggttggccacataccatctcactggtgccgctcaggagtggtatttccactacgagcaacacaaagggccgcctgattgggacacgttcaaggagctatgctacacccaatatggtccaccaatccgcaacaacccgctgggtgaactcaagcgcctctcacagtcgaccacggtggccacctaccagcagcgcttcctcgccttgtccagccgtgtgacggatctcctcaccgaacggcagcaagtccaactgttcacggcgggcctccgtgatgacatctgcatcgacgtggagctccatcagcctgaagatcttcgggaagccatggggttggcacgtgcatatgaacacaaagccaacttcagcccatcgcgcactatcagcaagcagttcgcgcgcacggctgcgtcatctccggccgctagcgcctccccggctccgacggcagtggccgccgtgcccgatgtgaactctcgccagtttcgtcatctgacaccggcggaactcgcagagcaccgcaaacaagggctctgttacaactgtgacaagaaatttgtccgcggccaccggtgcgcacggctctcctacatcgagtacgacgacacggcggatgatcccgatgacgactcggccgacaaagatgaggacaccgagccacacatatcgctgaacgcgatctcgggtgttgatggcgccaacacaatgcgcttggcaacctacctcgcggatgaagaggtggtggccctcgtcgactccggctccacccacaacttcatccacgctgaccttgcgttccacctcggcattccgctgtcgccggtccgcgatggtgtccgtgtggtggtggcaaacggagatcgcctcaccagccccggcattgcgcatggcctgcacctgcgtgttgccgacgaggtattcgacgtcgactgctacgcgctccaccttggatgcgtcgacatcatcctgggcacacagtggctacgcactctcagaccgatactgtgggacttcgtcaacatgcggatggcaatttgtcgcggctgccgggaggtcacgctatacggcgtcctcgacgaacgccccgcgtccacatgcgctgcgatccacactgacgatctccttccgtccctattggcggaattcgacgacctcttcgcgcttccaaccggtttgccgccggcccggaccgtcgaccaccgcattcacctcaagactggtgtgtcccctgtcgcggttcggccgtaccgctatccccagctacagaaggacgagctggagaagcaatgtgctgagatgctggcccagggcatcatccgtcccagcacatccccgttctcgtcgcagtcctactcgtccgcaagcacgacggttcttggcgcttctgcgtggactactgcgcgctcaacacggtcaccgccaaggacaaatttcccattccagtcgtcgacgagttacttgacgagctccacggcgcgcccttcttctccaagttggaccttcgttcggggtaccatcaagtcctcatgcacgccgatgatgtccacaagacggtgttccgcactcaccagggccacttcaagttcttggtcatgccattcggcctgacgaacgaacctgcgacgttccaggccctgatgaacactgtcctcacgccgttcttacgaaggttcgtccttgtgtttttcgacgacattctaatttacagcaggacatgggccgaacaccttcagcacatccggacagtgctcaccgtcgtctgcgccaacaaccttgtcctcaagtgctcgaagtgccacttcggtgaacaccagatcagctacttgggtcacgtcgtctctaccgacggagtggccatggatgcgcagaaggtttgcgcggtggccgactggccgcatccgcgttcgcgccgtacgcgggtttctcggcctcgtcgggtactaccgcaagttcatccgtaactacggcacgatcgcggctcttctgacggccctcctcaagcgcgacgcattccagtggacgccggatgcagcccgcgccttcaccgagctcaagcaggccctatcgacgcgcccgtactgcaactgccggacttcgccctgtcgttcgtcatcaaatgcgacgcgtcggggtccggcatcggcgccgttctgcaccagggggcgggtccgctcgctttcttcagccgggcactcgcgccacgccacgccggactcgccgcctacgagcgggaactgatcggcctcgtccaagcgatccgccattggtgcgcgtacctgtgggggagggcgttcctcgtccgcaccgaccactacagcttgaaatttctcctggatcagcgcctctcgacaattccacaacatcgatgggtaagcaagttgattggctttgatttcactgtggaatatcgcccagggcgcacgaacgttgtggccgacgccctgtcgcgtcgcatagaagacgccgaactcgccgccctggcgctctccggcccaacattctcgacattcgacgaccttcggaatgaggtggctaccgacggcgacctcatcaagatcaccgctgacatcaccagcggcaagctgagcgcgccttgggcactccgcgatggcctcatcctccgggatgaccgtgtctacatctcggcatcttccccgacaccgccggcattgctcgctcatgcccacaccgaccacgaaggagtcgaatgcacactccaccgattccgggcggacttcttcacgccccacgccaagcaagctgtccaggagttcgtacgcacgtgcgccacttgccagcggaacaagaccaaacacctgcacccggcgggcctactccagtcgcttccggtgccgacgcaggtctgggaagacatcgccatggattttatcgaaggtcttcctcgcgtgcacggcaagactgtgatcttcaccgtcgtcgaccgcctctccaagtacgcccatttcattccgctcgggcacccctacacagcgacgactgtggtgcgtgccttcttcgatgaggtggtccgcctccacggcatcccaagctcaatcgtcagcgatcgcgaccaggtcttcaccagctcattctggatggagctcttccgcctagcgaatgtcaagctcaacttgagctcagccttccaccccagagcgacggccagtcggaggcggccaaccgcgtcatcggcatgtatctacggtgcttgaccggtgatcgtccccggcattggctacgttggctgccctgggcggaatattgcttcaacatagcattccagagttccctgcattcgacgctgttccaggttgtctatggcaggccgcctctagcgctgcgggaatataatcgaggcttggcacgcgtccgcatagtcgaccaagccctcatcgagcgtgatgaatttttgggggaaatcagggagcgtctactccaagcacaagactactccaagctgtactacgacgacaagcatcgggacctcgcgttccaggttggcgactgggcgtgcgtgcgccttcttcaccgtcaggctgcgtccctgcccgggttccgtcgtggcaagctggcgccaaaatattacgggccgtactaggtcagcgaccgcataggtgatgtggcttatcgtctcaagctaccggccggcgcacggatccacgacgtcttccacattggcctgctcaaggaattcaaggctacaccgccggaccaaccgcctgctctgcctgcattgtccaatggcggtgttttgccaatgctggcgaaagctgttcgtgctcatttggcacgcggtgtgcgtcaggttctcatccagtgggaaggcaagccggctgcagacgcgacatgggaagacgaggcagaattcaggcacatgtatcctgcgttctagcttgaggacgagctgtttgcgaaggaggggagagatgtcatggtcggcatcacgtatgagcgcagacgtcgcgcggcgaagaaggacgagcagcgtgtcggatgagaaacagtaccgcgcgaattgctagcgattggtttcagtttgttttgctattttgttatccctttgttttagcaagattagttcaatgtaaggctatttagagccacgaatttatggttaatctaagcaagattcaatctacacttctcatcccattttctctgctcccttcctctgttcttcccactcgccgtcacgggcagggtaaagaggctgccgaagcctcgccctccagtgacccattcatatccaatccgttcccttgccagtgctcgtaacatttcatgtttgtgttcttggcagttcatgactttcaccaatttaattcatatatagtaccagttggttatttaacttgctttcgttgtattacgcaaccttttttcaactggtgaataagaccgcgaatcatagtaaagtgtttagcaagctagttagcgtgtggattggatgtgtcatgcgtgcatctaaatttacttaacacgagcgtgagattgaaaatcatgcaaataaaaccatttgcaattgcacatctacatctcggttgaaactacaaataatagatcggagggatcaattaaataaatagccaggaagagtatgccatagattctgaagtacaacttgcagtattattgcgcagaatctcaactagaatttgttactgcgcatgcagtacaaatttggtgttagattaatgggctaggcccaattaaatcttaataaattccaatggcccacatttaatgcaataggtaataataccaccttgaaaatctgaagtagtagagaggctctgttgaccggttgagatggagctagtagagagtctctgttcaccagttgagatggtgggcggacagccacacgcatgcgcgcgcgctccgagccggctaggccgaggtaggctgcttctctctctcataaattttgcaatggaggagaattgaatccaaggcaattgatacgatatcaatatgggcgcgattactcctgtaactcgtaaattctgcaacggatgagaattgagtccatcgcaattgatactatttcaatcaattgatacgatttcaatacatgtgtgattactcctataactcgtaaattttgcaatggactctcgtaaattttgcaacggacgagaattgaatccagcgcaattgatacgatttcaatacgggtgtgattactcctgtaactcgtaaattttgcaatggacgagaattgaatccagcacaattgatatgatttcaatacgggcgtgattactcctataacaaacaaatcaatctcgacttaaatcggattgattccgttgttactgcagtaacgattctccctcccgtacgctataaaaggcgaccaccaaggcagacagaagacacagcttgctggcctctgctctcctcctctcgcactcagatcttcctcagatcttccttggaaactccttgtgcctctattcctgtgctagctattgattccccggttctgtccacctgcgtgcacaagtgacaggatgagcgggcctccggaactccgtccgcttgtgtacctgcacgggtaggcggactatcaagtttttggggagcgtgcctgctctgcttctattcttctgcatcgcgatggcttccattggcaatggcgcaccaggagctggagcctggagggaacaatgccactcctggaggagggaacggcgggcgctgcaggagacaacaacaatgaaggcaatacaaatgccttaatctccactgcaccgttttttgggtatatggttctatctctaattgatgttcttcttgttatttacatattgatcatgctatccttaggattacaatcctatgtgaatgttgatgatgcttatgttataaaaagcatgcccatatttctgttaagcaccaccactagatcacttactatttgtgaatgtcatgtttattatcttcttattttggattaaaatatgcctaattatgaccaaataaccaacaattggttggaacttgttgtaaatttaaatcgtttttctaaaagatgctgcaagatctggcattctaactagatctcagcatctcggaggttcctggaatttatgcggatggagagcctggacaaaagcagcatggcttaatcgtatacacagtagacagccaaagaacattccatccaaaagatttacattgcaatgttcatcggtaactagcatttctgtaatcgagacacacttggtgatgcgtggatttgttgttggctacaaaaattggtcacaccattgagagatcccaagctgccacacgagttcccaaccaagagacacacgatgaagtgttcaagggtaggaatttcatggtagtagaagaatccgttgataatgagttggatgatgatgttggggtgacgatggtcatcacacaattgatgatgtcgatgatggtcatgtcacggtagatgatgccgatggaagagatattgcgtcatgctgaacctgaagttgtggctgggtctgctcgtggtttggataatttcaatgtattacaaaaggcagcaaagaaacttttgcatgatgaggcaaagggttgtggcaatgatttcacattattgcatacaatgcttgaacctaagattgaaagccagaaacggttggtccgacaatagttttaacaatttattggtcctgttgaaagaattgtttccggagcccaactccctgccaaccaacacctatgaagcgaagaggctgcatctttattggcctttaatctctggcgggcccttggaccaccagtgaaaacctgttttggccgccataaaaaaacctttttttagtagtgatacaatccttagctattgtccaacagagcatattagtgaaaccgataagcataatataacgcccaggacccaaaaaggtactggttcagcttatccagttaaaccacacctacactattaactctctcacgttttcatcctcgcttcacaaaaaggttcgaaccggagttaatagtcctcaggctcccatatttataagctagtgctgctctagctgaactagcgaggtgggtctaaattttctacagtaccgcgatgttacagtgcagcacagtactgggctgctgctttgctatttttctttttcctctaattatttgcggggcttcacacataacataataaattctcacaaaagcgatatgaggcttggttttgcggcggaaaactctatacgtacgaacaaatttgttatgaaataggtacgaagagcgaccatgggctgcttccttagcctgtatgttgtaatcttctcattagtatttaagcccataactaataaaggccacaacttcaggttcagcatgatgcaatatctctttcatcatgacgcaatatctcttcaggttcagcatgcctcattcttcatatcctcctcctcctgatcctcctgcacaattttcgcctaggagcaaacatgtatgttagagacacgcacaacaacactaaacaagatggaaagtagaatgaactcgatgtggattgggctccggagcacccattacggagacacggactcaccgggagactcatcccagctgactgttgcgcccgaagcatagtacctgatcaccttgccctcatgctccagcacaaagccgccatttccaacggggcacacatgctggaagaacacacggtagtcttctttgatgttggggccgtgacagtgcaatgcaggctccctagacgagctctccaccttcatccggcagcacttgcgcatccagccccgccatgggaggagatggaggcgctgtcgtttgtcgggggcttctcatactgtaggttgtaggaagggttggcgctgtcggcagggatgcggacactgtaggaatggccttcctcgcggacgttgggcagccggcagctgcggcggtggctggtagagcaggcacaacggattgacatttggcatcactaagggcatgagcaatgtatatggcccaagttgtccttaaggtgggccctgttgatgcgaaaaacacacactggtctaggagatctgcttagcttcagtgcaggtccaaatcttgatgagatacgggcgtgccagtcagtttgaccctgcaactgacaagatatacaaattgaagatcaatgagccgatcggctgacaagctgatggagtaattttagccgatgtcgataccagccgatgtcgatagggttttgatcagtcagctatatgtccaatacagataatgatataaaggcgatcggctgatgataatcaatataacaataatataatccagtataaaccaattggctagcaatataatataataaaagaaatactaatccgaaggttaaagcatacatcggctggaggtccgatgtcataaaatccacaagattagattaaacagtaaaacctttgttgccatcggctaaatccaatatgtatgcaatcccactacatgtttcatagcatacccgaaaactacttttataactacccaattacggagtagcgtttagcagtccctaagtaagctactacacatgttgggaaccatgataatatcaggtctaaggattcaacaccaatactaaatgagatcactgatgacacaacacatatggctcttacaatgtctcatgttgggtctatccaacaacatgttcaccaacatgtgtccacattattaatttggtatctctataccatgatccatgagacatgatcattaattaatacatgtgctgatcatataaacatatttgttccacatatgatatttgatcagggatcctttagaaatagtaacaaacaacataaagagtctcatgaaagaatcacatattcattaaccaataatgagttatctatttcaaggaacaatgtcggataaatatgtaaacatagtatgtgatacaatcatctctatgatttggcatatcactaacactgacatcatcagagaagtacaatcttgaagcaatccctggactctaagagtctaacggtcgctgccatggcggtttgaactttctttgcttgtacacttggaaaaccaacagatcctaaccgtaaagcatccaatatgtcaagatctagcacccttttgcacggctgttgcggtgttaatgtctatacatgaggagtatatagtgttccattgtgtcccttgcagaagaaaaggttaaatagcgcgcaccagtttattgcgtgcagattagaatttcttgaattgctcctatctcggcatttttttgtgcaattcgagtgtaagatactcacaataaaggagctaccgtaatagccacatgcgttaagtatagaccaatatgccttttgaatgtcagttttaaaatcataacaaaagtgatgatgaataggatcaatgacattatggcttacatcatctccaaatatcaaactgccttcttgaagagtcgtttcatcatgaagggtgttgttattttacatgagattcttaactcagtgcatcaaaacaaacaaattggattttattcaaagtagactttgaaaagcatatgacaaggtgaattggaccttcatttat

SEQ ID NO: 6937 - DNA, 19964 bp, Oryza sativa
cgcacccccccgtgtgtgcatggggcgcggccggatgggccgggcttcagactccgctacgctccggcccaagcctccggcttgggcctccgctccgcttcgtcagaagcccggccaatatcttgaagtgaatttggaacaactccaacactagcccgcccacattcgaatcctcccttgtacaaaaatattttggggctatcttctcctcaactctctctctttctttagaattagcacatcaaaactaaaggaaggatagaaaaaatctgagatccaccggttccacctcatgagtcaacttttctttttagaaagaatccaattgcttttttctgtaagtagctaagactaatataggttgatcttgttcattaattgaaagatttttttgggggagggggcacatgaagctacgctaaatggatggccttatataaagtggtggacccaataattttgactattagatgaaaacaaaatcccctgtcacccttcatcctggacccacatcatttcttttccttcatcttgatgtccagtgctgtttcggaaccattctcacatattttcaaaagcaataaaatttggtttaagagaacgtgaaaaatatttgccatgcatatacgtataatgattaggagaagaatgaaaaaaaggtactatgatcttaaaacagaggccaactgtgagaggaatgtttatgcatacaaggccatcattctttcatatatataaggatttttttagatctgtactgccataaataatttctaacatatagtatatttttgagacaacatgctaagattagctgtcttgacacatttgtatcttcaaaatagcattgaattgttgttgctccagtagggctttcaactactattttcgataaaattcagagtaaactggaaatcgtacacatgatctcctcggaaaagtattccatgcgttttattggctctccacactataaattacagaaaaacaatgaatatgttgctttgactaatctaccatcttcatgaatctgcaggcacaatataacaacatattctgtgccactcatatgggagactggtatgagaaactttcacaatcttttagggatactgcaaatgaagtattggcaaaagcagatattgatccaaatgttaggtgcttcacaagaaggcagatgaagcacatcacaaacaactacggcactgtcctgggaaaaggaggtttttctgtggtgtacaagggaaaacttgataatggccgttcagtggcagtgaaacaatataattggagaacacaggaaaaggagttcacaaaagaagcgatcatacagtcccagtgtagccataggaacattgttaggttattgggttgttgtgtggaggcagatgctccaatgctggtcactgagtttgtccccaatgggaacctttctgaacttctgcatgggaagagtggccagcttcctgtctcattagagacacgcttccagattgcattggatgtagcagaagcacttgtatatatgcattgctcccaaaatcatccaatccttcatggagacatcaaaccatcaaacatacttctaggtgacaagcatgtggcgaagctatgtgactttggaatatctaggcttctctgtatggacaatgatgaacacacgggctttgttataggaagtaaaggatacatggatccagtgtactgtgagactggacgactaagcccaaaatgtgatgtctacagttttggggttgttcttttggagctcatcaccagaaagaaagggattgatgaccagagcagaaatctagcgggaatgtttgctcgctcaagtagagataaaagacatgaactatttgacaaggaaattgcagccgatgagaatatagactttatagaggaaattgcaaatcttgcacttgattgtttaaagtctgaaatagaagatcggccgcaaatgaaagaagttttgaaacagctttggagtatcaaaaggtcagagatattgagacaggagagaaggcttgcagagttgagagagagaaggatcatgacattaagggaaataaaggtcatgttgcgtggatctggctttgaaagatttgttacaaaagcgacatagattccatcataggtgacccagaacaggaatcaacctcagagacattttcaggaaaaagtgatgttgccatgggcaaggtttacatgggacgtttgaaaaacactccattgattgtgataaagatgtctgtggaagttgatgaggattggaaacagacatttttttatgagatgatcatgcaatctagaattaagcattggaatgttgccaagcttttcggctgctgcctagatcatgtcgatgccccagtattagtctatgagtatggtgagatgggcttgcatgacgctctttttggtaaggcgtggcagagtattgaacatcctttcacttcctatgtacgtctacaaattgctactgatgctgcagaaggccttgctcaccttcactcatttgacatggttcatggcgatgtcagaactgccaatgtaatagtggatgttttttctggatctaagctcgaaatgcctagaactagtacatttccggcaaagattgctggttttggaacaacaaagctcctttccttggacaaggctcagtatgcaagatttctaacagagaacatacattacaaggatccacacttcctaataactgggctcatgactaaggaacacgatgtgtatggttttggaggggttcttgtggagctcttcacaggaaacaagattcaaatgcacgacataaatacggtaattaaatattttgatagcgtatttgctatatgccatcatctcgaggaaattaaggaactagcttcgtggtgtgttgcacccgaggttacagaaaggccaaccatggccaaggtagtacgatgcctccacgatatcttgaaagatcagcgacggccttgcccttgcccctgcaagtcaatgcattaggccctttgtttcggcttaggctttagaacagccaaattaataatgagataaaacaaacaaaaaggaccttagtttgcaatgtaatttcaggctgacaagtggctcataactccagaattgtgatatcggaagtcactccaagttgccagtaactgtgacttaaatgttacagtatattatatgtttgccagtcaacttagacagtgataatattgttgctgcggttttctactacgattcgcgcaagtcttggaggcacagttcgaatgcactatgatactaatataaaagctgttcgaagtgctttggacgataatccagtttttgtccaagattatgttttggtgtagtactgatatccagttttacccccgtgtcaaaaataataatataaaaaaacagttttacccaacacaaacaaccctcgcgaccttggagagaccttggttcttgttttctggaatgttatccggtttggcaattgcaacgtttcgagatattgcgccagatggtaactgtgatattgagttctgatgtagagaccgtgttttcgtgaactgcactgtcgattgtaaatgatttatcaattgtacaaacttagacgctgagtattatctcacatcgtttgtgctgttttagatgtctatcgagagcaaattagcaacgaatgcctgtgtttattacgatagctccttttgttgcgagtatcttacactcaacatgcacaaaaacgcctagataagagcaattcaagaacttctaatcattccgcacccaacaaattggtgcgctctatttaaccttttcttctgcaagggacacaatagaacactatatatactccttgtgtatagatattaacaccacaccagccgtgcaaaaggatgctaaatcctgacatattggatgctttacggttaggatttgttggttttcaaagtgtacaagcaaagaaagctcaaactgccacgaatgcgacgtctctactcaaagtccgggaattgcttccaggttgtacttctctgatgatgtcaggccattctctgggccctgctgtgttcttggttgctccagcacgttcagcttctgaaggtaggagtaggaggcattgggatttggcggtgggctcgggttgcttattttgcttgccaggaaccgtctgatgagtcctctgaggaatggagccatggtatctggctcatactccaggaaatacatgattccccccatgcacatgcagaaaagagccacctgcaatgtttgccgggtaactgtcagcggatctgaaaaatatgatcatctactaaccaaggggcacactgacttcaaacatgatcccttccagttatcaaggcaataggcaaattgtgtagaattaagaacttaggactaatgttggtttacactgctcttcgacaccagattactttgaaataagctagagtattgcaagtaatcctcatgtagtttttgtccaaagtagaaaaacaaactgaacaatgaagaaaaatacctcagcgtttttaatatttgggagcagatggcggttgattaatatataccacaaagaatcccctgcgcggggaagtacatagagagctagctcagctcttctggctttcttttccaaaagaatagaaagaccagacatcagaccagcaaaccagtacacaaacttgtggtctttggttgcaactttacgatgcaaacagatggcagcctagcaatgaaaccagaaggatattatgatcatgaaacatttactagtatttgttaaggactgtcctcgacaattacctggaagaatgtaacaaaagcagacaaaaaggtcgtagagcgaactgcacccacaagagctcgccaacaagttgcagctggtgattccaagaactgatatttttgatacagagattccatcattaggtaattaacatagaagatggatatgtatgaactacaggataatgaaaaagtaagaagattcattgtgctaatcttgttgagtgctcgggatgttgctcaatattttgtttcactggcaacatatataactaaaaagcaatgcatgcattttgcattaagcaaaattaaagtgtctgtgcactgtgcatgaagagtacaaagatagagatgtgctataatttgaaggcttgtacaattggcttatacttgaggcatcaaattttatttgaaagaaaaatatttcgatcaagcaatagcataagtgggaaacaagattagaaagttaccttttgaaggcgtagaacaacaaatgggacaaatgtcaatgagaaatacagagggaatgttttcttgaacgttgatgaagagacactgacattatgagccaagcacgatgctctgtcaggatgtatcacagaacatggaataatgggtggactttttgttaaatttatcaaatttgaattcttcttgttagctaaataggctgagagaccaatgagatccacatgaccacctctgcagcaatctcttacagccttgtaaacaggttccgcaactggtccagtcttttggatgaagtcttggtacgatttaggtaagctttcaggcctcataacgaaagaatacataacctggaaggatatttcatatgattatatagatcttatctccataacaggataataatcccaaagcaaatcggtcaacttcatcttgttacctgggcagacgcaagtgaaaaaagtaatgcatctccatgcctccaatggcttccccaaaagtgaaatctgttcttagactttgcagaattatatgcacactgtaaaaaccaagcatcaatacatgaggaaaagggccatacatgcatcttcaccatataaaatgcaacagtttagcagttggtgacctgggcaagccttgccagaagatatagagaaagggtgcgcctcctacttgaatcatctagcgctactatcgccaagcctgccaccgaacctgctaatattctgctccatcacgccttcagttgagtccatgaacattattcgaggtaatcttataataaaaaattaacatgctttggacctatctactttttagggaccatctcagattcaagaactggttagaggtacacatgcgttgcagatgtgttgtagtgaatcagacaagataaatagacacaaaacagcataagcatagagttacttacgcattaaatggtgtttcctttttccgaaatctccgaaggaaacatcgaagtgcatgatatgatccagtgaatcctccaaaaagtaatcctacccggcaagcttcctccctcactattagatctttctccgaaaccagttgctgcaaattagaaaagaaagttatatcaatgacatcttatttgaactttgtagtatactagtagtagaacagtaaatatttgtcagaaagggaagtttgggaactggaccaattattttattttttaaccttttcttagtaatattttaaaaataaaccatccagtattttgttttaaatgaacctttcggccatgtcacggctgatggcaaggcaaaacagtgaaaacacatgctacaccatatgctattatctcggtgtggcagaggttatttttcaaacattattaacaaaaggttcaaaactttttttaagaaaaaaaaatcatactggatagcctcacaacagggatcgaaccatttaatgcatagcaagaaacatccctccaacaggttatttgatgtgcttcaaacactaccagctggtcctacacaagtactactagtaccagctcattaccagttcaccactaactattcaagtaaatgaacatagagcaatagatgtaacatcacaatcaagaccagcataatatgtgaccctgtcctttgctaacacatttgcacgccctaatgtgcgtgtgtccaagctccaacagttaagcaccaaaacccccaattccactccaattagccaaccgaaacaagatgaagtaaattcgcacagccgaatcccagttcccggccaaattctccgaataattccgtccaaactaaactaatctaatatggggcgcagttgagcactaaccgaaagaaatttgcaaattcaggtaggaggagaggagcaaggaggaccttgaggtcgaggagggaggagtaggatctgcggcgggcgagcttgaaggcgcggaggaggatgccgatgccgacccggacgccgtaggagagcaggaagctctggcacaggttccccgccgcgtgcgccgcgcacgactccccctcgtgcccgcaaccccacccaccaccaccaccaccgccgccctcctcatctccatccacccccttcccgtccccatccccatcccctcctcccccgtgctggtggcggtggagctcctggatggcctcccgcagccgctcctccgcctcccgcagcctccgcgccgccgcctccgacgccggcgcggcctgctgcggggtcggcgggtgaacggcgtcagggggaggagggggagagcgcgggccgagggtgggctcggcgccggcggagaggtcgaacgacggcgtcgagaggaacggcatggccggcgccgcggcggggtgggccccgcctgggattcctccgcttcggtggctcgcgtcgtcgtcgtgcttcctcccgccgctgctggctcgtgtcgcgacttcccgcggggttggattattaagcgatgataataataagattggaggtggttacgggtgggcactggggcgggtgacgcgtcgtgcgtgcgacggacggctttgcacctgcacatttgcacggaacggaatgtactactaggcgcctactactagtgcaagagatgggatcatgggaaaggtatggataacctcggcctatttacatcccacccaagattttacaccctagtcacatcgaatgtttaacacttgcataaaatattaaatttatgctaaaaataactaattacacagattgcgactattttgtaagacggatcttttaattctaattgcgccatgatttgacaatgtggtgctacaataaacatgtgctaataacggattaattaggtttaataaattcgtctcgtagtttactgacggatactgtaactagtttttttattagtacccgaacaccccataaaacacatcctatataatacttgatgtgatatgtcaaaactttaccccctaaatctaaacacccccttataggaaccctcttctttcttctaaccatactactccctcaggtttcatcatttttaacgttttattacataataccttctttcttctaatcacggttctacacgtcattttttgtctagacttggctcagcatgatctaattacttgaactagacgatttgaccctatagacaaaaaaaatggtctagggcacagtttaggccctaaacgggacgaaaacctgcggtctcacatctagacgcggtctagacagtctagaccatggtctaggcgaacactgatttattttgacaagtttgcaactcgattcaatggttagtttaagaaatatcgagtttttatagaagcgttgtcaagttgtttttgtcggactgtcataccaataattgtacttcaatcagactagctctaagtcccatacaggtccggtcagactgtcaaaagtgtgttccattggctttcaaggctgggatgtgttttgatctattaaagttcaatttttttactttccctgacgtaattcaccccctttggtaagtttggttacttgtgttcaatcttacagtaatttagatttggggataattagacttgacgaactacttggtaaagtagttaaaatttaaaaatacttcaaacacatcatcaagttgttatgcgttcttttctacaactccaaactacaatttaggcgttttccgttagcatgcttcccgaactgctaaatggtgtgttttgcgcaaaaaaaaattctatatggaagattctgaaaaggtcaaataaatctatttttcaactttataataattaatactcgattaatcatacgctagtgagtcacctcgttttgtgtgtcgctaatatgctactccaatatgaatactacggttcatacagaacccttgccttttctttagcttagatttctatacgcatttaaaagaaagcaatggtggtgcccaccaactctattatattttctttaccaactacctttgtgtacttcaatattacaaaagtctttcacatattgttaatatctttttttcatctctatttaagtttcatgcaaagacatatacaaggatgaaattgtttcaaaagccatacaattaattgttccaaacaatgttagcacatgtataatacatttttgtccactgcaaaacacagttgttttgctagtttaacaaaattttactctatctatattttaccggttttcaaatgatcttacggaaatcaacaaaatcattcaggagtgattttcgatcgggtttcgttaatcccgcgttcctagcttcctactctagcctctagaaaagagcataatactctcttcattcaagtttgatggtcatattctggcttcgcaccaagaccaaacacgcttataatattcctactaatctagtactctaggccaacacacctgtggcaacgctttggcaccaacacaaccaaattgttgttgccacatccttgatcgtatgcttcttacccatagcgcttgtgatcacacgcgaaatttaactgttttactatgccttgcagctatttttgcctactaaagatgaaaattagtaattagccattgcccatgcaacctaaaccaaaacaaaattgaaagagcagatcaaatagccctatttaaatagcacttggttgaagaaaggacttaagttttcaattcttttcctccctacctggctgcctctaccaccgaacaacgaaagtaacagatgatctactctgtaaattatcacggtgagcagacaggagcgatggtaaagaagagtttgtcgtggatgcgttgctgcacatggtggattagaaaatgagtgatagaagacttatcggtatgatctatagtcaattgcaaatatgattactttctcgtgcatacatatgcaacgggcttttacgaagtactccctccgtcccataaaaaacttaatcatgtgtttaaatttgaatatatattatgtccagatttaaatctaggatttggtttagtactcatgaaacgtccacgtggtggttaattaatttcgtgtgcgaactaaaacgactaatccgacaagactcaacgggctatcaaatgaaaatccagattcttttatacaagtgtgaatgatcaatcgtgaatggagagaacagaggtggtgggggagccgggcaggtgggcaatggcatccgagtcaccaagtggggcccacctaccaaccaccgtccacgagtgtgccgccgccgccgcctcacatccactccactctctctctctcctctcccccgcaaatcccccccaaaaaaaaaaaaaacccgccaccgcgagcacgccgcgcgcctgcttcctccacctgcgccgggcgagaagatgatgctcccccggctcctcctcctcgtcgttgcctccgcgctgccgctcgcttccgtcgctgcgggcgccgtcggcgtcggcgaggggttctgctcggcggagccgtcggcggcgtcgggcggctgctccggcgtgcggccgccgctctactggaaggccaccaacccgactctggcgcccgcgcacctccagggtgagtgagcgtgaggcggagcgatacgtcgcgagttggatggaatcttaaagattattgcataaataggtgctctggattgcgtcactgcagtgtttttttagaactgcaatatcgtgatattggttctggatttggagttactgttgtggagtatggatgttgatgctggttgagacgctcgggatagtgtttagttcgttcagtttcacgatgataccatactctctagaaggaatttctctgtgaatggtgtggcttgctgtcgagaattaggctgtgaactaggtaggtagtagtaggtagtcatgtgggactgaaatagaatggcatatgatatgcacgctcgtcagttactccttttcgtcgaattggattggccgagaagattatcttgtattcccttgctaagcacactttaaagataatttatgttttatgcttctgttttacttattacacggtgaatgaggatatcttctgagctattttatcgtttactcatgtaggctatctgtgtttcagaagaggatgcgttccttttcctgttcctgctaattttgttacttttctgtatctccagatttacctggcttcacacgtagtgtttacaaaagggatcatgctttgattacaccagagagccatgtattcagccctttgcctgactggtattggccaccttctgttgtactttctctttgctttccacaactatgtaatatcatttatttactctttttttttcaggatcaacacattaggagcatatttaattagtccagctatcggggcacatttcacaatgtacctggcaaaaatgcatggtatgcaatttctcccacctacaaagcataggtagaaatgtaaatgatagcagaatattcaacaagttctctttgaggtccgagtttggtttctattctaggaattcagaatattttgtttgccacagaaccattggattagcaagaacatttttttttgtgtgtgtggattcatttcggccattgggccaagaatgcctagctcccaattaaaagcttgtattcttattattgtacatcggtacatgttgtgttcaatcttatcaaactaatctgttgacaagatagagagttcttattttatatgttttatttgcagatggatcaaaatcagccctaccaccaaaaggtgttgaaaggttcagtgcttctcacttagttagaatagcaaccattcacacttgtaatcatcactgtttcaaagaacagaatgattgggtcactcctagtcctagccaataaatgttgactgtgatgcacatccaattaagtagctcatttgtcagcatcctatacttgactcgacttggtttttcaccatccagttaatgggtttccactggtccatggtaaacaattttcaggcttatctttgtactccaaggaagcattctattgtctgaggagagtgggaatacccatactctgctggtaagattcgatcaaacttagtatctgctattttgtgaatatctagttattttttcactatactctatgttcgtcgtattatgtaagtgttaatccactttaaacatttctaattccatgacataacttgatgggatcatacgacatagttttcaaagtttagaggcagcctaagccaactgcggttgacaatatttttaattgcatgaagatgatttacaaaatgtgcatgggctttttaagatcatttctaatcattactaaggaatacctgaagaatagtatcaaccatgttcagaaattccattgtagttgaatgagattttgcgacatggtgtatccggatttgtctattcctgcttctgttgttatattggcataacatgtttgaacataatgcaaattaaacttatggatgatcagttgttaaatttgtagggtgatgttattaaaattttgtcaaaagacaataatataaatattatacatgataaaagggtactaaatatgggatactgatgtttgtaaattcaacagaatttccattgtttgtcataactgaatgaatggaactcccacttgtttcttgcatactcctgcagtaaatggcttaattcttttcatgatcctgatacttgattgttttaacttgatcatcttttaccagctttagagaagtaaaggttgcctagcattaatatggtttactgattgtgtaattgctgagtgcaggtggactcttatgcctatcttcctgcaaacatgaaacactctgtgatctcagatgaagtaactacccttgtaatctttgagaggaggtacaatggttaaatggcacactttcatgtaaattttgtttgttttttaccactattttttttagggaatgcgcataatccatgcgcatcatttgttttaagaatttttaccactattattgacctagctgactagctgagtgatcttattgaatagctgaagttcttcccattttggtaggcttttagtcgctaagactggattaacttttgcaatataaatggattggcttaaggccaattaagtggttgatgaacagtatttttcctttgtcttctttttgttgtgaatatgatctgcacatctcagacaattattgttttccgtcaatgatttagttttctcagtttacatttctcattatttaatgaatatatttgtttaggtacacaaccattgagggttaccatcctgatctcattgttggatcaactgataagcaaccccttcttgaaaccccaggagaggtacattctggacctgtgtggtggataccgattatttgcaatctctaggcatctagataaattggtttgcctgccatttgagtggtacgcctttaatttatactatgcattttcaagagggttggaataaactggtttcagttttcaatttatatcatttggccttgtgttgccaatattgtagagtttttgctgtgacattcatatagataattgctgttttttcccctgctacagacaatattgtagtactgttttttgctgatatatattctgcaagcacttacatgaaattcttgcctcttttttccaataggtatttgagttgaggaagctgctacccacttctctgccttatgactttaatatccatgtaagtctgattaatttgggtttattgtttaacttggtgtgtataacatcattccactgaatgtgagtgcccataaatttcggcaaaccaagcattagattcaagctatttgttctcctagttattcattgaaataagtgtaataagctattgtgttgtataagaactcaaactctgaaacactggcaacctgagcttgcaaaagtcattacttatcagagtctttaaacttattcgtaggttatttctagactacaaaggagctaaactttttctgatatccttatttctcacttgcagataatggattttcagcctggggaatatcttaatgtgaaggtttgtgaatattttaatatttcttaggagatttcagacctaatgtgctagtaccatgttttaaaccgtgttcatattttaattgtctattagattaattacaaaggggctcccaccagaaaatctgcaatgtgtgaactacattcttggtcatgtcactagtgactagccactatgcacccatcacattctgaagctgctttttttttgggggttaattataaacaggaggttcattacaatcaacatgggttgctgcttttagagggacaaggaatataccgattgggagacagctggtaaggatgtgatctaaaacatttccttttttgtattattcttttttttccttttaggctttatttggttgtgcaacgttcagacttcagagtcccaggttcccagccttgtttcctcctgggacaagctgtttaaggaagatatcataatcttattttaatataagttctagaagatgtgtactgagtactgtatatagattaacggctcattattgagcttgacatttacaaaatatgggtgcgtatgagcctaatctacttcatggcactattgtcatgactcatgtgtttctgcttccatccactgtcctcaacatttttttagaggccgcccttcacatctaagtatatgctttactgacagttgtaacattatagactatattagtctcctacttagctgattactgaatatttgttctgtttgctaatacaggtacccggtgcaatcaggggacaccatttggatggcaccgtttgtgcctcaatggttagtatctgtcaacatagtgtttatcattcatggaattggcttttgtaggcagctcatcaccgttgccttgctgttccaggtacgctgcccttggaaaaaccaagacgaggtacttgctgtataaagatgtcaatagggatccactgatatgaggaatgcaacatttcctgaccgatggtaatagatcaaattggagagctattacgctggtcttgaagagtccctgtggaagatgatctcagaaaaaaataaatcttctttctcgctgatgaacccttcaaaatgatgaatcgacgcaagaatctcagatctgtacatggaatggtcaagctacccacttgttcttattggtcaatatgaattcagaaaaaaagttgctgtactattttctggacagaactgggctatgctgtgactcttcggaaatctgtattggctaaccccttgaaatgtcgaaataatgcgtcgctgtaatgaaaccaggtacctgattccaagattagtgcctttttttttccttttaattgcagagcatcaaatatgtggcgacatgtcgaacatcaatgtttgggtatctgaagatgccttttaaaaatggaaatgaactgctttaacaatatttgcaagaagaaacatgattactctttggctttatgaactccaaacttatgagctatgattggtttatgcctttatgttaagcttgatctccgaactatgaaagggcattattcgtgctgtcaagggaaaaaactaagaaggaaatgcaagttgttgaagaataattacattatgcttacttttactctcttgaaatgccgtgccaatctttgccaaaaggagatgatagaaaacataatattcttaatcataaggggatatacatgcatgatgtgttgataagtgtgtccctgccacatactccctccatccaacaaatccaacctaataagaatgagacataaataatttagtacaacgaatatgaatctgaacatgagtatataggttccagattctccctactaggttatgttccatatttgcctggttggatttttttttttaagggagagagttctccactccattaaaaaaatcaacttaagacggggtgaaatataacctagtacagtgaatctgaataagtcctaggttatattttatccttgcctagattggatttttttgaatggagagagtggtacaggagaggcaactatatttttttattttgtaaactttttaaataatactcctccgtctcaaaataagtgcactcctctagttcaattttaaagagtaaattacacaagcggtccttaaacttataacgaagtttcacttaggtccataaacttgcaaaatgtgcatcgagatctctaaacttggtttaatgtatcatcccggtctaaagctgcgtttgaccatagtcttgcctatgtggcatgctacgtggacgatgatatggaatttttttctcccttcttccttctttttttctctcttcttctccctttttttctccactttgcctccttcctctcccttctgccgctgacaggtgagacccacctgtcaacgccccgcgaggctggcgagggggtggggaggccggcagcagcaacgatgtcatcgacgggaaggaaaaggaggagggaaaggggaaaggccccccactccagcctgctgcggcagctgctcaagttcaacaagctcacctcctctttcgcggagctcattgtcgggccctgccgccccgctaccgccatcgagcttgcgcccgccctgctcacgctgagctcaccgacgcctccccctgcacgcacggtcgcgttcggcgacccctccccccggggcgcggctggcgacacttccccttgcgcgcgcctcgaccgcttccgcatgaatgacgcgccgccgcccaacgaagtgcgccgccccccctcttcgcccccctccagtgcggcttgcaaggccgcgccacccccgctcatcaccatcgttctcgtcttgggcagcggcggaagaggaagtagagggagaaatcatatgtcgccgttggcggcggccgcctctccctctcctcccccctgggcctccgtctgcggctcctctccttctgccagccggcgcccgagcacgcgcgccgctcctctcctcaccggccaccacccgcgcacgcgtgctgcttctctcctcccgccggccggtgcccaagaacgcacgctgaccgtcgccggaaacctcgtccaccacgcaaggtgaggaaggagagaaaagatggggagaaaaaaggggaaaagaaatttagccatatcatcgtccgcgtggcatgccacataggtaagaccacggttaaaccaggctttggactgggatgatacattaaaccaagtttaggtatctcaatgcgtattttgcaagttcgtggatctaagtgaaacttcgttacaagtttaagaaccgctagtgtaatttacttaattttaaacataattatgaaaaagtatattcggatcatcatgtcatattcatcggaatgacaagaaaataccatcacgttggttaccaagggtgtgataaggatttaatcacgtagcatggctaaaggtttatttttgcaaacatttaataatgttaaaaggcacatttgatgggtagtagtgtttaaactttaggtggattcacttgcagaagtacgaaaaaggaaacatgatctacttcctccgttttttaatagataacgccgttaattttttctcacatgtttgaccattcgtcttattcaaaaaatttacgtaattataatttattttgttatgttgttttatcacttataatactttaagtgtgatttatatcttatacatttgcataaaatttttgaataagacgaatggtcaaacatgtgagaaaaagtcaacggcgttatctattaaaaaacggaggtaatattaaactgtggtgttattttctcctgaagatgaagatgaagttttttttacgcaaaacgaggtggtattaccgtatgattgattgagttttaattattataaacttgaaaaatagattaatatgatattatagagcaacttttatatagacagttttcgtacgaaatacaccgtttagcagtttgaaaaagtgccactaaaattttaatcttaattcaactcttgttgaaaaaaaaacgagacctaagtaatataggaaacaagtgctttgtgctagcagcacgcattgaggatagatatcaactgtcaaccaaagatagtacatgactatgatttttctttgtattaagctgagttctttttaataacttgaaacggtttaattttctctttttcgttagcacttttttagaaatgctaaatggtacattgtatgtaaaagtttctatatatatatatatatatatatatatttttaaaaatcttcttaagtttaaaataatcgatacactattaagcatgaggtaatgactcttcgcattttcgtgcccggaaaatcaacgaccatccaacataatcaaaatagcccttaggctatgttcttcaatttctttcccaactcatttcattctttttaggcaaactttttatgtccacacgcttctcaaactactaaatgtgtgtttttttaaaaaaaaaattatgtaaaaaagttgcttttaatattataagactttttagcattgcccacattcatatatatatatatatatatatatatatatatgcgcgcgcgtgcgtgcttagattcattaacatttatatgaatgttggcaatgctagaaagttttataaactgaagcggaggtattacttaattaatcatgcgttaatgaggaacacccttttttcgtgcgggaaggtggagtttcgcaaactcagccttagtcgttgtttgctgtattaacgtgcactaaaatactgtaggagacattttcacgcaaaatgtagccggagttggttcttttcttgaaactggtcacatggctaggtttttttattttcaagcagaatcaacatactatttttcttcttttagttgacaagttcaaccagatggtttgatcggaattttcgaaaccatagatgttatatttttaatgtgacaccgcttacaagaatactatatcaatatattattaccattccaattagttccttaccatcgtatcatttccatccctataataatctaaggttgcgttcgtttgaggggttgttaaacaaaacggagctgtgaattagtatataactaattaaatattataaaaaacctaataaataaattaatataatttttaaaagcattttcctacatagatttttcaaaaaaaaacacacagtttaactgtttaggaaacgtccacgtgaaaaacgagacacatacacagtatacactaattcaaacaatatttcactcatgataataaaaattcaaatcacaaactgcacttcccctcaaataatatcgaaattgatgcttgaccagtcaacactacttaatcacacacaccacccagagccaaaccagattaaatcaaggtcgggggttgccttgcctaaaccaatacaaacaagctgctaatccaaaatcaatgtcccgtccgatcgcgagatcgcgatcgcaaactggcaaaatcgcacccgcaaaaatatctcggcacgagtcgacgcgacattccaatagcagcagcagcaagcagcattcgcattggccttcgcgcgcttttgcgtttacacccctcgcgccccctcaaaattgcagacgcccccctcccctcccctctcgtgctctcctctcctctcctcttcctcctcgcctcgcgtcgcctcctccgcggcgtaccctaaccctagcctcgccttccccccaatggcgcgtcacgcgtg

SEQ ID NO: 6938 - DNA, 21648 bp, Oryza sativa
aatgatgcaagaagaagcaatatgtggcatctttaaggacaccttattcccagagggattgtcggtctcagcaagtttgtggctttgccgtttagtgttgttgtgaattaaagctgttgctgcttcaacaattgcccgtgtagagcgatagttcttgctcaatctgacctaaactcatcagcacgaaaacacaattaacagacatcaagctgagaatcaagattgtgcatcaaagacaaagtgcatgttaggaaactcctacagagatgccgtaattacctctttgtgatttggaaaatctctacgaaatgaatcaaagccagagacatcagcaccattgaaactgaagatggactgaaaatgagaagaatagaatgaaaataaattcatattgcatctgaaaacactagtaaataaacagatatcacaagttcaaattataggatgatggatgaaccataatttgtgcacctgatcttcgtcaccaacaatagttatgcggttgtgggatgctagtgtctttaaaagataatattgcatagcacttgtatcctgaaactcatcaactactattgcctgccatgtatttcggcactcgtcgtatactgcatgagagatatcatatcacaatcatattatttaaaaatttatcacaatagataatattgtgagatcaggactgaaattaccttcaggaaactttgtgagaagggttatcgatgaattaataaaatcatggtaatcaagagcattacaagaccttaatatttcattgtagtgccgaagaattgaagcctattcaaaaaagtgagaggtaacgaaggtcaatagttagacatataagaatacagggggttatactaaaaggacagcttactcctgtcaaatcccccttcttttcatactcctcgggagtcctaccagaagcttttgcctgtaaaggaggatgctaaatttagggaaaagataaaatcaaactacccataaggtcaacttgatacagcaacagcttgtaatagtttttcagggacattaccagtttggcacaatttccacatatacaaagttttgatctaacacattatattgctctagacattttaatattttttttttgaatacgcaagagaagtgcatatcatttcattaagagaaggagagaataggaagggagcaatgcccaaaaacccgattggaaacaggctgaaaccttcacaacacacgcaaaaacctcacctccccagtgttatcgacctataaaggaactccttaagcctagatgccctggctagcaagcacatgcctcaaaccatgaagagtgtgtttgtaatatgaagttcatgcaccatatacagtgtaagacaggactaccattctaaacatgcattgagtatcctactggcctacattcagaattaacatgatccagaatttagcataacatactagctataattctgaggtagatgcaactaggactaatgcttctttctcatatgaaccgagagcttcacacaatttcctggttctaccgttagttgtattcattgatatcatatttattattgtctacaagttctggtatctttgttcagacctagcctggagatagctttagtccagtctattgcaaagaatcttggcaatgttcttttctataattagcacaacttttaacattatactgagaatttgaattaaatcatgtgttatgtatttatgaggtacgtggagttgtcgattactgtctgtagctttaaatcccctaagcccagcatctaggaagaaccttaaatcatttcctttatgcgttctacattctgctgtgatatgtaacagtaaggtggaactagcatatccaatctagagagaatctagcattccacacacactttaggtagatgcaacagtgcacctcactttacaggatgcatacaatataacatgtacccagttcctttcagaagctccctatgcaccaaaatagagaagggaataaaaacaaaaatgcttaaatgatgaattcttcaaaagtagaaggcacctgtgtaacaaacttctgccatttcttagctttgtccttgaaagaatttttaatatctccatcgcaattcttatttgcatctcctagaccattatttttgtcactttccaatagacgctctgcctcaataacagccctcctctgctgcccatttccatagattatgaattcagatgtgcggcctagcctttaaaggatttattagaacatcagaatcatacaataaaacaataaataagataagattccaatcatctaaaatgattcctacacttgctaagatgtaggaaataagagcgcactgaaagcagggaaaatgtgctcatcatactagcaaatatgatacaccataacaaattgtcagtcggtgaatttagagacattaaactacaattgaagatgatgactgctttgatgtactaaatcagattaagcagggaaaatgtgctcatcctactagcaaatatgatacaccataacaaattgtcagtcagtgaatttagaaacattaaactacaattgaagatgatgactgatttgatgtactaaatcagattgtgctggtatctctatgtaatgggtattttaatgcatttctgacttttatcacaatgaatagcgtgatcataaaaatcataagttaaaatagaaaacaagaatttattttcagcttcattcttttccaggctgcatcttattcagatattactttctcagaaccaaatggtctacaacactaagttcattgatatgcacttcaaagataaatgtgcaagtgtagtatgctgagcagaagcatgtcgatatccattgttgcattgtattttaagtattatccaccaacagaaaagacatacttttcagcatgggtcctgcaaagctgcaagcagaatgagtgaaatgtgcttattacaatctccttggcaactgccttccccaccactgtcccaattcgatcccgcatttcagaagcagcagcagttgtgaatgtcatagcaagaatgtttgatggtggaaattcctaatcatcaggcaaggagatatgtgaatatgtgagcttcaagaaaaaaaaaatccatacaatttcactctgattatatcaaccagtgaaccttacctctttgagcagtgtgagcacccgaccaaccattgttgatgtcttgaatcatgccaattatgggaaggaaattttcagtatatacaccagcatggaatttaatatggcatgacaggacctttgatatgttcaataaagctcaaatagacattattttttagtacaattaacttttttcaatcacaacaaagtttatggaatctgcaatattgttatgtgtgaccgatatgaaaaatacgataaaatggatggcacttgcaccgtttaacgtttgaaaggatataatctacggaatatatttggcttgaatggtcagatggatttcattcagaaacaatcattaactgtatcagctacaagaacaaaagctacaaaattaatgcatatcgataaatgactattatttttattagtcaaacaggctaaatcatgcatgatgttggtctaaaaggacctgagcatctgacgaaattggtctcagttggtttcacatcgaagctggggccaataatttatgacagcggttaactcaacaacatatgtccataatactgaagattaagacattgaaacaaaacacactggttatatatgcaattcgcagagaaaggatgtttgtacatacctttccacttcctggaccagcaactatcattagtggaatagtcacatcactacatgcagcttccctctgcctgtcattcagggactgcaaatattcgtagtacttctttggaacacacccttcattttcctcaatttctagttccgtttcctgtggctcctcctggcccttggtagcatcaccctgatggatagcatcaagatcctccaagaatgcatcgacaagctaaatattccccaagagaaaaggaattaaacacatttttcttgattccaaagcaaacctagtaattcaatttttagtttcccagttcaccttccgagaatgaggaaacatgaattagccaccaccgaacaactgttcatcatttatttgtcgaaagttaagaaatgaagcaaataagccatacctctccttcccgctcttcatggcaaattactgagggaactgaaggaccatcgctattttttccgtccatatcctcctggcacttggcagaagagcctgtatggtgcacctcctcagtaatgtcactgatgttccagaatgcatcctcaaactgccgcccaagcaaacaaaacatcctaagttcctttagccacttgacacctaacaactaacatgataatgtcttaaaaaatatgcacttcatacacaacggcatttcaaggggaaaaaaacaggtcggcattcatttgcccaacttttcttatcgaagtgcaacaaaaagaaaatttccaatacttcacagaccatcctaattctcttctaatttcaaagaatatatcacactctcctatcagtgttagggatgaggaaaaccacaattagactctcaaagttgagtgagccagattgctccaaccaataactattcatcaggaccttacagagttttccaccgtttgacatacctctccaccccctgtggcaattgaaatggccggtggaagtgaatcatcaccaaaccacagttcacagatttcttcttcatccgcatcctccatttcttcctggctcgtggctaaaggctgagcatcaccctcctcaccaatggcattctcctccttccggaatgcatctccagactggattccccacaaagaaagaacaatcaaaattagttccctattaaaagtagccacttcaggatctggtacagcacatttcatttctgatatatcgaaatggcggaagttttgctttcctagttcaaaaagaaaaaaaatcgccagtatacagttgaactgccagcagtcacagattcataataatatcacactgataaactaattctgccccccaaatccttctcgatcctaaagcaatcccatttcatgaaacaacaagtttcagaatcccttaggcctcgccacttccctcccaattacaagattcctaaatccacaaatgcgcccttagatccctaaaccccagtttagaatgaaacgagagagcagcaaaaaaaaaaataccactccgctctccggttcggaggggatcgatggcggcgcttcgccggcctccttatccttcctggccgaggaccgctcgtgctcctcgcaaatggcgtccacctcccgcaggaacgcctcgtccatgccttcgtcgtcgtcgagaaggaacctgcaggagggcctgggcgccttcggggcgggggtgctgtacccgtacccgcatcctccccctccggatccccgctgccgcagggcgttgccggtgacgtcggcgagcgggcggcgcggcggcgggcacgggggctgcggagggggcggggatgggggagggcgcttgcgggggaggagggaggaggagccgccggggtggagggggagaggggaggcgttctccttccagcgcgacattgccccccagcgaccgccgcggcgatcgacggcggtgcggcgagggtttgggggggttttttgggtggaggttggtgcgtgtgggcgggaggagaaaatgggggcttcgctgaaatgccatcctacaattgggattcgcccaaataccactttcaactgagcccaacccgctgaaatgccatcccaaatcattttcatcaaaaataaaagattttactctatttttcacatgatttgacgaaattacccctcagtcaatttcatcgttagaaataaatcggctgggaaagcgagacgcatagggttagggtttccgtccgccacgccgatctgggcgccgccgcgcgacctccctagcgccgccgcgccgccctacccttccctcccctcgcgccaccgcctcccctagcgacgacgcggcgcgcctcccctcgcgccgccgcgccgcgttgcggccgtcccgtggcgccgacctctccctcgcgccgccacgccgcgttgcggccgtccctggcgccgacgaggtctccccgacgaggtctccccgagcgccgcgtctcggccggcgccctcccctcgcgccgacgctcgaccggcgccctcccctagcgctgccgctcggccggcggcctcccctcacgccaccctgcgctcggccgtactgcggcccctctccacgtcggtgtgtcgccgtcccggatctacttgcaggagtgatgcagatggattgcagttggcatgagctcatcaccgggtagttcctaggatgtaaaggtccttttttcatatgttcatcacatcctgtgtacatggtactctatatcctctaaatcgaatgaaccaggggtattttggtcatcaaagttgtgagaaaagagagaaaatgattttgatttactacacaggaagagaatggcatttcagcgggttgggctcagttgaaagtggtatttgggcgaatcccaattgtaggatggcatttcagcgaagccctgttttgaggatggtataatccccattttctcgggcgggaggggagggagggcttcgccgaagcgttgtgtttttcaaacgaaggaaaaaatagaccgatttacgaaaaaggaaaatttatgtgtgtcggtatttttttaagaagaaatactcagcgtgttttcttgaaacaatacaccccttattactacactattaatcaagggcatctctctttgtttgtaaaaaaaaagtgcatctcttttctcttcaacctcaatgataaaaaaaccaaattttgatatgcctcctcccccgctgcaatgacaacggattcgttgtcatgtatagaaaacgaatataccaaaatgataatccgttttctaaaaagtgtacctcaatgataatccgttttctaaaaagtgtacctctaaatatttactaggctgcaatgacaaccaaaatttgttgcatatcaaaatttattatattatatcatatcgggtagaagggtgttatagtatgtaatggagggagtacgtttcgatcaatactccctccgtcccataaaaaaccaacctagtactggatgtgacacattctagtactacgaatctgaacatacatttgtcatgtgtcacatcccgtcctatattcactttttttgacggaaggagtatgtaccaaccagttgcgtgaattacaattgatgggcttttaactttctttcgtataatataagggatataatatccaatatgttgctacaagaatttaagcgtaagaggatatgggggatgtgcacattgagaatgttaaaaggttaatattgagagtgttgaaaaatatgaacaaagttattgaactgataaaaacacgtttttagtatgcatccatgcaaaagaacggtacaacatataagtgaattctgcatgtggacatcacctcaaccgataccactctgaataggagtcacttttcaccagtttcaacagttagatgattctttataccttgtttcatagttaagcgatatgaatcagatccgatttatatttactttaagagaactagcctagagctcgtaaaactagaatattagagaaggacctaatatcaaataattaggaggggtgaggctttgaacccaagtcgtctagcccaccaccttgtggagctagtcggaagacccctgggcatttctcaagctagcctagagctcgtacgttacaacggaaaacaaactgaaattcttacttattattaaatcaattaataaacacttatttagtctaagtaatgttatgattattcttattgaacaaataagttattttgaattttgggggagtcaatagtgatataggagaaaacttgttgaaaaatgatgtaatagtatagattgtggtcattagatatcagctgtaagggtgatgtggaagaacaccacccctactattaacattttaagtactctatatgtttcatattataaggtgttttgattttttttccaagttaaacttttatatgtttgactgagtttataaaaaaagtagaagtattttaaacaccaaattagtttcatgaaatatagtatgaaatatattttgataatatgtgttgttttgtgatgaaatgatactcgataaaattagtcaaatgtaaagaagtttaaatagaaaaaaaaattgtcaaaatgacttactccctcgtccctccgtcctaaaatataaatatttttagctatgaatatcagatttatagctaaaaatacttatattttaagacggatggagtaacttataatacggagagagtagtatagattaaattggacttttttttcgattttgctatatctcactcgaaagattttttcttatctcttactcgattttctcactcaaatttacagtgcattttcttataagttacaatgtaatttatggaacttacactgtaaattttgtaagttacattgtaatttttgaatcttcgcatgtaaattttaaattttgtattggatttggtctttttcttaaggatatggtaatttagtgtccattatggtgtttcttaattgttttttgttttttattatatctatcggattttaattcaaagattaaaaatctgtgtgatacaatcataaaaatctttcgagagatgtataggtactcttttttttttttctgacggcggagaggcgaggcaatggggtggtctttaacggatgggttgaaaatgggttgggctttaacggacggcccacatgtcatctggtccatcagaaccagcgacgcggagagactggagaactagggctccgcctccctataaggagcgttgccactagtggagacccgagtcccgaccacgacgtccgccgcggtcgctgccactgcactgcactgcactctaccccggcgagcaccacgaccggcggcgagagatgcagatcttcgtgaggacgctggacgagtgcatcacgctggaggtcgagggcagcgacaccatcggcgacgtcaaggtcaagatccacgacaagaacggtatataattgattaactcgcttagctgagctcctccccttcgccctgctcgtcggtggccggcaaagccaactgcatttcctctcgcgcttatcggaatagtccagctccgccttttctttaaccgtcccgattcgaggatttcagggtatgaaaatcatagctttcctttctcttaaaaaaaaaattatccgattgggtagtgaacgatcgataaggttattggattagtttgcttccacttgtgtttcttcagagcaagaattgtatggggggattggtgtatttcttgccaaatcgctggacattccaatttgattaccatttaccagtttgtaccatgaatttgggggttaatttggtttgagttgtacggcaggcatcccggcggacgaccagcggctgatgcacgccgggaggcagctggatgatcgacggacgctggccgactacggcatccagacggagcacacgcttcgcctcgccattcgtctccgccgccgcggccaacctcctcacactcgcgctcaagcacaatgagaagaagatgatctgtcgcaggtacgtcctttaatttgcgcatttccatccaaaaacccaattagggcaagtacaataatctactattagcctgtccacctcagcgtgatttgacgtggaggcgcgctatgcgaggagaagggtgtgagccggcgcttgcatgagcgcccgttttgcacaggctaccatgcaatcagtgggacccacatggcctaagcgcagcatgcatatggcccggtatgcttgatgggccaggcaaaaccaatttcattggttggccaagcctggattgttgagccttgtagagactattattgtatacatcaactgtaaaacaagttctaaatgagttggataagaattagagtaagcaatcggctcttctattgcccttgcccttaggggagtcactctccttgatttgagaatctgcggcggccccattgtttcgttttttcggggaataatccaaacggcatatttacaaattaaaaataatttgtgaacaaaatttttataaatgtgttcttaccgatctaaaagttaagcttggaaaataagcttgataaaaaaaacttcaaaatcaacttcaaatttaagattgaaaattcaaattttggttgataagtataagtataagcgaaaagatggggccgtagttcgccgcgtgcaaacgaaagtagcagcttttggttgcaaattaactaatttcttggttgcagatttgcggtggtatgaaatgcgaaatagagcttacttggtgcatcaccttttcagctgaggcgtaagaaaaagctagtactccttagtaaataggtactctctccgtttctctccgtttcaggttataagacgttttgactttcgttcaagtcaaactgcttcaaatttgattaagtttattgataaatatagtaatatttataataccaaattagtttcattaaatcaataattgaatatattttcataataaatttatctttggttgaaaatattattattttattctacaaacttaatcaaatttgaaacagtttgactttgaccaaagttaaaatatcttgtaacctaaaacggaaaagtgggatggagaagtgaacaaaacgtattgattccaccattctttgataggtactccagatgaaccgtggggatggaaaagcgaacgaaacggttcatcagtttttttttttgagatgtcttagcatcatagaactgcagttattatcacatcgaagttttaacttcagccctagctattagtttaatgttttcctgttggattacgaactttgaatctttgatcaccctttttctccatgctaatggtagttttgaagaagcatggctgtgacatgctcaagaaaccactgctgaaagttactttcttggggatgaacttttatcactctctatgaatatatacgtcgtgatggttcggatggaaatgctagttactggtgaacattgcaatgtgttctctggcgatctagcctcacccatcatatttgttcttctcttttcaccatctattgcaactgtttttggcatgctctgtgttattggatggctgtggatgtacaattggccagattgatggctatcatcaggccatgctgttctcgtctctttacaaagtaggagctgatgccttctgattctggatccctgatgttatatgtgtgcacgcgttgtggcttgctaggaaggcaaagcaggtcctccgaccgctgcccagtgttttgctgatatcctgctggatgctgatgtctcacggagatttttcgacaaactatttacatttgcaataaactttcagcaaatttcacggattccaatcaaatttggacccgccaaatgcactcggagatcgtggtagagagagaatcaggggcagatctacccattaggcagggtgggtcgaccgtcccagctatgacatatgttgcctcacaccccccaagaagcccagaccatcttagagtccccctccgcggctagcattgccgcattggacacttgctgtggctagcgccgacaaggaggtggcacctctctagtggtgctcgtcggagacgggagacccagatgtgggagattaggccattcacagcacctcatttgcgttacctcgtatgccacataggatagatacacaacgaatccacacatcttacagtgcagggtactacgggtgatcccaaaacaactaccccaacctattctctcttccactttcccctttctctcctttcccctttccctctcctactttcactcccacccacccgacacagccggagcgcgcggcggcacaggtcgccgtcgtcgccaccgacgcggcgtcgtcgtcgtcgcccacggcggcgcgcgtcgtccccgcgaatctctcggcggcaatgagaaagcggagcgaggaggacggcggtggcgcgaatctggagcggcggcgtgggaggacaacggcggcggcgcgagaggaccacggcggcggcgcggattctggagtggagcggcgtgcgcgtcctcgtgctcgtgctcgtggtcgtcgtcctcggagcggtcatggcgggcggcggtggcgcatcctcgccccgccctcctcaccgacggcgctctcctcaccgcctgccccaacgccgagtggcggcggcatcctcgggacctggcgaagaagcggcggcggcgcggatcccaaacatggaagctggaatcaaggacctgaacgatcctggagaccaagccaccggcgacgccaccgcgcgcgcagcgatcactgcgtcgctgagagccatcgccgtcacctccggtctctccacgcgccccgacttcgccgccaatctcttccccgcctactcctccgccgggcgcccagtccttgccgccgcggagctccgagctcggccccctacctagctataggctgcaggagcctccgtccacgcggggattccacttcaagttcgtcatcctggagggtgctggttccctcgcggtggcgtcgtcgctggtcttcatgtacgccaggcaccgcagcgtccgcgacgcgccgtgaggctgttcgacgaaatgcccgagaggctgttgaatgtgataccaacagtttgttttccataatttcttcttgttaaggtttgggcagactacgattaggtcaaccagcacattgttatttaaccgaacacttaatcggtgaaaattcatcagatgcaaatgcattaatcatcatgtacggaaagagtggaaattatgatcttgcaccgaaaatatttggttcggtcaaaacaaaaacatatgttgtcacactcacaactttggtactgtatgaccagaagctcactgaaggtattttaaacccaactcagcaattttggtcactgtcatttcagcttctgcaaattaagcccaatagcctcacttttcttgccattctgtctgcttgttgcgatgaaggacttgttgatgagggttgatgagggtaagaagttgttcactagaatggaggaatactcccttgagcctaacctgaagcactatgcctgtatggtgaatcggctagggagagcatcttcaaggggcagaagatatgatctctataatgccaatagaacctgatggtgaaatatggggaactgaacttggtgcatgcaaaatgcatgacaattttgaaacttgcaattgtagaacaagttcttttattgtaaataagttcatgcttttgcttttggtactccctccgtttcaggttacaagatgctttgacttttgactttggttaaagtcaaactgttttaagtttaatcaaatttatagaaaaaaatagtaatatctttgacccaagataaatttcttataaaaatatatttcatcattagtttaataaaaactaatttggtatattactatatttgtttataaacttagtcaaatttgaaacattttgattttgaccaaagctaaaacatcctgggcatgctatggttattatgtgatttctcttgtgagcaagtggcatttcagcggtttagaatcggttgtaccaggatgtgaaatatgtgtgatcaagtggggtgatcagtatgtcagagtgatccctgaaaatcaacagaacgataactcaacagacatggtctgaaataaaaccgcagatggtctgaaatttcaacaagtagcacagattcctacatcagattcacaagcacaaatcacagtttcataaatatgttctcacagattcatcaacacattgacacaaattttcagcaataactaagagattcttaaatatctcacaatcacacatctctccaggctagcaacatcgggcgaccacatggcctcattctcagcccaaattttaccattcatcgatacaacacacattaaactgaaggtttagttttatgtctagccaacatcatacagtgcatttccactagcaacatcacttcagggctatggcaacatgcacacggcatcatttactcacagcatacaaccccaagctgcatcccgtagatcagcagcaacaactggaacccagggcatcacaaagcaacatcacccaataatagcaccacatccacttgacctgcacatgtaaaaaaaaaagttttagcatcattcacaaaagcatttttgtaagaggcaatcagatgaactccacacctgcatgctgtgactttctcaccctcaactagcacaggccatccaaaagatgttggtgccccataatgattaatgacaaaatgaccagcacttgggtgatcaaccaaaccaccaaagttgatcacaaaatgtgttcatgttgctagccgcaaggaataatatgattcacatattagacaacacgacccatgtatatagttcacagaccatccaaaaggaagaactaacttactagggagaagtcaagctagatgagaacctatccactcctccacaaatctgatcagagaggagtgcaacagccctgatatgcacatccttagcccatggctccattttaggagtgtaacagcctgatatgcgcttccttagcccatggctccattttttatgtgtctacctgtaacatttgtgcaaacatgtccatagccttgctcttgtggagcagctgatgaggtaattcttgggcagtaccaggttccttatatgaactgaaaacaaaaatcgaaagacatgtctacctgctaaattagaaggtcattgttcagtttcaattttaaccaaataaactaagaatgcttacacatattagccatcatgtactgattggaaaaatgcatttgcatcctgtaatcaggcattttgcagatactttgattcctgtaattactagccaccggtacaagctgacaatgaccctttacagttacagggataattcgggcctgtttggcacagctccagtttcagctccatcaaaactgggagtggagttaggtggagctctttcacaaaatgtgctagagttgtggagctgggtttaggtagctccacaactccactccagactcaactcctggagttaattttaggagttggagctgtaccaaacaggcccttccattgatctgcgcctgaagctgctctttgtgcatatccttgagcacctgcctcttgctttttgcccaggactacctttgtgtgatccgcaggtgcttcggcttccatgccaaaggttcatctaggacacagtataccaagtaattactaaaaacatccatgggctcgacatcagttaaaaggatactatgaagtagaagaaattatatgttttgtttgtatttccatgatctctgtgtcactaatgagaacaaggctgctaatatagaataatttaatcaagatggaaaactgtatatgtacaattttaaaaggtacatatagttacatggttgaagaaaaaacaatataacattgtcatgtgattaccctttttatatcctgtttcatatttttgtgtctacacttctgatatttgttcttttagtatgtataccaaaccatgttttttgttttggtgctgtacaggacaggttcaattatttggttttcctattagtcctgcacaatgtttcacagcacattggtgtgggcaattttggtagccttgccttctaatctttctctggagtaggagtactgttgcagcttgagtaatagttgaacaatgttttttctgacatcttgtgagctagggatcatatttaatagacaaacaatattaaaggtttaataagtactaagtacctcaaggtaccaaaaattttagtgtaaaatttagataccttaaggtgctttcttctctatgctaataggttgaatcatcaatcaaacattcaaaagtaacatgttgcattgcattgcataccttattttgcttgattactgtctttcctgttgccgcttgcccagatggccggaccgccagatgctcacaagccaggggcagcctgccagggatacagcccctcatggaagcacaggcactgcagcatgttgatcatattagaattgccaatgtacagaattgcccccctgggactcacccctcgtctctcctcagctgcccaagaagacttagcagtagtgcagaatatcatccaacaactggagctctcagatggtatggatcagcggatctactccccaaatggccattcagagatcttgtcctccagctccctatatcaattcctttcctcctccgatctacctaactgtgccaactgggatttcatctggaacaatgcagctccgccaagagtgcagttcttcacctggctcatgggaaaaaacaggctgcccacatgtgcaaacctctacaagaaaacaatattgtcaactgctacatgcgagctgtgcctctgctaggatgaagacgaagatcacctcttcttacactgtccttttgcttcaactttctggtctgcggtccgaattcaaccaaatatcccctcagcacaactcttatttcagctcaagccgcctccgataatcccaatggtagaattcaagtgcttctacctcctttgcttttggtgtttgtggaatcaccggcacgatgtggtattcagaaaagaacccccctccctccagcggatccttcgccgatgtattcaagatgcgtccctctggtcagaacgaatgaaaagcgatgtatgtcccatagtttcacagtggaagcgttgcttcgcttctgccctttcatccctgtaactgcttttattcttcttactcccatgtaactttaacaatccctttcaatgaaaattcaggtggggaaactctcccccctggtgaaaattaaaaaaaaaaagaaggatggggcgctactaagtaaaccagactagaggaagtcagtttctttcaatgatacaggcaaacagtaaaccagttctttacaaagcacatgatttttgaaacacatcaggtcatctatctgaacatttctgaagattacaacatccgtatgcacattctcatagccataaagatttttcactgcacatgtatcaaacaattcaagagaacagatgactggacagattgattatgaagctaagaacctttgaaaagagagtgtgtgtcatactgtcctgtgcaccgtgaaacatgaaaactaacaacagtaaagcttatattataaacttaagcataatctagagaagtggatcgaaattaagcaaaaacgagtcggctataacctactgcatttgctacctttcaatcccatctatgtgatttcatcgaaaatccaccataatcaacttaaacttcctgtaatttcagccataaaggtcagaactttctaaggctgtacaaaatttaataattcatacatttcctgactatgtgattcccagttaccccctcaaattgaatacagcaagcacacccgagacgagggtttacgattcgcgaacctgttgtcacttctaggcctgatgcctctggagcgtcggttgctgttgaacgcgattccggcgatgcacattgcacgcgcctccagtcttggccgtcatccggccgccgaccgccctccatcttcggcatcatccgaccactcctgcccgccgccacgacggcgagcaatggcgtggtggagagcgggatctcaggcggcgccgctgttgaggacggaagaaggcaggagactccggcgagggaacgagggatcaaatcaatgtagctggcggcgggaggggtctttactcgtaaaacctagtcaaataccccatctgactaaaatcccagctggctgcctctcaattcagtgcaactaacagctcccatctcgaagaaaattacaagtgactcaaggacctatttgtttcagattaagattattataatctaaattataaaattagattattataaactgtattataataagacaatataaaataagctgctagctatttgtttctctatattattatctgtttgttagttgttagccacccaataatctaaaaaagcacctttatagtaatctagcttatagattataataatctaaagctatctgtttgtttcagtttactcctaataatctagattataataatcctaagttgaatcaaacagtaccctagtccttcctatatcaaaaagacttcgctccctatctgacgcgtgtataacaccaatctcaatgcaagtacttcatctccttcgtctggccaaattttcctctctcctcttctacgaggttgccgccaaagctccacgggggactgtccgccatgaatccctcttcttacgattaatggatcattgggctatacatcttggattgcatttgattcgatttgatttgaaggggaatcaatctgggcatttgattcgattcgatttgggccatgaagttcgctgacgagggacggttcttgaacggcataacctgcttatcaacaaccagaagcccaaaagccaaggccactgagttggcttgtacaccggccggcggccgtgctttccatctcaaagcacagcaattaattggctggttcaatcttatgccatggacatgatcaattgcaagaactaagagctggatctgctggaaatcgaggacgacactgtggcgcacaagattgattcccacagaacttccacagccacgtgcaatgtgcttatctaagccgactgcgcggcgcgttggggttgcctgtgcatcgccccggccagagcacgccggcttgccgctgttccctggcttagcagccaagagcgagaaatttagcctgagagtctgagacgaaaggagtcggaggttggctgcttgtgttatacacgtgtcatatagagaagcaaagtctttctaatctcggaaggacctaggtcctacctaattttcttccatctcgtcttgtaccgttggacctgagatatccaaaatgcaaaagctttgaaagtttgagtccatattccacgagttacctaccatagtgataccgatagtgataactgatatctcccgctgataagtccaggtaccttcactcgattacttctttctgacatggatcactgatatgctgggcgggcccagatgatccaatacgtcagagacctacactaaaggagggaaagtaagtgagagaaactcaccttcaatgcacaaaaacctaaagccaggctaaaaaacccaaagctaaggttttctcccaatataagccacaattcggtgctcttcttcactttcttcactggagacgattctgcgatcccatcggctcctacaacttcctcaagtcaggtatggcatcaacattgtgatcttctcttacgcctcgcgctgccgcctccgctgagccgatcgggcgccattcccgtagtagctctgttgttattatgggacaggctataagggttgggatattttgcgcctcgatccgtgtcaagtgggaggccattatcttcctcgtcatcctggagtttggcttccgaaactggcaccgcaggccaacgcctctgcttgatcacggcagagacaacggaaacaacctcctcctcctcctcctccttggtgttattgtcgaggtaaacttagctttccctccttattcttggcaccaaatgcatagcccccaatccaaactgatgcctaatttcatgttacttctccagatctgagaccctctattatcatagcaatataagacaaagctctgttgttcgaatacttctttctcaacaagctgcaggaaatatcctgatcatcagcatcgtagatcctccacacccacttataagtaatgcctcattagtgttgatgatgcccaaacatccaaattccttatccttaggtcatcataacatgtcatctgcaatgagaaattacccctttatcagacctccttgtttagctttatccatcatataagcaagacaatctgcagccaaatcaaacaacagcaggaattagcacccccatttcaaacccctattatccccccgcctccctctcgctgatgttgatacaaaagttcccctgctgatagttttcattacccattatctcactcttctagcaaatcttttcctgcacagtggttcctccacattaatcatctccatgtccatgaactcagtgtgcttcttttgatttcctaaacatctgggttgcattccgacagatagttcggggggtgttgctccagcgaggcaggaaacccgtggcatttgccagcgcaatctatactaggtccatttcgcggaatacatcccgattggtgttggagcagcccatcgttccagtgacgcagcaggagaggtgcgaagcttatctgggccggcccatggggcagacagcgccaggtatcgccattgcagtatgcctgttagcctgtatactccctccctttctttcttttttttctttttcttttgtctcttccgtctttaacatcagcacgtactacttaagttgctctcatcaagtcagtttttctttccaaatctatattacctcctttccaaaatatagtaatgtagaatcagatgtaacatatgctaattcaaatgaacaaaaacaaactgtaaaataggataacagataacccatttcgcttttttttttgggctggcacgatatcaccccttaaaggaataagttcatttaacttgtcaacgaatccgattttcgtccctcaacctgaaaaccagacacaacgagtctctcaactatcaaaaccagtgcagattaggtccctcggcggttttggctgacgtggcgcctacgtggctaatttgactcggtcttcatctgacgtggcattgacgtggcgcttatgtggcaattcaattcgaaaaaataataaaaccagtgggacccacatgtcagtctcacatagaaaataataaaaaatgtgggacccacgtgggacccgcatgtcagtctcacacataaaataataaaaaaaaatagtgggacccacgtgggccccacatgtcagtccaactcaccctcctctctccccatctcccctcttcatctatctctcctctcctctctcccggcgacggagaggcagcggcacgcggtggccggctgccggcgggagaggagggagcggcacagccaggcgcggcgtacggaggcagtttggcgcggcgacgtggcaccggcaatgaaggggaggaaggcgaagggagctccatgggcggcggtgggtttggggaagggctggcggcggcggggagctcggtggtggcggggatggaggtgagatcagcgcggggtggaacggagaggtcggcgcggcgtcaacagcatcggccgggcgcggtggctcggcagtgcgcggccaggaagtggcgtatgggggaggaatcgggggcggcgccgggcagaggagggacggaaggggagcttcacggggcggcggtggattggaaggccggcgcagcgg

SEQ ID NO: 6939 - DNA, 18429 bp, Oryza sativa
tggctgctgcctagatcatgtggatgccccagtattagtttataagtatggtgacataggcttgcatgatgctcttttcggtaacgcgtggcagcagtttgattgtcctttctcttgcgaaatacgtctagagattgcagttggtgctgcagaaggccttgctcacctgcactcacttaatgtggttcacggcgatgtcagaactgccaatgtagtactggatgtttattctaaatctaagctcgaaatgcctgggataactgcatttatggcaaagattgcaggttatggaacacaaaggctcctttccttggataaggccaagcatgaaatatttctaacagagaacatccattacaaggatccacacttcctcaagactgggctcatggctaaggaatatgatgtatatggttttggcgtggttcttgtggagctcttcgcacagaacatggtgcaaatgcatgacgtaaacatggtgctcaaagaacttgatggcattcctgctagatgccatcatcttaaggaaattaagaaacttgcttcttggtgtcttgcatccaaggtgacggagaggccagcaatggacaaggtagtacgatgccttcgagctgtcttgacaaacctgcaaaatcttcatgatccctgcaactgcaagtcaatgtataataagtctgcgatgcagtccgagcaaattaccagtgccaagtctgccagtagctgatagctccacaattgtgatataggaagttaatacaagttcccaattaatgtgacctaaatgtaatattaatatatattggtatatatgtgtttgtagaactatttgctggtcaaatatagggcaaagccataaacagtaataatatttcttgctggattttctgctgggatccagcgattggagagacagaaaatgtactgttagtagtagagatggcaataatgacaacacaaacccttctaattgtgtttccagcagatatccagatcttaagatgctgtttatatatgtgtaacattatccaattttacaataaccctcgtgatcgacaatacgggggttaaattcatctcactagagcttttttggttgttttgttgtttgttctgaggtttggttgttgcatgtttgcggaattgcatgcgccacagatagcaagtagcaaccgctgtatttagttctactagttagcgtgcacgtgcaaggcacatcgaattatatctaatggagtacaccatgttggttttttacactaacaatgaagaggagaaatatcaattcaaaaaaaacacattgcttgaaccaatcgagatacaatttatgttgtcaatcatgttcgaagaacgtgcggaagcattaggaacacagagccacctaggagtgttcaaccctagcacatgtggtggttagtgggggtgtggcgtcacaacgctccatatttaaggttagaggacttttacggtacattctacttcaagtattcaagtatatactgttagtatataatagggtaggttcggtatttgttaaaaatctgaaaagggttgtttagtcatttaaaatagagattattttggtttttttaatcatgaatagtgataaactttcccgtggttttttttctgttgtggatatcgtcatccgcgtgtagcgcttcttttcatttcatccggcgtccccggcgacggaagctcccggcgcacctcgctcccgccccggcccagcgcctccatcccgatattacctccggcgccgggagaagccgatcttccatgcgcccggcgtcttccgccgttccgcatccccggtgccttgtctctagccctagcctgttctcccccttatccgacctcccacagcttctgtcttccccaaaccacggcggcgagggttgatggttttggagtctaaacatggtttatatcgtataaagttcgaaacgatgttaatggttttggagtctgaacattcttctttcacggccttctctggaagactggaacgtgggagttgaatggatagtagtcacagaactgttcatacattagttatattggcatataaccatgctaattatacattagttatgctaattatgccgccctgccgctgccacctgccgccgccgggctgcccttgccgctgcgagctgccgcagctgcacgccttcttcccggcgcccttctgtagctccgcctgcccgccgcctcccgcagacagggcgtatgtcattgaactccgagttgaggatggtgtcgaactcaacgacgaagaggtggttggtcgcgttaacgtcgccatgccatcaaagctgagattcgcgccagtgaacccgttgaagacgaactgctcgtggccaccgcctttcgcagcccgccggcgccgcctcccgcaaacctgacgaattggggattttcggaagaactaggttttgggtgaggaaagggggagggaaattgaatcgattcccgatggcagcgacgccggttgtggttgtcgacggcggtgcggcgcggcgtgctcgcagaggcagtcagcgacagtggtcgcccacgcgcggcttcgagaaaaattcgctttgcctgtgcacctaaggccagatctgactaagtgagaaacacgaatttacaaaattacccccacgcaaatagataaaaaagacaaatatgccccattcaatttatactgcagaataattgggagaaagatcagatgttattttctccgttagatcaaatatattggtagtatatacttcaagtagaatgtatcttaaaagtcctctaacggcttgtttggttggagggagttttgaataaggaaatgggagtttaggagattgagctttttaatctctagtttgattagaggacttgggaattttagagggactggcatagagaattaatctatccaactcccaccgatcccatccctggggacctgttaattcacgagacttggtgggaattaaacagcagaagtccgaaatacccctctcccgcacactccgccgtccattgccgcgaaaaggaataaaaacgcgcgaaaaatcctgttcactgccgcgaggaggagtaaaaacgcgcgaaaaatccccatctcagcgccactttcctcgcccactccgttggccaccacgagaagcaataaatcctgtgaaatatcaccagcgattctccccattcacacgcgaaaccacagccaaggttaggttctgacgcaagtttgttgtgttcttgaaaactctccctctttctccctctctcctgtacagatcgagaccacagcctcatgaggtctggattctctctttccccatctttctgcagtacatgactgagaaatttgtgtctttctcctgtacagatcgatggaagcagctttgtaaggggaaaaggtggggggggggggggaaaaggtggttctgatctgctgttcgtacttctacgtctgttgttgctcaaggctgatttttttgtagttttgctctgcagtttatcacaccaaaagctgtaggtactgatgttattctgttctctatttttttttcatcagtcgattgccttgtttgattttccaagacagatcaatcagatttggtattttagtattaatggtagtaggcattttcccagtgtatagagtagacctgttcttaatttttttttcatcagtcgattgcctttatagattttccaatatagatcaattcgatttcatattttagtattaatggtagtaggcatttaatctgctatagaatgacacatagtgtattcgtcaatttcatacgtgatacatacagaatggagggggatatgatcagtatcaaaattcatcatgggggatctttttcaaaggagggtcaactttgctatgttggaggccaagtctctatttttcgcaattgtgacagcgaaaggatgtcatacttttgtctagtagacatggctaaagatgtaggtttcaagggtggagatgaactattctatgctatccctggttatagtcttgaaaatggaatcgacaaacttcatgatgatcattcagttcgtaaaatgttgaattttgcaaagaaaggcaagtcaatggaaatttatattaagcatcttgaataaggtgtaagtgctactccaatatttggacaggatgttgaagataatcatgtggaggaggtactgtacttagaaacaacttttcttttccttccgtattttttttctgatgtgctgacgtgtgatactgtgtcatttcgctatgtttttttttgttgtttgtgctgcttgtgcattttttttcctcatgagcatggtaccttgataaagtatagttagtacttgatcttgacctatttaaaatcctaataaatttgcaatataattttgttgacagacatggctcgccctccaaccaatcgagatattgtaatcttttggaacagaatgagaacacgtagagtgaaaatagtgatgacattgtatttattgatccatagcggactgtggagactaactgtggtgttgttcaaggccaccagcatcattgaggcccctggactggcagcggcagcgagaggtctcagcggcctagggtcgagtgaggattgatgtgcatagatgtaaatccaaacgatatcgtttcaatgacaatgtgagaataaaaaataaaataaatagaatatatagattatttgacaaagcagagataaccgttctttcgtttacaactatgccgtaggttgccttcaatatgaaataatcattctagtgctgcgctgttttaaagctaaacaggttgaatagagaattgacaagcataacaagtcataatagtgtcagtaatcagttacaaaaattgtcatatatcatgaactgaacatacaggaagcaaacacattctgtcagttagaaaaaaatgaaaagttatcaaaaaaactttcattgattttcagcctacaaatcataagaactctcattgattttagcgattccagttttcaattgtttcaatcgatctctagatcttgatggtactaacaacccattcaatataacttgattgtttctaggaagggatgatcatggacgtaagtaatacatacacttgattgtgaatcaatgagagtttcttttgttgaacgactgaaaaatttctactgcacttttgagtgaaatgatggcgaaaagaacacagtgaaatcaagaacggcctgctgctcaccgagtcaaggaggatgttggatgccttgaagacgctagatgaccggtgtgtcggcgtagtgaaggaaggcgagccccttcaccgcaccaatggcagtctacatcctcctcatccatggtacaggactatcgagaccttcacacaattacagttcaggtcagcttctacaagtctttccggaattgacacagaggtggtggtgacaaactgacggtgaaggtagcttttgtagcgtgaggttcagaatgaataaatgacattgcagactattaatatactgatggaaaacattgcaagatgtgtctagacaatgaactcaggagataacgataaactccagagcaaaacatggctgtccaaggttatgaaagattacaacgtagcccatattaatttggtaaatgttcagaattaggattataaatttagatacgttatatgaactataatccattgttttccataacagaacaaagatacaagtccaacgtagcccatattaatttggtaaatgttcagaattaggattataaatttagatacattatatgaactataatccattgttttccataacaatacagtaattcacaatccaaaatgcagattcaagtttagtttatggactgaaaaaaataatgtatgacaaggttcagaatcatttaatcaataataaatactgtcaaattttcaaaataatcaattcacgttcagtttcatcaaaacagtacatgtaaaaatgcaacattcaaataatgctgtacaagcatcaattgcatcgttccctcggcctctgccaagtgccaagtgaccaacatggctaaagagatcaatcatacagcattaatgtttcattgttggcctgataccgtaatgatacaacatgaaatattcatgaagtgaaaaatttctcaaaggtataaaataaaaaggaatttagtccatctaaaggcactcttagttttatatgcagagcatgctcaaaaccaggaatgacatggcaagctcgatgtttacataaaaatctctagaaagtttagaatgcgaatatacttaaacaaacttcaaagttttaataccaaaatatattaaatgaagggattttgtgaatctaaaggaaaaggtatcatcaagcagagtagcaagtcatatatatgggattagcatcatttacctctctcctgaaccccagttgttctcttatttgctgctggaccaatgcattccattcattccagttattgcatcaacttctgctacaggatcactaacaaatttcacaattccataaacctattaacacacccttaactgaaaggcaatggaccctaaatgcctcttgtagcatgtagtctgcaatatctgcagccagatcccaactacaatggcccaattcaatcgaaagaccatctcaacattcagcatcatttgtgcagtgtccactatatgtctgatgaagaacttgatcagcagctgcctgcaacgcttgtaatctcaacaaagtcataaccctgaagttgtccactttgtttatcccagataagcttcacagattgaacctgcaaatcaatgcaaacatcacaatatggtcaggcaaaaacacaaagttgacagcagtagttgttgtcattcatccattatcactggagcaaaaaaaccaagtcacatatagcagctatgtaactgttatatggtctgcaaacttttttttttttttgaacggaaaaaacagcacagtagtgctttttcattgaatatagaaggagaaaatacaacccctaggggtaaaacaaaaagatctttagactatacactatacagagtgcgggatgagctcgcgcaatcttttagccccagctaaagcccacaagctggcctcctctttgatttttgctaggagaacacctgtctgcaaacttagcacccatgtggaaacatgtggaaacaatagataagtagaaacaatcaaacaaaaccttccaaagcccataaattagaggaagtaacctgttcatatttcatgggcacagctctagaaaaaaataatcagagatcagattgaacaaatatctgctgctgctaacaggtcaacatctatctagccaaaagcaaaagggttgcaataaagttaagtggaacctgtatcataaagattatttattcttcgttaagcaaaatataaaatgcaactattgaattgcagtgtgataagacactgcgcatgttatgaataaattagactttgtacacctttgcaatcagtattattatgatcaaatcctttccaaattgctctaaaaaaattgtatctcatcagtattgctccgatagaaatatatttccaatcagcattgctcctatcaaaattaattgagatacatgccctgaaaaagtatataatcacatccaaagtttaattacaacgataatataatcatgtgtttgcagaaacctcaaaaatatggattatacataaattgagctgtaagaagcatgcatgaactaaaagtaaaaatatagttagaatatgtatgcctattgcaaactaaaatgcaatcttaaaaataaaatcatgtttaccttgaagccaatgtcacatggattgaaattcaatctttaagctcaaaatagggtggtaggctgaggcgaggagatgattgacctaaatacctacaggcgcacaactcaaataactcccaccttagtacctgataatatcactggcttatttggagcagcacacatctgttctacttcctccgtttcacaatgtaagtcattctaacattttccacattcatattaatgttaataaatctagatagatatatatgtctagattcattatcattaatatgaatgtgagaaatgctagaatgacttacattatgaaacggagggagtaacttctaaatcaccttgcggtggctgtcattaatcaacccagtaatattaccctccactttaagtgtttacttccagaggctcacatgaagtagtcacattcaaaaataaatataaacattacttaactgaacctaacaaacacgttcacatattttactgttcaccaaaagaaaatgcaattattttgcctggtgatgttacaaagagtgcagaagacaaggaaaaatctgaaactaaataagcaaatatctgctactgctactaacatgtgacatcaattcactcaaaaggaaaagattagacattaagtgggattggaaatttttactacatgtgttcgtaacgatttaaatgccaatactaaaaattaaactttgatgaaaaaactttaaaattaagttttaaaatttaaattttggcagcggctgattttgtatagaggaaacgaggggagagtgttcggatcaccttttggttttacttttattgggacttgcatgttgttctggaactgaatttggcaagggcactaattgggtcagatatatgaacctgaaacaatgcacatgtgaattttcaaggctgaaaactcttaccttggtatattttgattccatggtataataatatgtgagaatgtaccaaaattagataaagcctttatctcagcatgacacgacaatgaatcaacagcttcgcagtcctggccgggagcaactcaatgagaccctgctcctacctacccgctggcagatttactgctccacaagcttcatactgcaggccaaacaattgtccggctggaactcaacataaattcacctttgtcttagacaggagcagcgagggagacgtgatccggatgagtttgcgtagggggggcagcgaggaatcgcggtggcggcgcagtggacaccggacatcgagggatcgacggcgaccggacagcaggagatccggtgccggcgcgaggctaatgcggggatcgacgatggccggactgcgtgggatcgacggcgaggtgcgatgcaaacacaagggcgaagcggctcgacggagactagatgacgatatatcgacggcgccctgacagcggggatccggcaacggcgcgaggcggcgagggaaaggcagcggggtggtgctgggaggatccaacacttcgtataagccgttggatgaatatatctaaggataaaaaaatatatataggtgtttgatgaagtcgtactttttgtgtgacaccttgaaaacctcaaatttgtaaaaatcaagtctaatttgatatatattaacaaataggtagaaccgagtctaatttgatcaattagcataggatttaggatttagttttagatttatttttcgagcctacttaagagtttatccgacggactttaatttgaaaaatgtgagccatattgtttgatcaaatttacttttggcccaggtcttcccaagcaggcccaaacttgggctggcccatcatcggcgagttgagtcaattcgacggcccttaagctgagcggctgagcacggcccacatatgcggggacggtccgatgcacttccgcggcccattgggcgcagcgtaatcaatagcagcgacggcccaacgctaggcaaatctgagccgtccaatctaatggacggctccaatcgtccccaaatccctctctcctgattccatttctctccggcgacgagcgccgagcggcctggacctcgtcggcggtaggggcgacgccaagccgacgcttcccgtcttcagcaaaggacggtggaggggtgcaccaggacagtgcgtgcgcagggacacgactgcgaggaggtgaaggtgcggcggtgccgcttcccggaaagctccggtgagctcaggggcttcaagtccgataagtaacccgaaccctcaggggcttcaagtccgataagtaacccgaaccctcagcttaattgatttggatttgactcttatggttattacctgaaattagggttcttcgaattcagagaattttgtcgagaaatttcaatatattttattcccccttttcgagttaggagagtttcattatcgtttatcctcttttaattttaggaacttcaatcaagtttatccctttgctcaattttgttttttttttctttggctggcgtttcatcgcgcggatggggacggagggcgccgctcgtccccttggaaagattgagattaagataagattttcacggacaacggaagtaaattgaatcgatctttttttttgttttaatgtttttttcgctattttttcgttattacggacaacggaaacatttttaattttttttaagtagtagagatagagaagatagagatatatagtaccgtgtcaaatataataggattcgatttttttttttccgcgtcacatataattcttctttttttgaatccgacagatttgtttttttaattttttttttgctctttttttaccacgtccacgcggattcgtttttctctggccgatcttttttttcacctggtttttttcaccctttttttaggaatcggacatattccttttttatttctttcgccttttttttaccgtggaatgggattcgtttttcttttcccttttttcgcccgttttttgatcggacattcttttctttttttcgcccggttttttttcattcggtttttttcccgttttgttttggatctgacagatttttttcgcctggttttattgacggacgatggaagcacctcttattttttaatttatatatatatataagtagtagagatagagaagatagagatatatagtaccgtgtcaaatataatatgattcgatttttttttaccgcgtcacatataatttttttttattccgacagatttgtttttttaattttttttgctctttttttaccacgtccacgcggattcgtttttttctcgccgatcttttttgtcacctgtttttttttcgcccgttttttaggaatcggacagattccttttttatttctttcgccttttttttaccgtggaatcggattccttttttttttccctttttttttgccccttttttgatcggacgttcttttcttttttttcccccttttttgatcggacgttcttttctttttatgcccggttattttcgttcggtttttttcccgttttgttttggatcggacagattttttttcgcccggtttttttcgacagacgacagaagcaactcttattttttaagtagtagagaatagagattaatatcaatataaaaaaaactacatactacatctcatccatttggcatagacccaaactgattcgatgtaagctgcataaatcatctattcaccgatttcactcgtttgacaggtgccaaattctggtgcctggaatatgatgcagagaagtgtgctcactgctctgttttatcgtcaaggtaggtagcaagttattaaatctgtcaaatcccctttgaacattatatgaatatagtatatcaagttatcaaatgtacattacatcaaaattgttagtggagaaaaaaatacagcagggctggtctgctagcagtaacaggtaactgggtcctcttatttgtcaaaaaaaaaaaaaactcctaatattgccgtgtcacaggtatagcggttcttttccactggatctttcattagaaaatcaaacaatcctaggacaagttgattgaaaagatttatgggtaccgcacgatgcctctagtagtctagtagttaattggttagatgcgaccaacgtgcacaggtttctataactttcagcttatatggtttcatttcacatgttgtaaagaactactttcagattctttggagatatcgaaatacatttatcaataaaaatgttacttatgtgtatcctcttgaactcccatggtatgattcctcctctccacagaccactttaccattgtacacctaacatagtaagttgattagaaaatacacccatgactgtacattgatgtgatttgctaaattgttctcagcaaacctgtagcaccaaaataatttccagatgtgaatgtttgattggatcgcttgaacgttcaaactttagctattagggaaaaaaagattgctttaaaattcaaactttagctatgacaaaaaagaataaactgaaatagatggggttggcaattttttcttattagccaattaaaaccttataattgacaacatgctggagaacaagccagattaactaaaagtaaaagtagcacagtagtatcagattcagaaatgccacacaatcatgtcttggttgctcctttgatgtgaataaatcaaacgttgagaacaacaggaaaatattatggtccccttaatcaagatcaaccactcatcccccctaatcaaacgccatacaccaccaacagcaggtaaaatttggttagagaagaggaggaaacaggaggggaaccaccacacctggactcctagagacgagaaaatggacatttcgccatgttcaaaacgcggtttcgctagaatgccatctcaaaaacatgattcgataaaatgccaatatagagcgtgcgtctaccgccactttgccatttttgccattttattcattttcgaaaagattttctctcctctactaggtgatgagacaaaattgccccttatcaactcagagaacacggtgaaagatgagacagaataggcaaggagacagagagaaggggcggcgacgccgttgctgcccacaactactctaccggccggtgcgccacctctccccattcctcaacctcgccgctccccgccacaccccacgccgccaccacctgtgctcgccgccaactgaacagccaccccgccgacaactgccaccaactgtcatcgtcgtcggtcgcgccgggacctgcggcagcggcggcgaggaccgcatcagcaacctcccggacgaccagttgtgtctcgtcctacgctggctcgacacccacactgcggtcgccacgggggcgcttctcttttcttctcctcttcccctcggtttctcttcctgttccccttttctctcttccttcttagctagcgaggaggcgcagctggtgcagtggcgaggctgggtgcggcggcacggccgacgacccgaccaaggcgatggcggttggcccagcgcggcggcggcctaagggcggccaggcggcgtcgggtggatggggagagaaggccggtgcggcgaggaggtgccggggcggcaccggttagaggaggcagaggtggaggtgctgggtggtcacggaggcagaggcggcgcgcaaggaggcggtgctccacacggcgcggcggtgtcccagcgcccatgaagacggccatgggggcgctcgcgttgctcggccggcaagctcggtcttgccccatctcacaccaccgtcgacgccctcgtcagcaacggtgaccacctcgccatgctcgatctcgatcccctttcaaccgacaaggaggggcaatttagtctcatcaagccgaattccagtgaaaatggatttgaaaatgacaaaaatggagaaaatggtaaagtgactgtgatcacgcgcttcatattggcattttagcgaaacatgttttcggaatagcattccggcgaaatcgctttttgaaagtggccaaatgtccatttctccctggagacggcaaggtcatccattgtgtagatgaagtcaaagccctggatcttctatcggtcggcactgtcaccacgaggagagcgggcggggccatgggggcgtccaagcagcgcaccgccactgctgcccttgcgttcacgcgaatcaccagcacctcctacacccgatgcagcggcgcgcaccgtgggagtcgagctcaatggcggtgcttgaggtgccgaggggtggccctggttcctcctcctgatgcgacgcgcaacgtgggggtggctgcgactgcagctgtgcaccgaaaccggtcctctccaccgtcggctcggctgcctccctaagcagtccgtcgccacgtttttcctgatgtccgccatcgccggagctccatccctccgtggctgtcaacgaatgtggctggacacggtcacagagaaggggaaccgaagatgggaggccgccctgggatgggagtggtgggaggacgggatttagggggtggatggagacgggaggtgaggcggtggatcggcggcgagggtgaggtggcgtgggagggcgaggtcgggcacgacgattggggcgaacacgtgatggacgaggagcgggagtgcgggcacgatgacgttctggcgggggagatcgtcggcaacgtgtgaaacgacgagagggagagaggattagggtggcgtggaggtggaggagacgcagggcggggtggtggggttgagatctgagcgaagggcgtggggcggtgggcggaggagcgaggccatgaggggcgtgaagggatcgatgtggagcactggatgtcgcgatcgtatcattaatatcacgcgtgtctatcacgttagtgtcaccaataccattataaattttttaagtagtaataactaatatctctatttctatctctatctctatctctactactccctccgtctacttttaataggcatatttcatcttagcacaatgaccaagaataagtaattctacttatcatccatttaaacatgctactctctccgtctacttttgatagacatatttctaaatctaaaaaaaatatttttgatagacatatttcaattgaaccacttatcatcttaatgactttctcggatttaatgcgtgaatctccattcttccacacaagattggctacatgggcatcgagaaatataaatattaatgaattgttttttttacgaggaataactaatgacatgtttaaatggatgataagtagaattacttacccttgttcattgtgccaagataaaatatgtctatcaaaagtagacggagggagtactagttatttctcgtaaacaaacgattcattaatatttacacgatgcccatgtagccaatcttgcatggaagaatggagagtcacgcattaaatccgagaaagtccttaagagtatatgtggttggattcaaatatgcctatcaaaaataatttttttaatttagaaatatgcatatcaaaagtaaacggagggagtagcatctataggaatggtaatgggtcaaggtccctgagttcttccacaatcttatcttatctaattctagatcaaatatatatatatatatagaataagtatgtaattggcctaaggaagctgcagtatttttttaaaaaaaagagagatgctttgagttgactggccacgaaccccccggcgtctcccaaccaccgcgtacgccctacttctttgtccccctactctttctcccatctgcactactctcttctactaccttgttgttgcagcttgatttttgatgtattagcagttttacatgatgacggaagagcgagatcatgttaatttctttagagaactagatcatgctattttttacatgatggaatggcgcattacaatgattaagataagatgtaccacaggcgcatggaaattcgcacaatcactgcaggtcgccagggttcgatttcagttcaatttccccaccatttggttttgcgaaaacacgatagagtacaatgtccaatgtggatgcgtctggagctttaggaaacgctcagtcttgaggttaactgattgttgaaatttgaaagagaactgatgctatttcgaagactacataataaagccatacatgcaccagtctttagtggagtattaatgtattattattcatagcacaacgacaatcttctccaaacttgttagttgttactactaacagatagcatcttaattcattattcagaactagcacattgaggagactcccggggtctacccaattcccttttttcagagctagcacatcaaaattcaaggaaggaaaagataaatctgagagcatttttacggtctttgaggaggtaccactttttctactgtaaatttggtatctcatagtacctaggtaccaaattttatactaaatttttggtacctcatgatacctcctcaaggatcataaaattgttctaaatctgaaatccgtgccccaaatctctttttttttctaagaactactccagcacatcaaaattgaaggaaaagaaaaatctgaaatccctctctttacatcagaaacctttctagcataacaatgcgaatggatgaaaacaactatgcactgtcccattagcatgccgaacactccaccaaaaagaacttgttatcaaatactccctctgtcccaaaatgttttgacgccattgacttttttaatcatgtttgaccgttcgtcttattcaaaaaatttaagtattttttaattcttttcctattatttgattcattgtaaaatatacttttatgtatacatatagttttatatattttataaaattttttgaataagacgaacggtcaaacatatttaaaaaagtcaacggcgttaaatatttagggacggagggagtcctagttcctttcagttcagcagtatagagcactagtacgcttgtgagtaactataatcaatttgggggttccatcctccaaaccgttaccctccaagtattatcttttgattcaggagtccagcagattcaggttccactgctctgtttctgtgatgatcaatcagattttgcacctccctttgcgtatttttccttcatcttgatgtccagtgctgtttcgggaccgttctcgcatgttttctaaagcaagaaaatttggtttacaagaacatgaaaaatatttgccatgtgcatacgtataattattgggagaataatgaaaaagggtactacaatcctaaaacagaggccaactgtgagaggaatgtttatgcatataaagccatcattctttcatatataaggaattttttagatgtgtactgccataaataatttctaacgtatatatttttgtgacaacatgctaagattagctatcttgcgacatttgtttcttcaaattaacattgaattgttgttgttatcttaattttcagtaaaattaagataagctgtagattgtacacatgacttcctcagaaaagtattccatgcattttattggctttgcacattataaagtacagactaataataaatacagtgctttgaataatgcaccatcttcacgaattttcaggcacaaatataaccacatcttctgtgtcactgatatgggagattggtatgataaactttcacaatcttttagggatactgcaaaggaagtattggcaaagacagatattgatccaaatgttaggtgcttcccaaaaagacagatgaagcgcatcaccaacaactacagcactaccctgggaagaggagggttttctgtggtgtacaagggtaggctcgacgatggtcgttcagtggcagtgaaacaatataattggagaacacagaaggagttcacaaaagaggtgatcatacagtctcagtgtagccataagaacattgttaggctattgggctgttgtgtagaggccgctgctccgatattggtcaccgagtttgtccccaacggaaacctttctgaccttctacacggcaacagtggactgcttcctgtcacattagagacacgcttacagattgcgctggatgtagcagaagcacttgtatatatgcattgctcccaaagttatccaatccttcatggagatgtcaaaccgtcaaacattcttctgggtgacaagggtgtagcgaaactgtgtgactttggaatatcaaggctgctctctatggatagtgatgaatacacaggatttgttatcggaagtaaaggttatgtggatcctgttttctgccagactgggcgattaagccaaaaatgcgatgtctacagcttttgggtggttcttttagaactcttcaccagaaagaaaggaattgatgacatgaaagtgtgtcttgcagaaatttttgcttgttccagtagaaaaggtgatgaacataaactatttgacatggacattgtaaccaatgagaatatggagtttcttcaaggaattggcagggtcgcactcgaatgtataaagtttgaagtagaggagcggccagaaatgaggctagttttagagcagcttttgagtctcaaaagatcccgagataagagcattcatgagatgcaggttgtacgtaaa

SEQ ID NO: 6940 - DNA, 30835 bp, Oryza sativa
tcaccgctgttgccatcagcgccttgagccccgcccgcgccgcgcactgtcgccgttgcgccgcgttgtcccgccgccgcacgtcgccgtcgccccgagccccacgccgccgcgccgtcccgtcgtcgtttaaagccggccacccctccccgcgcctatataagcccctccccggctacccattgctccccacactacccccaccacctcccctcccttttccctctctttcccatccccggcggacgcctcgttggaagcagccgccgccgccgctgagccgacgcgccccgccgccgcgatgtacctcgtcgccgcgccgtgctccgccgtcgacctcgccgccgcgtctccgtcgaccccgccgccgaaccggtgagcctccccctcccccactgcttgccgtcgcgccgtgccgcccgccggttctagccgaggccgagagagagaggagaaagcagagagaagagagagaaaagagaatggaggagagaggttagagtgggccccacctgtcattaattccatccaatttcccttagaaaaataattctgtagaaaagaaaatcaagaccttgaccccacctgtcagtcactatagcttgtggataaggttgtattataaataaatgaattaggaacagtgccttttttacaatttctcggatttattcaaatttgaatctttacactagcataacttattcattttagttccgatttgagtgaaacttgaacctaaattcatctaaattcataagctttccaatgatatataattcactatttgataaaatatatttataaatattaaataattaatatcaagatgatgcataatagtcaacttaaaaatatgttaataaataaaattagtattgtacagtagagtagatgtaataatatttgtctctaacatgtcttccactgtaacaaccacacaaactaattttatgtgatgtctcaaatgaatggatgtataggaaaatactagtacttatttaatattcgatggccatataattaaatccatggcttataggttatttaaatcaagtgtagccttatgattatgtaactaaaatataaacacacatagatgaatctttaacctgtttaggagaataataatagagctagatgtggaggaatcactaagtaaattaatcgatgcaataccatatagaatagcatatatatgcctaaattgattaccacttattagtaacccaatagaaccagtgcttaaacttgtcgcatcacatatacaatatcactcatagaaactagctaatgtataattaaactacaatatattcaggaatcacttggagcattgggtagtacactttctaaataagctcatatacagtaggcgaccaaaaccttatacgttgttgcacacatatattgtacatcccattatagttatacaattaatttatctttttcatatattaaactagggagtatataacaaacatgaatagtagataagtactaattataaatcttgacctcatatgttcatagtttaattgtaactccggattgttcattaagagataatctgtaactataatattataaacttcccgaatttaacatatagagcatggacaattattagccctcttataatttataatggcaagtaaaatatgttcataattaaagtaaagcttccatcaataaaataataatacaaataattcgctgtaattgtttgattgatcctaaatccatctaacaacagaacctctagtatataaccgtcctatttagatagatgcatacatagccataatccttccatagccatttgatagactaaaccaccgattagccaaatatatatgtatcccataaatgctatgtttgttaactcctaaataggccacgatgacaatagaaagattaagaaactttagccttagcatgattgggatccattagcaaacacgaatagtacaatttgttgcgcatatttgattgttgtttgaatattggtttttctcgcgtattatagaccatgtgtatcggctagtcgtgaggcaacgtctgcaacttccaggaggtgaaggttgatcaagattatatcaataataaggattatcctaagcaaggcaagtcatcactattccttgaacatgttaatcccaattgcgaaattattttgtttataaataaaattgcatgcaatgatgaacatcctacttgtgattatgccatgccttgattattgtttgcccttattccttcgtaaccaggtttacgtatgagtccctagtcaattatgacaaatgcttagaaatgctattctagaatcatgcatactcatatttatcaaatgctatacgcttgggcaattacctttgggaaggtaattgagatgcggcatgtggagacatgagcgccacattgccatgatgttgatgacatgatttgtgaaaggagaaataaaattaaacaatttttttcgactggggcggacggaggatttgggtggtatctggaaaaggctagtaccatccccggtcaattaaggaccgagccatgaagttaagcatgaaacgacccccgtacaaccgcacttctcgtatgggtatagacctagcggagtagatagctgagcggaggcagtatccatgcgtagtggtcttcttttaggtgtgtgatacggcaagcagtctgctggcggatgcccggttcggatggcctggtggatggcggatgcccattccggatggtcagaggctggcttggcaatactacaagaggatacccataagagaacaatcatgatggactgggttcaacgacaagaaacaacgtaggaatgtgtgtgtttttcccttcccgggagcgccagaactcctctcactgctagaaacgtatgacgcctagagtgcatgagggctaaagttcatggagcgggtactgccaatgcgaggttatcgaaaagctttgccgtgacgtgtctcatgtgttgggacgaggcttatgtgttgggcagtcgcggagtgcgggtaaagtgtacatccactgcagtgtgagtaaaccaaatctattcgaatagccgtgctcgcggttattgagcaccgggacatgtattacacttggctagactctaaattcttaacttgtgtgggatgggatattgcatgatgaattttatgctgatggagccacttcctgagaggagggaaggtggacgtcctcagaaaaccatgacgactcaatggcgggaagctatccttgggattacaatggatggtggatagaaccgtcgttgtttaatgtgaacactggtattaaaacttgatcagtctatgctaggtcttaggcttgtgaaaagatttgcaaaacttgttttgcgcaaaggaacctgaagccattccttgaaataccctctatcatatgcatcgttgctgtggtggcttgctgagtacggttggtactcacccttgctattcatatatcttttaggagagtgttgaagagaagcccttgtcggtatgcttgcgtatccaacaagatgatcggaatgcggtgttgttctaggtctcgttccccagtcgactgcctgtggcatgttaaccgggcccttatattattttgtcttccgctgttgttctctgatagttgttggcctacctagccctaatgtaagtatttaactcttttagcatgaattcattcgtgatatgctgtgatccaactatgtatgtgtataccaactactgatccagggattggtacggataaacacagaagatttccgatttccaaaatcgggggtctacacattctcatctaattcatagagggttcatgaagcattacagttgttggagcaagcatgaagaacaagagccacatgatgttgtagctgatgaagtagatgtagggaataggctagatcgagatgacatgtttgtccattcttcatttggtatagataccataaattttgaccttaaaactctgtccgaaatgtttcgtgatattgaagacccatatcacgataagagagattttgaaaaattcagtaggttggtggcagattctgatgcacctttgtatcttgggtgcaaaccaaagcaaaccaacttatcatttgtgttggaactctgaagcttaaggaaagtaatggttggccaaacaagaatttcacaaaatcctctcgagttgttgaaggacttgttgctagaggagaacgaaaatcccacaaattgacacatgaagcaaagcgaatcttatgcccattgggtctagaggtcagaagaattcatacttgttagaacgattacatatgtattacaaatagtattacggcttctagatacgagcaagacataagtgaagatgaaggtcatcagttaaagaggagtggctccgtaaagatagtgtgatatcttccaattgctaaccgcatgaaaaaaaactgtttgtgaatcctaagcaagctaagttagtacattggcatgctgaggacagtaaaccgaggcattccagccaacttagtgtagtgaaggacaatcgataggttttaccccaaatttgcaaatgacccaagaaacattttattttagccaaagtaagaaagttgaggcgtcaatacattggtactttagagtgacttcagtgcttcaaagacgacctattcacagggagcaaacatttagaaaggacacaactacaccgagagtgctagctggatagtgctgaagagagacaccattctttccaaaaaaaaaaaagctactagtacactcaatatctatatatttttttcttcttagagaagtttctcttaaattactcatccgatttataatccgattacaccgttgtgttcgtaacaattaaatatttacaacaagaactcacatgattatattttgatgaaaaagcacaaattactttcatgatatgtctaaattacttctagatttcactaagttacttattaaacatataaaagtaaattcagtaaagcttaaaagtaatttacatatattataaaagtaacttataacaaaaagaaagtgactttaatttagaactatatctagattcattaacattaatataggcaatactaaaatgacttgcattatgaaacggggggagtaactctctatagtagaaataattatattgtgagtgagctgaaataagaaactatgtagagtgaattcgcaagtaaagtgtagagaagatttataaagtccacaaattatagaattaactaaaaacaataataaaaataatcaacttagagcattatgaatgtatagaagtaatttagtcaaatctgaaagtaacttatatatattataaaagtaacttagtatataataaaagtaatttacaaatataaatatttttttatcgtaatataatcatgtaagatcttgttgtgaagatttaattgtaacgaacataatagtgtaattgaattgtaaatcggataagtaatttgagagaaaactttataagaagaaagaaaaagacacacatgtctaagaggaaaaacagcacgcacatcagcatgtgtagcagtaattcttctcacaattgaatcgtcgctggttaaaactaaaccgagaggcttctcggtttagattttaccatttagaaagcttactagcacaccacaatcaaggttcacaaaaccgttttagatggagtttccaccacccccaccataaagcgtaataaaccatgtgggtaaccacacgactaccgtgaaaaccataaggttaccacaatttaaggttaccacatgtttaaggttaccacaaaattaaacatggattcaaaaactaaggttaccacatgtgatgatcgcgtggttttgtaaacgctggtgactcacaggatttccaaacgtaaccaatacggctcccaccgttcagtcaagagcctgcacctcaacaaaatgtcaccattcatgagcacgattacatgactacccaaatacccaacaaaacttaagccttcaatccagagaacaaataaaataggcacttgcaatctggtactaaacacatgaaaaacaatcgcagcagaacacaggccaaatatagtattatcaaaacatgtgacagaacatttgctctcacggttgtggaatcaaccacgcagaaaacccatcacgggtttaccagcatccagccagctccataaaatgacagctgatccaaaaaagaaaatcacgcgatctccatcaatgactacaagctctagcattcgttctttcaggcaagatcaccaaacatcatttctgtgaacctaaatatcaaaaactataaagaaagcatacataatgttcagataaatataatggccatgtgcgagagttctgaaagggctggccaccccccatctatacccctatacaaagccaatctgcaagcgttttcgtggtaccatggaggcaggcgatagcggctgcaccttagacttcacggcgccagccaatcctgaagtattgacatcgtaccactataagctccattttgtcttctatacaggtgaagcgatgtgggtagcgtcgtcagcatctctcagtgcacaagttgccacctcttgttgtcaagccccactgtgaactaccatgacaagaaagagatgtgttgcaatccttgtgctcctcagcaatggtcaatggtcgacagccatagccatcttgtacaaagcttgcctcaataaatatccatgtagtgctccaacatatgcttgtgcccaatacttgcaactgatgtctatgcaccatcgtttctgcattacagtgcagaaaggcacaaccaagctgctgtgggccaaggatacaacccatcaaacttccaaaacttaatgcggcttcagcaattatatcacaagctttcctgatcactggggaggaggttggagagactgcggttgggtgttgtaatgagcatatgactgagagtagagcgggttcatcatgggctgcaaaatatcatgttacctacacactccctgagaaagataaagttacaattaaacagataatgaaaaaggataaaccacctgagactgaagaccaggaccagccattccaaaatgcatctgtgatgactcatcttgtgaagagtcattgtatcccgcttgtgtaaacattccatgtgaaccatgggccatgtgatcctggataacactaaaaggttactcacagaacatacacataaagaaggcttgaaaaggcagttacttttcgtaatagttatgaccgagatagaacagacctgagagacaatgtcatttgctgcacccatatgggaataccctgggtgtgcattttggttcaaataattcccaggatatccagattggggtccttgagagtagtcaacaccatagcctccttgagaagcctatatatgaacaacttatattagaaaactcttccccagagtaaacgcaaactttaaactttacggcattgccataatttactttccaattggttgacaaatcagatttaactgaataaatgaattggcacagaaatacaagagacatttgaaacaatgggtacctgagtggaaaaatcagcaatgttgtatgccacatgagatccttggctcttgaaatcatctccaaagaagtcctagaaaacaacaaaaccaaattttgtcatcaaggatagaacaagatagtaaatggcatgcatgcatcattaattgctagtacctgagacatcccaccaatggaaaacccatcgcggaatgtttgactgagaccttggacaggcatctaattgcaaaaggcaaatattactagacaggtacttttttttgtatgacatatattaatagaaataaacaaacctgtgtcatcaatccagtctgggacattggacctccaccagaaggctgactgctcggattctccaggccaggaaagttaaaagctgaccccatgcctcccatagcttgctgagaactctgttggtgagcaaggtgcccaccaatagggccaccagtatttccacgaggtccaaagtttctgtttccaggttgaggcacaggtggaacagctccaatcggtccgtgcaatgatccccgggttggaatagcatagggttgagaatgagccccagcaaatggagggaaaggcatacgaggtaaaggatagccagatgggtgcacaccaggtttatgagccccatttggtgggccaaatggaacaaaggaatgccctgcatttcagaaaagaagaggagcgttaagagaaaagagggtaaaattagccaaaagttacttagaagcagaaccaaacaaaattaactatctacctttccccctaccacttctcttatctgccactgggtttgtgcctgcagcaccaaaactagctccttgcataacaccttgaccgccacccaggaagagtcgtcgatcattgtagatctactcaagcatatactttgttaatttaataaaacaaaaggaaccataatgtttccaacaagtatctataagagtggaagaaggcacccaccttttttggcttttgaaattgcaccatactctgctttaagttgttcaaaggtccttctaccaaacactcatgctcctaaacacatggagattatcgagtgaaaattcaaaaactcagaagagctccttactttcaatatctactattagatatgcttatccaatgaacaggaatatctctcaaatagtaccaagcatcacgtgcttatagatttacaaaatttaggctgagtttggtgcaaaaattgtataagtttcttaaaaaaaatcaataaaatcattcgcaaatgctccgtctcgttttgcatgaaacaaattagcccagccaaacgtccagctcaaacacacctttagttatataaagaagcaagaaataatactgaaacaggacaattggaatggaaccacttatccgtttgtcaaatactcaaatgtaaaagaccttgaacacatgcaggtagaaaatacacatgttccatcaacactacaagcattcaattctactgtcaggaaagataacctgttcaaaaaacacctaacaatctgggcataaaccccaaaaataagcaacctgaacagggtatgcaaagcattgttatgtactgaaggaaagcttataccttataatgtgtcaataaactattccagagtggctgcttgcttagaactttagggttcccaagaataactataccgtaccgagcacgagttaatgcgacatttaacctgcgtggatcattaagaaacccaataccctgaaaggtgaaaaaaaaaatatcatgtcagttaacacaaatttgcgaaacaaaaaggttgttcttcaagcaggaaaagctagaatatgcacagacaacacagttcaatccttgcacaaaatatacaacagtctgcaagttaaactactgcctagatgcttaacataagaatttacaaagacaggcttaccaccctcaactgtcattgccaatgagtttgaaaacataaatagaattttcactaaatagaaaaggccaggtcagagtacatctataacgccctctagaagtcaatgtgaaatactgtcaagaatattatgctgcaaaccaagtaaaacagcaaagattacctggtgctcattgcttctaacacaagacaggattatgtaatctttttctcttccctggaaggaatcaacacttgctacctgaaataagtataaatcttatatgacaaggcagctttcaccttggtaggtttaacggaacagtatacatgattggtggttaacctcaatttctttgtatagttgttggcgaagagagccattccttgacatataattcacaatatatgccctttgtccttcataaggtgtgataactccaatctacaatacattccacaaaatgtgatttctttttttataaaagaatcaagtgctgcaaaatgttactagtagatgaaaaagggatcatcactgcatacctggcttggtacaacaccactccttaaaaatgtagttacaatcttttcaacatttgcagcttcagttctattgaggtatgatgtcccactggcactgatctcttcttgtcccatctacagaaaatcagtacgagtctcttgtgtaaataagcaagaagagcttttgcagttaggaagtacagaagaacaaagatcaattggtggtggtccaagaaggtacctgcacgtagaagaacataggccgatttggaacaggccaaggaaaatcaatcccaggtgtctgtctctcgtttacagttactccattttgcagtgtgccttcatagaagcagttggacgggaagtctgaaagacaagggtgcatcctatattgtacctgtaataacagatgattatgttagaactattagctttgttcccaaggaatgttaattttcgaacgcaaaatacttggatataactcgtttcaatggttacttgggtataatttggtgaattgattgtgtaaaaacaacgacaatatcgggatgaacaacagagatttgatgattcatccccaaaaaaggcttaaagaaaaaccagaaaatgcaaagtgataagtaatgttggaacatgtactattcttaataattcaaagttttgtccaatgatatgacaacgaatattaagcaagacagtttgttcaaattagaatgcctgcactaaattgtacctgacatacacatacggggggaaaccatttttcaaagaatcctcacaaaagtaacatgatttatgagcaatctcaggataacttaaaaagaatgtatcagttaggctttaaatccaccgcttccaaagttttgacatcaatgtcacaggacaaggcatggtaagcatactcacaccatggtaataatgtggagaaacagaacaccagattcaacaattacctgtagcctgaaaggcttgactccaaggataacaagccgttcaaagagcgattgtgctaatcctgcacgagctgcctttttgcacatgatgactgggcccagttgacaatgatctccaacaagaacaacctaaagaaagagtataaatatagcataatggaaagaacaaaaaaccaccaattaattacttgttacctgctttacaccaagcaccaatggaatgagacattcaggctctgttgcctgtgtagattcatcaataagaacctgacataaaaaaaaaaagaagaaagaaactccatcacctcaataaagagcagacatcaaaattaaactgctattagaaagaaagtattacttgacggaatcggaagtttgctaaacgagggtctccagcaccaacacaagtgcaacaaatcacatcagcactttgtaatatctctctctcagtagctcgttttaatgccttgtactttttctcatcactgcttgacaattcacctataaaaatagaatataagaaaattttctaattcaaccaaacagaatggccgagagagtttaaggaccttgttcatctttgagttgctgtagcttatgcaattcactcttttcagatgtatcaaggtgccgaacctacgttttatgcataaaggaacatcagtgacatcatcaagcgtatggctatttcacaggtaaacaactagccaagaatcaagaatgtacctgataatgaagtgtcaaatgctcaacaggagatgaaacagcttccctagattttgcacatagcctgacaacctgcaatatgcaaccacagttactaactggaaatgtaaatagtaaagaatgtatgagatgtactagtaatttaacagtttcaaaacgcgtatatattcaacatggcaaaattactcctgcgaaccacaggagcatacaaaaaaagctcagtatcaacatcgatagaagccaagcatgtaatttgaaacttctatcttaaaatggttttactactcaatggactgtgtcaaacgggatagcagacaagtcaaaaatacaggaaacagttgatacttaaaataaaccataaattattgtttaccttgagaccagtagagcttatcttctctgccaactgatcaacggctacattacttggagcacatacaaggacctgaaatttcaaatcagacaaggttaacaatagcatcaaattatgccagcagagcaaatgccatgcactcttatacctgtccttggccttgttttgccatgtgatacacgatcgcagcagatgtgacagttttccctgtgccaggtggaccttgaatcaaactaattggcttctggagaacacttttaactgctaagacctgaatagatgcaccacaagatcagaatagaacattagatcaacatatagtgtttaattctacttcagtgaagctatggcataatagctgaacacctgaagttagattaaaaaaaataggttttgcacggagatgaagaaagttggtggaattaaatggggaaagattatgattggtgaagaagaggatgtagatggagaaattaaatgggagatggttgtgattggttgaggtgaaggagtaggtgaagtaactatgttttgggagaaattttgaatgctaaaggtagctatattttgggatggagggagtagataagaaacaacactaaactgatgtatcgacccatttttctagaagcacaaaaacatacctgtgaagcatttagttctggaagtcctggtgcaccaaagcgtctcggtagtgtattacgtattatttgatgctcaacttcatgtcccaaaaggtgatggtatatgtacctacgttgaagcaacagaagagtaagaatttcctcatgagacatttgaaaagattgtgattatccaacaaagaatccaaatacagactagggatattttgcgagagttcttcccaattcatcagggtcctatcaacctttaaccatatccccaaaaaaggtaccaacaaccataaacttaaaaaatagctaaaaatatacattttttacttaaacactttgttcaatcgcaaagaaatgtgtgttcatccttaagcagtaatcatagtaaaagcaatataaatatgactagaggaccagaaattctaagtatacacgatatagatgcatctaactcacccactgacacttgtctcatccacagcaaaagttttcattgccccctgcatcctatcaaagctagtactcttccagacaaaatccacactgaatccatggttcaaatcaacaggaactccctgaaatcaggaaagtttatgatggaaaatgggagcagtaaaaggttactaagaaaaacaagtgagagctatactcctcatacctgactagcacgaagttcaagtgctacctcctcttgtgccgtaagtttaatctgaaggaataatgcccttaccattagcactaaagtagaagtgaccctgttggtgttattgtagagctatcaattaacatgtttctagggcacataccacatgacccacagactgccatgcagggtgtgaagaatcaccagaatatcgaagccgcagctcatctcctgggacaagtctcaattcattgtcttcctaaaatataaaattgattccacatgttagaaaaataaaaagtgtaggtgtattaaatgatataaaaagtccatgataattacaaggagcaagggaaaaatggttttgacaagattccaggccctatgttatcagatcttgtgcttccaagttcttaatctaacctttggaaacacgaaataggctatgcgcttcttgttcagtccaatatcccaccgcacggtcaagctgtccttgctctgtgactctttcatcatctacagaaaaataacaggaggcaagaaacttcagtacatatacatatatcatagtctggttccaaggaacaaaatgttttaagaactatcagcacattcaggaaatattatcagaacatagtaccttgtcataatcagcctcaagctttatcagtggagcaaacacattttgatactggcaaaaaaaaaatgaaaacctgtgttagttacaatatagaaaaacatggaagatttgagtgttttaaaagtgttagtatagaatcaaggtgcaagatatcaaaaacaggctcaggaaataaatgcccaaatgaaccaatgaacattccaaacctggtaagcatcttcatacttcagagccacttgttggggctcatcatcgacacctggtttttcaagatcttcaagagaggcatcagggtttgttttccagagctcttccactttgttaatttgttgcgcactaatttgacgagccctcagctgctcctgttctgagggaacctggtagaacaaaagattgcaaatttgtgaaaagacaaataacaggacaacactcaatgcacaattgcacacacaacccaaaataataaatggaggaagcattaaccttgacaagccatgataagaaacacctgtcatcaataagaggacaccactgactgaggtcccaattcatatccttcaatgcattaacactcaaacagggctctctgcacagaagaacaacgacattctctgcctttgctgagataaaaccaagaaggaatacattccgacaaccacaattgtagcactcaagaattgtttcacccaacggactatccttgtgtaggcaaacttccttatgttttgctctaacctgtgtaaaatacacagcggtgtaaaaattaagtcataaaatatgaaataaactgaacgaaagcagtaacaggctaaaaataagtgacaccaataatttctaccattaaatttctatgtagtctgtaaagcctaagctggtctgcaaaaaatagcataggtaattcaggaacgcctgagaaatcccctatagaagaccctggattttttgaaccaaagttgaattctactaaccacccgcagacatgatagcaaattgccatgtagcacaattgatttcaaaagaaaagatgtaggattgcaatttatcataaatttttgtattgcaccacagataacaaaattaggaacaaataattttagtggacaaggcatcctgatgacataaatgcccttatgggacaaagcatgctatcaagttttaaacatgagtattctacactaaaatgccaataaataaaaaaaatcgtttcgctactgaaaattttcattgtatgagctggcaagctaatcctcagaatttccatccagcatgctcataaattttaccaaaaatgaggggagaactgactggttgagcaatttatcaaaacaatcaaatttgattaacctaagcagatgaaagcaattcaacaatcacaataattcatctcttcaatatagttgattgccgcatcctgaactaaatgcacttttttggcaccataggccaccaaaaaatgttatcaagctacaagagatcatcatctgcgagacaaacttgtcacctacttaggttggcggcaaactcctaccgaattcacatatgatcgatggattgatcttaaaactgaaagaaactaagctgttatgaccctaagctgttatgaccgtaattagcacgagaaaaagacagggacacgcaccaggtggttaacgatgtgggagccggacgtgttcccccgcgagttgcagaaccacttgcggcaggacggcacgttgcagcgcgcgacgcacgcggggttgtggatcccgcagtaccggcacgcgtgctcgacgaagtcgcccttgccgtagtcgtacccgtcctccccggcgccggcgccgagcggctcctcgaagctgagcgccgcgaccccggaggcgagcccgtccgccgccgcggcggacgccctcgccttggccgacgcgcgcggcgacggcgaggacgaggaggccggcggggtggtggcctcccgcggcgcgagatcggggtcctgcgaggcgtccggcggcgggggaggcgggggcggccacgacgaggacgacggcgacggcgagcccgcggagccaggcacccccggagccgacgtggggggcgcggatcgggccggctgggagagctccgggaagtccgggtagtcgaagtcgtcgccctgggtgttgaactcgaggaaggtgtaggcgtcgccggcggccgaggcgggcgggtcgggctgcgaggccgtctcgtagaggtcggcggcggcggaggaggagggcggttgcgtcgccatcggagcgggcggggcggggatgggggcgaggggaagggctccccctcctccctagggttagggttttgtggttcggggagtggggagagacgaggcgaatcgggggagggggagagacgggagagagaagaggaagaggtgaggtggtggaggagaagttgatttgattaaaaccgtctcccctctgtgggatttcggatttggactcttcgcgtccagccgtctcgtgcaggaggagtttggactttggagggtggagccgtggagaccggtttggagaggtttggagagcttttacgtacgtacctttggtacaactctaatttatgatatggacgtgactagtcacagctagataaaccagcgatcacttcatatatgagagactctatctacctatactttaaataaaattttctcttaaactatttatccgatctacgattcgattacaccattgtgttcgtaacaattaaatctttataacaagatctcacataaatatattttgatgaaaaaaatataaattacttttacaaatatctaaattacttttagatttcactaaattacctcatagacatataaaagtaaattcaataaagtctaaaagtaatttacatatattatagaagtaacttataacaaaagaaacgtaactttaatgcttgacttttttcattggacgtgactacacaactagtcatgtttttaacccaacaacgaatttacttctaatgtcgtgacaaaattacttccgttttgttttaagttacttttataatatgtaaattacttttagattgtattgaatttacttttatatgtctaagaaataatttagtcaaatctaaaagtaacttatatatatgataaaagtaacttacgtatataataaaagtaatttacaaatataaatattttttcatcgtagtataatcatgtaagatcttgttgtgaagatttaattgtaacaaatacaatggtgtaatcggattgtagatcgaataagtaatttgagaaaaaactttataagaatgaagaaaaagacatgcatgtctaagagaaataaagcatgcatgtatagcagtacttcttctcacaattgattggtcgttggttaacactaaaccgagaggcttctcggtttagattttgccttatgatatactagccctaaaacatattaaattctaattaattgaaatacatttttttatatttagatatttttttaagtaggtaggtaaaatgatatggttggatttaatttttattaaattctccatattaactacactttaaaattttcttgaaatttgttgtgcttaattgctaattttaataatacaaacatcatttcagcattaatttaaataaaaatcattctttctctatgggccattttcagcccattttcttcttcagcccgcaaccgagccgacccacttttcttaggccgcaagcgactaaagtctaactaacatccccatactcctcgtctcacttccacgtttgtgttggaccgccggcccgtgtacggccaagtgccacggtccggtgacggaggccagcccgacgctcgatcgatgttagccgtttgtttcgatggacggctcaaatcagttccaaatcaatcaaaaccctggtgcaaccctaaccctagattcattctccccctccctctccctgcctccccctgcccaacgccacctccgcctcccccaccccccaatcgccagctgcctcctcccgcccgacaccgctcccctcctcccccaccggcgccgcctctccccctccccttccctctggcgccgtttctcctcccctctccctccggcggcgccactcctcctgtccctctccctcccatctcgccggcacggcacggcgacggcagggtacagcgacgacggttgtccctccccctctccctctccccgtcggcctcaatggccgtccctccctctaggcctctttatttctgtcggtgatgacgccctctccaccctcaagatccggcggtaccctcccaacgtcggtgtcgacagcgacggcgacgtcggtggcttcctgcgagcggattcagtgccggcggcttcctgcagcggatacaacggcgacgtgtcgatccggcttcacagacgacgccgacagcttcccatggacagatccggtggcgacgacggcgttggcggcttcacggtgatgtttctatttttcttcccgttctttttctcaatcactggattgtccgattagattgtcatgtggaatcctttgtatttatagggttaatttcatccgattttgagtacaaatcaagtttgtatccaattttcgtgtggtggcggaatcggacagggcgaagattattttcgctcttttttaattttaagacggaaacgttcacaattttttaagtagtagtctagcccgattggattgtcatggaaccctttgtatttacggggttaatttcattcgattttgagtccaaatcgagtctgtattcaattttcgtgtggtggcggaatcggacagagcgaatattttttgttcgctctttttttattttaagacggataacggaaacgttttcaaaattttaagtagtagagaaaagctagtttttttaaaaaaaagaacaaacatctataatatatttataggtcccggtttttcacaaccaacacatatattgatcatctatattagtcttatagatgaatgttctttgaagaaactgacacctatttaaaaaaccggataccgacccctattagaataaactagtcagagccaacctaccaatcaaccaaccttatcctcacaatcctagccatccatccttattgccacaatcccaaccgacctaccacccgctcctcttcctccctcggtacctccaccccacaccgtcgcacgactcccgcccgacccccagcgctgcccacctcctcaccaccacccctacccctgccacatctgcctcccgccaccggacctcaacgcgtggccgcgcctcctcagcctcctcgacgtcgccttcttcctccctccctctcggcatctccctagtttagcagcggcacaggggcacaggtcgacagctcccggctcggtggctccccggcggcgcggcggctcggggcctccatgacggcgaggtggcgaggaggaggttgggcgaggagcagcaaaagcgtccgctcacccctccctctctactcctctgtgatgtgatttattttatgatttccacctcttctctctaattggatcgtctcctatcctggatgatttcgattggattaggattgggatttagtttttgggttagatttacaatggtttgggattggttgtgggtgcattgatagatgaatcggagggaggaggtccgctactaagacggacgaaaatcctgatttgtgcggttcattttctcttcctctacgttctatgtccgattggattttgtatcgatccttcttctttttttttcaccctcttgacggggttttttgttttttatcgccctttcttaccggctttttttatagatttttttctgcgtcaaattgaatcggactttccttttttgttttaatgtttttttcacctctgttattacggacaacggaaacgttttcaatttttttaagtagtagagagtagagatgtggcatagctctagttccaacttcatcctttttgaagctggagctcaacgaaacagattcagtttcatctaaaatgagagtgcagttgggtgaaacattctcacaaaattaactagagaggtggagcggagtttaggctgctctgcaactctattctaaactcagctcctagagctaaacttaggagtttgagctctaccaaacagacactaaatttagctctagaagttggatctggagtggacctgtggagcactgcctaaacctagctctaccttgctagttcttttgagagagcgctccacctagctccgctcccattttaactggagttgaaaaattagtagtagtagcttctttcgtctctactacttcccaatcaattcagatttttatttagattctgtgaatctacaaaactaaaaattagaagctaaaaaatctaagttttctagatcctcacaagctagctatcacctagttgcttctcataattttaaactcccctaaacaggtgaatgattgtagggttcgtgctgatagtcgcttttatagggcccgctcgttggccacttagagggagaactgaaataaacagtagtaattatcattatcctctcaattataagaatgtgttttggagattgaaaaagaagaagattaagaaggtacaaagaacgagatgagtcatgatttaggtggtgcttggatccagagactaaactttagtccctatcacatcgaatgtttggacactaatttggagtattaaacatagactacttacaaaactaattacataaatgagagctaattcgcgagacaaattttaagcctaattaatccataattagataatatttactgtagcatcacataggctaatcatgtattaattaggctcaatagattcttctcgcgaattagtccagagttatggaatgggttttgtcattagtttacgtttaatacttctaattagtgtccaaacatccgatgtgacagggactaaaaagttttagtcacatccaaacacccccttactaactatttcaaacttaaaaagtgtattaataggatttttttaaagcaacatttctatagaaacttgaaaatgcaccgtttaacggttcgggaagcgtgtgggcgaaaaatgagaaacttttatcttccttgtgcttgtctcaaacacagcctaaggacccatttgaaactcctcaatagcacatgattaattaaatattagctattaaaaattgataaatatatttatttgatattttcttaagagacttctatatataatgttttttaaaaacaccgtttagcattttagaaagcctagaaagagccattttggatcaattgataccaaaaaaaatgttatttattattttgaaaattaacacccattttatttaaatgaaaagcataggaattttgtagtatttcatttatatagatttttttttcaaatggccctttgatatttcaaaggactagacattgttgaatcttatggaattcatatataatgcctcattctatgtttgttttggagaaaattcaacatgaggtctaaccctatgtaaagttttctttatatttatctatcttcaaattcatttgatctaatcaaacagtcatttcctctctttttctttttcctttttatccctgtcttttgcaatcgcttgttgtacttcttattcgtgtcaaaatcatgtatttttttatatccatctactttcccaattctgcatttcagaagagagctaaatgttagtgtgattggtttggattagaacaaaatcattggtaatacccatgctctgtttgggaacactttataactttccaaaccatatcaaacatactgtctgaactccacactaagtaattagtaggtccagggaaacaaatctaacatagagtatttttttcaaagtgaaagaaaatcaaggtttctatggaaaacttcatcaaagtccaaagctaatggaatttagctcctttgtgccttgagccttgagactgagctccctgccactatattcaagtcttgaagaagatcttttattgcctccacaacaacacaatcgaatgtgagggagatctcagaaataagatagcaatgagaatcataataccataggttgagttgaggaggagaactgaggaagatgagtcctttacaagaaaaagcaatatagaggcaaaagaagacataaaaaaaaatcaatcgaatcttacctttggtagatcccctcctcactttgaagtgaatcgacatttgagatgccctacatttcgctcgaaactacctttttatttcttgctttacccaaaatactaatattgaaattaaagaatgttttcctacaattcatgttaggttaaaccagaccaactaatactagactatcatattaaagctatataaatcgaaacaaaagccatcaaaaagtaaaagttgagtaaacaaaaataggacaacatggccacaaagttaaaccaagcaaagaaccatggatgatgcatgacatcatcttctctttggcacgttcccacaggtctcaactctcaaggtgactacactaggcacaaaggcctcaatccctgatgttggtctgagtggtgtttggttggtgccctgaagtgaaaggactttgatgtcgcctagagtgggggggtaaataggcattcctaaaaattatcatatcttcatagcatattagaatgatgggaactttcaattcaaattgaaacttccggtacgggattgtaagttccggtctcaatcaaaaagtttggagaataacagaataaaacactagctatgaacttatagctcgaacaaacaaaatatatatggatcaaaaggtgacaaacaaggtatccaagcaagatataaggtcaccaactatatcaattaagcatacaaatagatcaggtaaaaccaagctcaaacataacacgagagaaggcaagaacgagcgaaccaagagaggagacgcgtgacttgtttcccaagtttggatccacggattacgtcttcgttgaggggccacaaaggccgggtctctttcatcccttttctacatgaggttgcacaaatgcactcctcgatttcactcttaatttcttcccttgcagagacgaaattgaagccttcacaaactttttgtggcacaccacaaccttcggtgctcattggcgaccttagtccccaagagtaacaaacacaatcgaaaatttacttgctatgtactccaatgctcaaagtatagagtgaagctcactagctctcaaactctcttcccaactctcttctcttctcaaatcttactcacaaagatctaccacttaggctggagattggagatgggatatttggctttggatatatctatttcatgcctaagaacaacagccactcaaggaggggatggaggcgtttatatacccgagcctatcaaaactagccgtttgaggcaaatattccatttttcggaactttcgaaatgcattttcaaaaatatccgaaaaacactagagagcaaacctgagatttctgtctttttcggaatttttcaaaatccaaaaaacacgagagagcaaaactagaatttctatcatttttggaatttccgaaaacaccaaagagtaaaacaaccataacttttttctcgggagtcccttttttatgatcttggactctatggaaagctcacttagaagactaccaactcaaccagaagcaaggtttaaaaccactcaaaggataggttaaagtttggctttctctcaaggtagcactaggataggttattttgaacactgagatatacacaagcacaacaacattgcgtccctattaatagtacgatattcttatactcaaatataaataggaaaataattataccaataggaatgcctttataccatcttcctttctttgtcttaagggataccaacgctaaaaccgtttcaccgtatcctatatacctatacaagtcatccccactaattctattttcctgctctctcgctttgccacatcactatcgatttccatccgttggatcactccacttcaaccgatcaggttgcttttagcctgcctcagttctttattcatggatggctcccaaatactcggcccagcccagcccacatgcctgccgctcccgcaccggattggctccctctcccgcatcacgctactgccacccccaccgcatgtctctcgccgtatcgcatgccctccctccccgcatcgcacttctccaccttccccgccgcatttctcgcaccccaccccatccccttcctatctcgcatcgcgctttgccaatcccgtcgcatcggcgccgcacggccctccctaggtctgtttcgcctccctcctcccagtgctagccgcatcgccttcctcgccccatcctaagagaaaccttcgccgcccactaagagcagacttatgattgccattaacgcgttaatttcattcgcctctaattaaagccatggcgatatcattgcgggcctttgcttattaccgacgaagttctccagtccatacagaagcagaagcagaagtaggttcttggttgttctccacgaactgcttggtttcatatgaatcttcattgcataggtacatattattggattggtttaaactacagtgatcgttttgtagctttattttcatgcctttgaatctttcatatctaccgaaggtatttgatggtgtggtacctactccttccttctgaatttgttatgtgcctcctgtggattttcattcaggaaagatcaatccgtatgtgcttccttttcaatttgacctatcatctctttggcaaattcatgaataagtagccttcactgtactcgaggattattgggtgcaattggattcaatcttaacaaggtctgtcgtcttacgacagcttcttttcggtggatctcccatctgtactaaacacaccctattctcctcctcgctcagtaagtatgacattttattttgccttagactctcatctcttggttttgttaggtatcatatccgtatcttctatctgaagataagggaatttgttgatttttcatgacggacctcacaactgattgtataagttccattgtattcctgtacgtttattcgaggatccagagtattcaactccgttgtgttcctgcccgtatcgaggattccaggtaatcagatttgctcagattcaatcagctttgttctaatcaaatttgctcagattcaatcagctttgttcttgcagatttaattggttattcatccacagtttatccttatggtcttgcaaatccaacatggaagaattaaacatcttacaggtatgttccatcttagaatcaaactgacgaaagtttttccctcagcactttcagtaaattttgtcatgttacaggtttgcagtgaagacacaagaagactggggaaaatacatttaacagcttgaaataattgaaattttattatattcttttccctgcttgaagtgattgttgcagtattcatctttgttcgttcaaatgcccttcatagagaatgttcttcacgtttcttaaaaatggccttcccctgcttgaaattttattatgttcttcacgtttgttctggcaaaaaaaactgtactcaaacaaaatcattgtatagaacagagaatggtcatgatgtgcatttgttaaaagcaaaatctaacaagacgcgtacagtttctaatcttacaaaccaatatttaagtaaacaaatttaattcttgggcactatatacatggcacgaactattccaatcatgcttcaactttaggtggaagctaggcacttcttatacttttgaaacttaatattccactaatgatccgcatgttgaaggaaaacttacacctatgatcggtcacaagtgtcatcttacttattttattccaagaggaaaaatactatcttatacataaaaaatcgctcaacattctagacaaaaaacttattatgtcatgtaaaaaataaaagaaaaatattgcctatgtttatggatgtgcatatactataatagtatatacatatgttcacttcatatgtcagtagtggccacacatgcagtacaatcatcttgagctaaaaattaccatgtgctcccgcaacatcacgcagggtatattctagtattctttaaagattgatgcgtgctccttgtagcttcaaatggccttgcacggtccatcagacatagtcgtcactcgcccttcaccactggatttggtccttcggtgccaagctccttgcttgccttcaccaccgcatggttcatcgcggcgagcatcacttggccttcaccgtcttgccacttcgtaccccactttccaataacttcactttgttattcttgatatcattaggtgtcatgatctctatcgagtatcagcacattttccaattcatgggacctatttttcttgttcaactcaatgtatttattagtccgaatgattcggttgtcaaccttcacttgttgaccaacagatcacatgtataaaagaatatgaataaatgatgagtattaatcaacaccataagtgtcatatactcaaatgtatgctcaaatgtaaagatcccaattaaatgaaagtgaataatttggatcaaatacttgtataacatataggatttgctcccctaaatgtatgcatacggaatatttatatgaagcaagactatgtatagatagatatgaaactttgagatcttatcttacatacaagaatagaagacgcttatcaaatatagacaatataaaataagaaaaagtacgaattaccccccccaactatcgtggccgaccgaattacccccctaaacccgaaaactagacatcgttcaccctgaactttcaataccagacaatttacccccctcgacccaatccagagcagttttgacctacatagcgtacgcgtgatagtccaatctacattttattgataaaaaatatggggcccacctatcatactcctcttccactctcccttctctctctatctctctctctcactatgaacgaggcggcggcggcggcgcgggatggacggatagaggtgggggcaagcagtgggcgggcgtggacagcggacacgtaggcggcatgcacggcgcggtggagaccctcctgcgccggagggagttcgccagagttccctcccgctccctcccgaagttcgccgctccctcctctgtgtcccgcgccaccaccaccttcgtgtcccccgccgccgccaccacctgcgcgtcccgcgtcccgcggcgccacccatcatctgtcgccgacccgtaagagagagaggaagagtgatacgacccaaataggggtgatgtcccgatcttcacggcgtaggatcaagaaccaataactagcctcaaagagacgaagataactagctgcaagtagccaagataacagtgcaatctgacgatcgaactcgaagctaaccaccatctctacacggcaacctaaatcgaggattcgcccaaccacactaagttaccaaccaacacaacctagaatcaatcgaggaaaaatcctcaaagggactaggagcaccaattgggaggcgtcgaacgccgcttctataatcccacaaggaaaccacaagaacaaaggggtagagatctctctctaaatttgttagcacgcagctaaacaaaaggggttcatattctcattgtcaaaagtcttctaaatgataaaacatgtgggacatttatactaggaacaaccctcctggatgggaatgaaaggtcttaggagtttactggacataggctaactcaaatatcatactaagtgaattcccgagaggaatcgcacatctgtttggcttctgagcagtcctcaatgatttatccattactccttattgggaagtcgaaatgacgaaccgttcgtttgttggaggtgaaactatattaatcacaggtagccaagtgacggtagtggttactgttatgattgataaaattagcaaattttggtcaatacctacaattaatacttataagacataatccaagtttatccgttctgaggcacatcaccaaccaaacagctcaaccaggcatattccatcaaaatctcagggaggcatgttgcacacggcaacaaccaaacagaccctcaaaatattttggaacaatgccttgtcagaagtttgtgggtgactactggttattctgcggactagtaatcttacacgtgcaaggcacgtttcccacattatattacactaatcatgtaaaatcacctaaagattattctaaattttccacaatatatatcacactcaacatgcaaacaaccaaagttcaagaattattgtagtgtaaattgcaatatcttaataactcttccgtagacactttctataaaaaaaaatgcaaagcagagaatgatacgaaatgtacaatgctgccatagctttgatatacactaaactcaactctatctacaacatctaatcgtgaaaaaggcctcccctatctcagtaatagaatgtcaaatggcccccaaacaatctgcaataaaaatatcatttaaatgatcaccaataaatacctcccgtcgcatcaccagtaacgaaaaccacaagccttagtattgtatacttgattaagataaatgtttacttattgatattgatattcaacagaaccttgttgaattctccagcttggtattctactttgtaatctcatgggaaaaaagcactttgctttgcagcaaagtctcaaaggggtgttgttccaagcagcaaacaacacaatttctatggtttttcctcaccgccgctcgcccgccacgcctcccgcgtcccctgcccctctgctccgcccgcgcccggagacgccgccgctccgcctgctctagccgcgcaccgcccacgcccagagccgccacttgcccgccgccgtgctcgccaaccgcttgccgctgccgctgccacgctctcccggagacaccgccgctctgcctgctctggccgcacgctgacactgcccctccgcctactccggccgcgcgctcacccatcgccgcccgccgttggcaaagagagagaagaggaaagagaggaggaggagagaaaagagaagaaaaaaatgcagctaacatgtgggccccatgatttttttttaatttttttttctgactaggatgccacgttagtgaaaccacccacatatactgccaaaggatctccgatgaatggtttgaatgaatttaggagcgaacatttctggttttaggttgagggacctcaaaaaatctcgctgttaagttgagggacctctgctgaacttattcctaaataatacgaaaagaaggcaggcgacctagcccaaatatagaaacggcccagcccaaagtcgcctccactcccactgaccacaccagggtttacgattccggtcggatttcgcgaaatttcgacgtttcgacaaggctcgaaagtagaaaccatctgagatttcgaggagtttcatccaaattcaaatttgaattgataaaaaagaaaaaaaatcaaataaaatcttataaatactatgatattcatgtaacctattgggatataaatttttttaaaaaatgaagtattgtgtgtatttatacatcatgaaagaatagaataaaaaattaaaaaaacacttacatgggccagattgcatgaaataggcccaattactgatcgaaatttcgatgatttcgatcgaaatttcaccaaaaccgaccggtttttgagaaattatcggtaaactcagggaatttgtattcaaattttggtttatgaaatttcttcagaagttaccggttttccacttgatttcgtgaaatttcgaatttcaccggtgctcgaaacggaacggaagggcatatcggtcgtaaaccctgaaccacactcatcacctcgccctccaaatcgcccacacctctggaaccccattccacccacccgcagccgcagcgaggagaggagaaacgagagagagagaaaaagaagaaaaagaaaaatgctgcgccacgccgcccgccgcctggccaccacccgcgccgccgccgccgccgccgccggccgcagcagcagggtgctctcgacggcggaggtgccggccgaggcggccaccgactccgccttcgcggaggcgtggaagaaggtggcccccaacatcgaggcccccgccacgcccatgtcgctcatgcagccccgcccccccacgccggcggccatcccctccaagctcaccgtcaacttcgtcctcccctacaagtccgagatcgccaacaaggaggtatgcgcggaccgtgtgcccccctctcctttgccctacattagctagagtttgtgtctgaacattcagtgtcaatgttcctgatgtaaatttctttggttgagaaaatctttccttctcaagttctatgaataaaactgcatattagtatagcctactattcacttatattttactatgctgcataagaagcttttttttttttaccgtgcaccagttatactccctccggtccaaaatcttgtaacctaggactggatgagatacatcttagtgcaatgaatccacaagtttataaaaaaattagtaacatctacacaaccaaattagtttcattaaatataacacggaatatattttgataatatattcgttttatattggaaatgttgttatatttttctaaaaacttggtcaaactttaaaaactaagtgtaactaaagaaaaatcaaagtggcttgtgacttattaacatgaaacggagagagtagattttaggaaggcagcaccatacctgcttgggagcgtggagttggaagaggcgcacgggggggggggggggg

SEQ ID NO: 6941 - DNA, 36863 bp, Oryza sativa
tagtcccggttgtttataccaaccgggagtaaaaataattggggtctgtcttgaaccccatgacttattgaaccgggattaaaaatgatctaacaccaaccgggactaaagatcaaaaagtacccctcaacttttaaaccgggactaaagatgctttttagtcccggtttttattagaaccgggactattgtggaatttggctgaccgaccaaagatggtttctccaccagtattggttgacttctagttctgcgacataccttcagttcaggagcgcctgagaggagaggcgatgacgatcagtcgatcacaggaatcaaaatcaggcgggcggcaggcagccaggcaccaccgcacccaccatgggccaccagccaccaggcaggcaagcagccatgccgcctccttaggcgggtcggcgatggcaatcagctgattaggcgcactggcgctagagcctagaggtggcaactgcggcatggcgcactctcggctttcgcggtcgcggattagggcattggcgattcggcgacgaaccgacacggctcgatcttgggtctcgcgagtcatggtgtggacgacagacaaagcgacgcgcctctggctcctgctgatgatcgatcgcacgcgcgactgggttactaggctacggctgggctaggagaaaggaggggggggtactccatcctctttagccgatgtcgtatgtcgacatctgcgcgacgacgaggatgacctggagccatcagcggcgcggattggggctgcggtggtgcggagcgtcggcgatgtatggagcaggcaggatgagacgacggcagggggcggcggtcgaggggggcgcgggtataggggaaggctctatgagggaggagggggagtcggtggcggcgggtgacggattggggtggcgccgtttttttttgttgcggaggaatcgtgtgcgcttttttttcggaagaggagttcgtcgctctcaacgtgtcgatgtacgtcgcatgtctaccttggcttcaccatcaccacgtagtagagataactgtgccatgtgtaattgtattgtaaacatatgaaatttccggtgtattaaattagagcccacagctgttcattattttctgatgaaattacacccgtactgggccgagtcgcgcatcccccgagtcccgagtcgcggtcgcgcatcgcctctacgcgagggtgcaaagacagaaggagggatgactgaggcagcggcggtggcagtggtgccggctgcctcctctctcgcgactagggcgccaggcggaggtttgggcggcgccggctggaggtttggacggctgagggctcacggcggcacttggcagtgggagcggctccccacagccacggaggcgcacggcggcgccgcatagaagatctggtgcaaggtaacccaaaccctagactctctccctcaaaccctagacatctcaaatctggttcattttttgggattgattgcctggatgctggttaaaatttccgatatctgtgtctattattgcttgattttttctgtatacttcaaccacattatcactgtacttgccaacttagatttctagaaagatttggtcagcaaaatttagtaccaacttagattggatacttgtactatcgatccatagatatagtttacatgagatgtacaccaaaccaacttgtgaaacaacaaagaaaaccaactgtaacatcgaggaaaaaaatactattcaacacctttgagacgacagagggtgaggtgcacacctttaataaggcaatgcacctcatgtgtaagcctgccagtggggcgggtttgatttggtgaaatgggctggatgctgatttggatggtagtggttggattaattttgaattggagcgggttggcctgtgaagaattgtggtttggactggagtggatgcgggatggcctgtgaggacaatccatggactcagcccatgggttagccagtgcacctgtgcactgcgtgccgccacgcgcggcgcagagcgctgtcaccgccgagcgccaccaccgctgagcaccgttcaccgccaccgccgagcgccgtcaccgccgttcgccgccaccatcgccggactcactccccggtctgcgaggaggcagccgagaggaaggtcgttttaggcctcgtcaagaagagggatcgggcaggcacagtcgcttggcatcccgctctccaccctcgacgaccacctgcgcatcgacctcgccatcgacagcgctgaggttttgaccttttctttcacttctttttgattaattcagttccatgctgattgtttgtcctgcaatcccttctacctttgctaacttccctcgcgagaaaaaaaaagttgtagctttatggagaaagtaggacaaaaaaaaagaaaacttatatggttgtggctaaggaacttaaattggcagctcatgcaggaggtcacgttccagattatgaaggagagaacagtcttagttgtcagttcttgattatgctgttagtggcatgaacttcagtggtagtcaaccatgcaaaaaatttgcccccattgtactcctggatggttggaggacaatctgtcttttttttttttgtcatgcagattagctagtagcattcgagagggtctatctttgtcattttctttttctgctgtgtagatttgcatctgaaaagtggataatttagcaatatgtctctctgttgtaaaggggtggataggaactagtaccaagtaaataatttaatatgatgctttaattgtaatgataaatccagcaagattataccatgatttgcaaatattaatcattcccatctgtaatatatgtcattagtaaaaggaaacttaggcgtatgttggtccaaagtgtcatatattgataactagagctttatgttggatctgaatgactatctcctaaatcattgccaggtctggtagtatgagtgttaatttcatatatgcaaagaaccatattgccagaagcaaaattgttcccgccaacactccgaccacataaaaattcatgaagtatttttgtggaacagtaaacttctgcagattggaaaagatcaattcgagattatcagaaaaatacagaagttgaatatgagatgaactacaccattagggatcctcaattttctggaatggtatcttagcatggatgaaatattttatcatcagctcttcagttttttttaggatcaaacatgaaattttccacgggttgtttcctaactgttgctacctatttctaacttcacaatcaactagtggacaagattcacaaaatatggtttatgagatggctggttcctgattttctagttgatgataacattaatccacaatatttacactgtgctttttgaagaccatctatcatgataagcttttgctcaaaatgttccctcacttttgctattttacatgtttgagatttgtgaagacaattcatggctagagctattagcagatgaagtttcagaattatgcatagacatgcttacatttactacttgtgctaaaaactagtgaaatgataagcacaatgcaaccatgacaatatcatgtagtacagtataaacagagataagtgtgaaaagtaataagattagtgataatcaacagagttaatagaccaaatggtgtagatgaacttgcataataatccaaatatccagtaatagctttgataatccaataatcaacagagatttgaattatttatatttttattagcaactttcaaactgtaagtgttgattttagtcgaattgtgatgctatgagatataatctattatattattaaaggaatagaaaaaggagcctccacgttcgctctcatagcctagaaattctcacattagtcggagaaaaagaaaaacagagtccatatagaaatacaatttagaaatagctaaattcggaattaaaaaataaggaatattaaaagaggagactagagtccatatagaaatacaatttagaaatagttgaaattcggaattaaaaaataaggaatattagaagaggagactagagtccatatagaaatacaattagaaaataactgaaattcagaattaaaaataaggaatattagaagtagagtataaaaataaggaatattagaagtagagtatagagttcatatagaaatacaattaggaaataatagaaatttagaattaaaaataaggaatattagaagaggagactagagtccatatagaaatacaatttagaaatagttgaaattcgaaattaaaaataaggaatattagaagaggagattagagtccatatagaaatacaattaggaaataactgaaattcggaattaaaaataaggaatataagaagtagagtatagaatccatatagaaatacaattaggaaataatagaaattcggaattaaaaataaggaatattagaagtagagtatagagtccatatagaaatacaatttggaaataattgaaattcggaattaaaaataaggaatattagaattagagtatagagtccatatagaaatacaatttagaaataatagaaatttagaattaaaaataaggaatattaaaagtagagtatagagtttatatagaaatataattaggaaatagttgaaattcggaattaaaaataaggaatattaggagtagagtatagagtccatataggaatttaaaactaactaaaattcggaataaacataataaaattaaaagtagagtttagagtccgtataaaaatacaatttacaaataactaaaatttgaaattaagaaaaacatgggaagaagagtttaaagtcaatataggaatacaatttagaagtaactaaaattcaaaattaaaaattaaagaatattgaaagatgagtttagagtccacatagaaatataattagaaataataaaaatttagaaataaaaataaataatattggaaaaagagcctagagtctatatagaaatacaatttacagaaaattcgaaattaaaaaaaaattaaagacgagtctagagtccatataggaatatatataatttacaaataactaaaatttgatattaaaaataattaataaataacacgtatataaaatacaatatcaatattacacattggtagtattggtagttttgtaatgttattgtgaaatttaaagttatgttgtcaatttaatatattttagtaatataatgagaaaacatatatgctactatatgagataaaatataatgatgttagccgcacaatctgcgcgggccaccatgctagttgctttattatgtcataatccgagcaaattttgtgggctcacggtgttataaaatttttgaacatgaagtaggaacacccaacaagaaattcgttataaaatttttgaacatgaagtaggaacacccaaaaagaaattcctggagttgccattgcggcgtcgccttccatggagagcgagggctggcctgccctccagcctctgctgtgcttcgcctggatcgccgccacactccccatcattgccgctgcgctgccaatccccacggccgttggaggtcacctccttcgccggctgctctcggccttctcctcccgcggcaagaccgtgaggccctcccccgcctcatcctctggttcctcctcttctaaggcggtaagatcggttcaaggtgccgcaacacctatttgctgcttcgccttttctgttctcattggactatcgcatggagttcgtatgattccttggtaaacgtaacttggttagaccttcttaagttaaacggaacttgttcaaagcaaatataagtttgggttgtttaagtccaaagtagctagctactgttttgtagtgtttagttgatgcaaatctgaaatactatcgattgatcttgagaagatgataacattttgaagaaattcgttcttaatcgttggggaaccactcccgagttctggacttaaaacaaattttttaattggtgtttgtcgacatgatacagtcagtttttctgtcaacttgaacattcagttatgctaacttagctatacaaaaaatacataccaagccagttttgtgagtagaaactaacattatatagtaggatcgaattgattcctcatcggtttttcttgagcaattgttcatccaattgatgatcaattgcacatgagaacactcaccaaatctgtagttcatctcatattcaacttatgtataattctgataatctcaaattgatcttttccaatctgcagaagttcactgttccacaaaaatacttcatgcatttttatgtggtcggagtgctggcgacaacaattttgcttctggcaatatggttctatgcatatatgaaattgacaccattattgcttgagtcatcaagttattccacaattttcagtcatcttgtaggctcaaattcattctcttttggtcgtgttcgctcgcgcaccatgggacacaagtatcgtgtctggcgaacagtatttgcacttctattgatggaagttcaagtgctgagacgactatatgagactgaacatgtgttccactacagtcctgctcggatgcatattgtaggatatttgacaggtctattgtaagctccatcttgttttatatcttttatgttctagatctccatggcacatttgttgtgaaaaatagcccacttgagtagttatcatgtcctttactttattctgttgttatgttacatgattatgcttaaaggtttataaataattcttgtatgcagtttctgcagctcatacatgtaggttgtccacaaaatatacacccgtctaatgagttaatttactgcatgatttttcattgacctgaactaataaaaagaaataccacttcgttagaaaatagcccaagtgatgctgataactacactgttcaattcttgacattttatttgctttcttctgccacagtgcttatattaggaagaggatatgcattcatgctaccgatgataattttttcatattattgttgttgtacttttgttttcatgtataacattttcagattgacttatagtttggtttttcttcatgccagctactatgtagctgcaccattatctctcgctagctcttgtattcctgaagcagcagagtattttcaaggtcaagtacctgagttcgtagtaaagggtcgtgcgagaatgccagatctagtaattgattcatcatctctactacagcctcttctaaagttggggtggacccagtggataggtgctgttatattcatttggggttccctccatcagatccgttgccatgcaattcttgtaagtatctgctctctaatgtccctagatatactagcaagtttttttttacatatatcggcagcatcagaaatcttcctaaggaagaaaaagaaaagaatgaaataaatccacccatatgctgtaagttggaactgtcaaactgcaactgcaaccataacttgttagtgtaaagctgaaggtatggcttgctggaactgttctattttttgagagggtggagcccatcaggcttaaggaaccccatttacacaaattgcttggtcaatcaacatcaggaatcttccatgaaatgccaatcatatttaatgggttatgcatgtttttctgtttctgtatgtcagaaactgtggtattattcatcgttgtcttggaaacttctaggctgcggttaatattttgaatttcatggtttattttttattgcttttacagggatcgttgcgtgaacacaaagattatgatgaatatgtaattccttgtggtgactgctttaatcgggtctcttgtcctcattaccttgctgaactagtgagtgtttttcctatgtcctcattttcagtatgtggcatatactgttttgcaaaatatggcaggtcttgttactctgcttatttaacaacgtcaagttagattaggcctatcaatattttcttgggtttgtcaataaaaatcatcttgggaaagtttggacggattccaattggtggaagcactggactgagtgtctgagtagcttctggtccagcttcaactcctggctggaataggttgggggagaagcagagaacttgtatgttgcttttgctgggatttagagtttttacacggaagctgaattccagtgcagacttctcatcaaatttgttctgttacccatttcatcaccgtagttctctgagtgcagtaccatctgagagtgaatatgtccttttagtatcacccgtactgacatatgcgaacattctttgcatggcttaaagatgataaaactggataatatcttttgagttttcatattatctcacttgtgtgaagtaactagatgattctaacatgacagcacatatgtttccgtgtagcagaattggtgctttttgacttgacagttgatgcagtagggcactgagctactaaaagagctcctgtggttttaaattattatggcattaacatttacagttactttggcttgtaggtaatatattttggcatgttggttgctagtggtgcagaagacattccagtgtggttcctgttcatatttgtggtacgccgtacagtaactttttgaacaaagatactcagaatccaactaacgtgcaattatcatctacatttagtttcttttgtttttgttccagtagattgaactatcttttttcttttttcatttttgcagatcacgaacctgtcatttgcagcagtagaaacttacaattggtatcttcaaaagtttgaagactatcctcgctctcgctatgctatcattccatttgtatgctagtgtctacgaaatggctacattatgtaaagcttatgtatttgcacacaattacgacatgtaacttagcttgatgtaaatgtgataacaatcatacaacgtactaccgtagaggctggaagtttaatatcagagcacctatgtacgttgccagtagtaatctttgtgcttctacagatttaaattacatgccaattatgtcatcgatgaaacatgtttggcattttaaacttaaatgttctgcaactcaaagtgatctagggtatgttgtgctcgtcctttgtataaggaaaaaagtgccgtcatgtttagagacccaaatacctgatctggtctggaaaacggaagacttctggatttatcagagcgataccatttgaactttaagctttaggcagatgagttgctataattttctcaaccaaccacaagtttaatacagtgacaaggtcatcatcctctaaagtagcacgccgtcaaagcaaattaacagaaggatagcctactaaaagaagaagctgagctgatgaaagtgagcaagaggtgccagccaccaaccctcacacctggccggtatatgggggtgagaggcgtttagttagaaagcacatccactgatccgcgagaggggacatgctccttgtcttttctcggctaatcctccctcgtggacatgtattcaatcacattgccgactcggatcttcttttgaagggagagcgctacgcgtcggacatacggcgtgagacgaaaaatcggacgcatccatgagccgtctgatccgcacacacgctatcagccacccgacgtcatcaagcattcatacatgcaaaactattttaaactattattttaaaaaatatttatccaaatcatgattcgattgcactattaaattcgttgcaattaaatctttaaaataagaccacacatggatatattccgatgaaaaaaatagcttattattgattttttttttaaatgttgcatgttattccaccaagtatattggaattttttcactagttagatcgaaaatgtttcaatcgtttaaatcgagcattgtttcaccttatatgaaaacaatgttttagaaaatagcgaaagaatgtttcaagtcaccacaacatttgatccatataaagtaaaacattataagtacactaggtgaaatattttttgtggaacaaagaatgaaatgaattatcttaatagagagattccataatatgtggttgatttattgcaaaagaatttttcaattcgctgcaacattagatctatacatagtgaaacattgtaagtacactaggtgaaacatttttagtggaacattgtaaatacttattgaaacacttaaccaatacatatgcaacatttacaaataaactagtgaaacacaataaactacttactgaaacatacaaatagcaccatgagatacattaaagaaaagatatatacattgtgacaataataaatatgtgcaacataatagaattttagctgaaacatctgattctcacatatgaaacattaagtttaattggttgaaacatatgtgtgtgtttttattataatatagttatgtgagatcttgttgtaaagatttaattataacgaatacaatggtgtaatcggattgtagattggatgagtaatctagaagaaaaatcgttttcaaatttgctaaaagggtgttatgtacatgcaaataacctcgtgtcatctctcctttatgcatattaatgctcagaaaggaagcatatgtaacagatagaggatctgacaaaggctgtatgcggcaaaatcataataagaggtgtccgatttttttctcaagatcgaacgatcggattgaagcattttccttcttttaagtgttgtttactacagctcttactagtataatccttgttcttttgcacggctaaaacactagctcagactactcaacgacagacaccatcagagctgaactttccctggttcaggtgttgggatatggaattagaatctatccgtggaactcagaaaaagaaatttgcaattgccactgttttatcagcgagttgctagtgcttgttcgtttgctcgctgcactatttactttataggagcgtggtgacgttgcaggagttggtgccggaaatccgttaactgaaactaatgagataaactcagaactgatagtgaaatgccgatacagtagagtaggcgcctgaaaactgacgaacataaggcataattggaatccgacgtttctcaaggttcgttcgtcaaaattttcagcttcgatttccaacgtcactgaattggatgccaccgtgtgtatagcctaaacatctcatttttaatgagagaagagatcaaattcggcatcgatcaattcgatggtttcttgatggtcctacgatgagaagttgagaacgatgtgtgtgtgatgtgagagccagtccaacctctgccgttttggacggctttgccacgggcagcggacaataagcgaaaacgcgacccaaaccttctttcggcagctgcctctcgtcgtcgttttcccgctcattttctgcatttcggctgggacttggagtcgttttcttctacccatgaggacacgcgaggtctccgctcggagtgtgtgacagtgtgagactcatccaagagcaacaatggtgtgatttctcttacgctttgtacatccacaagttgacatttattgttttttttcgctctccatatttcttcacgattcaatcaatctgccatggtgaggtcatggactaactcaccaaccatgagtccatgacctcaccgccattattcagtttctgtgtattgggcttcttgtttaagaatttgagatgcgtccttgatgctttgtgatgaatagtggaaacttggatctaggaatgcttaattattttcagattattcacctgattatttgcacaatgttggaaaaaataacattttggggacaaaaaaacattcttctattgtatacttagaccacttattttaaattatttattaatgttgtcgaatgacaactgtgtccgtcgaagaacgtggttcgctcttggtggaaataaagcagaaaattaatatttttattgaaattgttgggatcctcccattacatgccctatggggcctatttttaggcttagtacatgcccctgcacgctagggttactaagtagagagaaatttatatggctacccttatgatagtaacatttatgagggtaattatagacaatatgaccttgggcccttatatgggccactaaatgggcctcatagggccattcggcctgcttggttattgaggctacagcttcgggggcgaaagggctcggccctgtggtgaaggcctcaggcttcgcctagcgcttcaccctgaagtccttgtctttgcgatcctcggatctctaccgcatgtggtacgccttggtggttgtggatggcgtttcggtgacatggtcgaaggtcctcatggcatgcctgcaacaagcccttcacgggtaaggatgagtagtgagcttcggtcgagaccgtgtaaagccccgggtatggcatgaggcgccccctttcggccaatattcccgtcgaaacctatctacttttgagaaaaaaaaagtcataagtgaaaaaatctatttccttttgtcgacgtttgatgtcgcgattccggtatttgcatagtatggggatcgttggtactaggatatacacgagactggggtaaaagagatggagacagcgatttttatacaggttcgggcccctgcattgtcaggtaataaccctatatcctgttggtcgaagccggttgttgctcttattcatcataatcacaccagtacaatatttggggtagcctatctaactgttgtcgacatggcggtctgaaggtctgactcgtagtcgacaacagggtagctttcctcctcgagtccgcatccggcgagatcagagacaacgctatatctctcctgacggtatccgtaggcaccgtaggggactagctatgcctatctctgaagtcgatatctggcgtcttgtcttggcgtatgttggcttgtatgttgtggcttctgttgttccgtgtcccctctcctcctagggagccttatatttatacccataggtgtccccttgtccaagtagaactagggaaaccaatatagatacaatccgagtagtccttgtcgtttccatgtagaactctattcatccttccttatgcagaactcttcctatatccgaaagttgtttccgtataagatatggtatgtggtgagtcctgccgagatttagtcaactactattaggtatgtggtatccataaccctgacacctttccatttatgggctctttggtggtccatttttgccttgggagctaacggttcgcattcggccttttactgtgtcatttgcccctttttattgtgcggcccacgggctatcttcgcgcagatagccgttggttcaagggatgcatgccacacatcgcacatccatcggtttggcactcaacggtcgcgagggcggaggagtataaatccaacctccccctttcccccggaggcttacctcagttttttaccgcagcacttttctcctcaattcctgcttcttgcgctcacgcgttccaggaagacagctattcacccagttcccctttcacctttgtagcttcgccacttctcaagccgaaatggctcctaggaagactgcttcggccgcgacaaccgggcccgatctcggagcgatgccggatgacttgtccagcttcttgggcaagttgtttgtcaaggagggtgatctgggcgaacttgtcgcctctggggcagtcgtcgaagggcaagctttccttagcgcgagaaaaatataattatgaatagtgtacattgttattagaagatggttgttccactaaaatgctacatgagacaattttcactgtgcgcgtgatcgacagtttagcaccgttgttatgagaagacagttccactaaaatgagacgtggcatttttcactgtgctcgcgatcgacagtttagcaccgtcacgtacccctatttgaggggtggctcggctctttctcctccatatagctaattcagccttagacacatggtctgaccgcagtgtattgtcctgtctgaccggccacacaatggcggtcagactggcctttgcggtaaatgtcctcccaacggtgacacaccttctcagacaaacagagatggcttgttttccttcaactatctgccatgcatgtatgtctctaggatcatagaaatcaaaaggatgctcaccggagaggaaggaatcggccacggcggcatttagccggagttggagaagacgaaggcaatctccatctccggtggacgaatattgggaaatcttgaggtattttggagaggacctcgaggggaagctggtggcgcgacgactcatcttggcgtggtccagatccacggcgctcggtgcatgcactggagctcccgtgggcatggcggcgttcccgtcgttgcagtggatgaaatgaggtggtgtcaaaagggaacttgttcggcatgaagggtagaatatggaatgggaaagagttggtgatggagatggctcgacgacgggtggctgcctccttcttcttcacggccggcaacgaagaagagatggaagtgggaagctagagctacatatatctcttggtttttcagcttagagatggagaatgaagtgtggcgacgtgatctggaggagtagagcgaaaagtctaatgggcgatcgatcgcctcgaacgatcacccccctcctccacatggtttcctttttaggcaccgcattactttcctattttagtaaatttatgcgcctaaagtttgtacacctcaagtttacatatctaaagtttatacacctaaagtttagagacccaaagtttataagtcaaaagtttatatatccgattcaaatttaaatttgaattcaaatattttttatatatagtattttctatacatccaaagtttatagacccaaagtttataagtcaaaagtttatatacccaattcaaatttgaatttgaattcaaatatttttttatatagtatttctatacacctaaagtttagagacccaaagtttataagtcaaaagtttatatatccgattcaaagttgaatttgaattcaaatatttttttatatatagtattttctacacatctaaagtctatagacccaaagtttataagtcaaaagtttatataaccgattcaaatttgaatttgaattcaaatattttttatatatagtgtttctacacataaatttttctaactttgttttttatttttttaaatttatggtgtagtaataagagaagaaggggaggaggaagggggagaggagcgaaaagtctaatgggcgatcgatcgccccgagcgatcacccccctcctccacgtggttttccttttttggcaccgcattactttcctattttagtaaatttatgcacctaaagtttgtacacctcaaatttacacatctaaagtttatacacctaaagtttagagacccaaagtttatatatccgattcaaatttgaatttgaattcaaatattttttatatatagtattttatatacatctaaagtttatagacccaaagtttattattcaaaagtttatatacccaattcaaatttgaatttgaattcaaatattttttataatagaaaaaatgcccatgcgttgcaacgggtgaaggttattttaactttattattgttatacgatttagttaaggtgaaattcattgtgagaattcgcttggatatatatattttcccacgaaattatgagctataattaggagtccgatcatcttgtcgacggtgagtaaccgtagaccggatatagagggtattggggtacgctggtacgaggatctacgtagtacgacatcaaggaaacaagagagaaagattataatggtttaggccccttagtaggtaatagccctaatctagttgatatgggattatatggaaataaccacagattacaaagggaatagtagaactcggtggtaccgacgagattgtagtcgagttaattagactagaccacccggcgacttggctcctatagtcttcggcttcgtaggctgtggtcgtcgtgtagcctatgagattcgatcccttaggtccccgcggggggtcccttttatatcgcaggtcaggcggtctccaagtaggactcggaggcatcggaccctgcacaatatagtaacgacccagtcctatacgggtaggaacctttccattgacagactttgtgatggacttccttagcgtattcagaggacgtccgtatatgcaccgacataccgtattgccgtatagcatacgtccaagggtagagggtataccttatccgtaaccctgacaatagcccccgacttctacttaaatgaactcatgtaaccaatcgcgacttctgatgtcggaattgttgtcgttctcaactggtcgatctcggtgtgaggaccgtagagacaaagagtgttcgacaacaccatgcgaagtccaacggttatgagtaaatttaaattaaagtccaagaaaccgcctgacgcaacggacccagaaatttccggtggccatctctctcctttccttggaattcgcaccgtcggtagtgcgcctatttaagggagttttgggaatccattttggagtccggctgttgcgagaaactttcaagccttcaggagctcttcgtcttctccgcttctgcacaaaccctagcttgttcctctcagccccttctccggtgatcttcgacggggatggagctcgacaagtccacttctaccagcgcgtcgctgaagaagttgcaggaggaaggcgctctccccggtcgcaggaccatggagagggaaccaggaggtattgaacctaaacctgtcctgggccgcatggttgcagttgaggactatattctctgtggtttccttcctcctccctctgagtttcttcttttggtcttgaatttctacggtctttctctgctccatttgaaccccagctctatcgccttcctcagtatcttttctcatctttgtgaggcctatattggggttgacggagctcgtggctcctcaccgggagaccgcgcaggcccccctttgccagttcggccgggggcttagggtgaaatctcaagctctcgctctctctgtatgtggaaatatcgtatgcccgccagaaaacacgagacaccgacgatctatacaggttcgggccgctgagaagcgtaataccctactcctgtgttttggtggatctgcgtatgaatgagctacaagtgtgagctgacttctcccccgttctaagctcatcatctgggaaagaatcaaccaaccccctctctatgggcaaggtcctccttttatacttcaaggggataccacatgcacccttctctttccaaactggactgttctttttctcttgaatgggcggagatcagcacggttgctgtccgaatgacgctccgatgggacagcccacacctacctccacttccgccgggggtgagcgcgtcgtgggaacatggctgtgcgctgacgatatggtcagtgtcagaccggtcacaaatcggtcattcttgtccaccgcgtgtaaacttggcaacgtgcatgtttgcccttcttcacacaacatcttgcctgtaatggttaagatgaagcctggcatatatcgaccgggtctaacgtgtcatctctaagggataacacgcttaacgccggcttgagacgagtgactagaggctttcgtcttgacgggatggggcatggcgtgcgtcagaccgccagtcgccacctaacccgtgatctgaccggtctgtgactggtcacagaccggataaagggacgcgccgtgctgcactgcatgcagcgtgacacgcttgaccagactgcaataaatgctgttaggtgagcacagctgtgctcacttatcccatatacgtggcgcagacttcctaaaggggtcggggtgcctcggccctcggggccggggcaagcgcaacccgacccccccccctcgggggaaatcaggaggagggcggacacctcaccctcgggcccgacgtccccgaaggtgccaggccacgtgggcgattgcgtctgcctcaagcctctggtcatgatactcccggtcccatatcaccgacaggggtagagccgtttcttgacctctttcgcttctactatgagttgcgttggatggaatccaacagggtgtcaggatgcgttggttttcgacttagggatggcctgaagtcgcgctatatccccttccagtgcccctcttctcgtagtaaatggcgggtgaggtggttagaaaattcggatccggtcttggttgttcccgaggagcaaccgaacaatatttcgtcttggactgccaagcccgccttgaccccctcccttcagtctttcatcgatgtcatcgatgacctccgagtgcgagggttgtcggggtatgaagtcgctgctgacttcatcggtagacggatccagccgctctaggctcgagcccatctagcctttgactactcagggccggaggatgcgacccgggtttctcctcagggtatttttctcgtattctgggttccattccttaagtatatgttccccctgacttatcaattttggttctcgatctataggtttgaacagcgaaactgtagagcgccgcgttggtcaagtgatgatcagcggccctacaacggcgagcaacgtccctgttgctctttgcgagaagggggcagccgaacgcgaagccaccatcaatgtaagtgtactcagcggcccttttgcatttttctttcgggatcgcattgtgacttcatgaagcgtatgctctccctctgactgatattatcgggccactcgtggaccatcaggcggcggcgtggctgaaggagaacgtcgccaaggaggtgtctgatgttgctgctgctgctgccacaacgagtggcggcaacatcccgagaagggggaggaaattctcctccgtgatcggaaatcgtcggaaaacgcccaccccctcgataagctctcctggtcgttcatcgcgtagtcggaaagcttccacctcacatcatgcccgttatactccaggcctcggatgcgtctccccgcctccgcgacggcagcggcttgtgacgcttggcgagaagtaagtggatgaacttgaggttttgtcgcttcgttgagctcttgcagcctgtctcaattgcagcctttcacagggcggcgcgggcgaaggcggcataagacggatctggagggacttccagcgcgtctcctgccgtgtcctcgactgatgtcgtggtcgtgcccaggagccgcgaggcgacgcccagcggcccagtcagcgatctcgcggctggtcggggtccgccggctgtcgtcctcacctaggaggagctccaggtcaagatggggcgcctcctcgaggctggtgctcgcggcattagccacgagatcgtagaggcgagggcggcggcggcgtcgtcggcgaacgagcgcgccgaccggctgacgcatgatttggcggaggtttgcaaggacctccagaagatgagggaattggtggccggcaacgagcgacaacggcaggggctcgagcaccgtatgtcggagctcgagaacaacttgttggaaatctgtggctcgctgcgggtcacctacactggtctgcaccagctcgccggggagtgcggtgtcaagaccaccatccctgcgaatcccaatgaattctcgctgatgacttcgcttgcggaactggcgacggcgatggaggcgatcccctccaagcacgcggccaggatcgaagaggagatgtctaacgggatttataccggggcgtgccatgtccttgcgtgtgtgaggctggcgcatcctgaactcgatcttcggaagatcctggatcagggggtggctagcgacgcgcgcaaggatgtgatggaggaagtcagagacctgggggagtctgtcctccccctttttgaagagtaggaccgccgcttgtttgtaccccttaaccaatcgtgctttgtaaaacttttcgttggttccaactgcttttgtgtgtgcaattgttgccttagttttctttggcattttgattccaggtactttgtctgttgtttgtagagatgtcggtgtcgagaatgtccagcagcgcgggcagcctgaattgcttgaggttgcttcgacacttgagctcgagccgtacatgccgcgggatggcatagaccaggatctgcccaaggagacggacgtggtgtcgacttctttaggttggctcttgtcggttccctttcctttacctcgtctgtcttgattgggttgacttagatgtttgcatgttgagcagacctcgagagtgtgcttgctgatcacgaccgtcgcatccagtattggaggacgaagtttgaggtcgccgaacttgagaggactatattggaggtgaagagggatcgggctgtggaggcgctccgaggtcgcgaggtatggttcaactcgtacctcaggagttgttgcataaccatggccgttgtctgcagagagctccgagtacctcgcggggatcccgaggagtcagcggctggctacatctcgtggctgaacggggcttgcgctcagcttgaaggcatcggcgggtgtatcgacgaggccctaaaacaggaatgtcgtccatcgagtcgatacgccggagggcacatactggcgtgtatacgagatcatcgtccgcagttgcacctcgagttccttcacgaagggttttcccgttctcggaggaaccctacggagatagacaacctagcgaagttgatggctccgctagctgagaaaatcttccattcaatggattggcattggccttcttggtagtgcctatatatctgtgacaaacatcttaagaaaaaagtaatgtattctggaattctttgcgatctgtaagaaatgcttgtgaaatagaaaggaaatctatctaactaagctttcttatgctgggtacggtgtgcacgagtgtcttctcacttcacgacttcgatcagtcacttgagttatacactctccctagcccccagccttgtcgtcggagaactcttctcggaagataaggctcttggactctcgaccatccttagttgaataagcactgatccttgcccccggccgtgaagttggaaaaatccatttccgattacacggcttggttaatacgcatggcgagaacacttacacgaccagatcttacatggtctttcgtctctgaaggatccgacaaggccttatcagctctgggcgtccccagccgaagttcccttaggttctttggaggccttgtcaagatggcgtaaagggacatgaggataggtttcaacgctaggtgtcgtctgggtaagggatcatcgggaaggggcactgtgattgaaatctgtgccttaaaacagactttattgaagttgtaagatgtcttacaaatgtggacactattgacttatacataaaatttatgcaattggtcaatgttccatgaatttgctagctcacgaccatcgccgtccgcaatcttgaatgagcctggccgcaagacttgtgtgatcgtgtacggtccttcccatttgggtgagagtttgtttcgccctgcctggctttgaactcgtcggaggacgtaatcgccgatcgaaagtatgcgtgctcggatgcgcttctcgtgacatcggcgtagggcctgttggtagctagctgctctgacggcgacccgttcttgatgttcttcgagtaggttcatgtcgtcgtttcgctgttcctcctgatcctcgtcggagtacttctgtagtcgtgtactctgatgacataacttggtagggagcatggccttcgagccgtacacgaggaagaagggtttctctttgttggacgttgtcggtgtggtgcgcacgacccatagtaccgaggggagctcttcgacccacttcttgtcatgtgacatgagcctatcgtagacacgggtcttgatcccttgtagtactataccgttagccctctctagccctctcgacctgtccgttactctgagggtgagaaaccgaagcgaagcatatcttgactcctagtccgatgcagttgtcttggaaatcagcgctgatgaattgggagccgttatccgttatgatgcggtgaggcaatccatatcggcaaaatatccccttaatgaacttgatggcgttgtcggccttgatttcccccgtgggtgttgcctcgatccatttagtgaatttgtcgatcggcacggacaggaatgtgttgcttcgatccatttggtgaatttgtcgatcgccacgaacaggaatttgtagccgccctgtcctcatgggaatggaccgagtatgtcgagcccccagcacgagaacggccaagtgagagggatggtttgtagtgcttgcgttggtagctttgtgtgtttgctatgaaattgacaagcttcacactgttgtaccatatcgcaagcgtctttgagggcggttggctagaaaaatccttgtcgaaaggcttttccgaccaatgtacgaccggcggcatgtgacctgcagaccccttcgtggatgtcgacgaggaagtgtttgccgtcgtcagacgaaacatattttagaagtactccgtttggcgccttcttgtatagatcgttcccgatcatacagtagatttttgcttgacgggttattttctcgacttctgcgtcgtcctcgggcaactcattgctgcttatgaatttaatgagtggggtccaccagtcatccctggtctcgatgtcggcaacggcacaatctgcctctgtagcccccgagccgatgtcgggggtgactgggctatcttcgtcatttgcctctttcactgatggttttgtcaggatatctagaaaggtgccgggttcgagtagctctcgtctggacgcacgccgtgctagatttgatgggacctcgatcccatcaaatcttttttccagcttcttgacttctgcaagatatttggatagctcagggctagagcatttgtaatctttgtgcacctggtttgcgactagttcggagtcccctttcacgatcaatcgcttgactccaagtgcagctgcagctctcatcccagcgagtagtccttcgtactcggctgtgttgttggtcgccctgaagttgaggtgaattgcatgcttgaactgatctcccgaaggtgatgtcaagatgaaccccgcacctgctccttggctgttgagcgcgccatcgaatgccattgtccatgtttcgttgtcggtctggctatctaacctgttttcaggcatagttcaatcggctacgaaatcggcaagaacctgggacttgatggctgttcgtgtataaagtggatgtcaaactggcttagctcgactacccatttcgtaatgcggccgacaacgtctttgtttctcacgacctcgccaagagggaaggcggagacaaatgtgactctgtgggcttggaagtagtggcgtagctttcttgacgtcatgattactgcggagagcagtttttggatctgtgggtaccttgtctttgcgtcgtgtagagcttcgttgacgtaatagattggtctctgcaccttttctctttcgacaacaatgacagtactcacagagtagggcgtagtggcaatatagaggaacaattcttcattaggttggggagcaacaagtacaaggggatttgacaagtagcgcttgagtgcgatgaacgcctcttcagcttcctgtgtccatacaaatttgtcttgcttttttagtagtgcgaagaagggctgtcctcgttctcccatcctagcgacgaacctacttagcgccgccatgcatccggttagcttctgtacgtccttgagccttgtgggcgacttcatgttctcgattgccttgatcttctcgggatttgcttctattcctctgccagagacgaggaatccgagcaaattgcccgacggtaccccgaacgtgcacttctcaggattgagcatgaggcgatatcgtctgaggttgtcgaaggtttcccgtagatcgtcaaccaatgagtcgcctgtcttggttttgacaacaatgtcatcgacgtaggcctcaacattgttacccagctgatcgctaagtgccccttggaccgtatgctggagtccaaatggtattttgacgtaacagaatacaccgaacggtgtgatgaatgttgtcttctcgtcctcttttgccatgctgatttggtggtagccggagtaagcatcaaggaagcttaacagcttgcaaccagttgttgagtccaccagttggtctattcgaggaagaggaaagtgatccttggggcacgccttgttgaggttggtgaagtcgacgcacatcctccacttctcgttggcctttcgcaccatgactgggttggctagccactctggatggagtacctctctgatgaaaccagccttaagaagtttatcgagctcttctcgtatggcctgtttccgatctgatgtaaatctccgcagtttttgctttactggcttggcatcgggtcgcaccatacgtttgtgctcaatgacctccctggggacccccggcatgtcggacagctgccaagcgaatacgtccacattgtcgcggaggaaggtgatgagcgcgagttcctatttctcgttcagtgatgccccgatcttgaccgtcttgtcggggttgacactggagagtgggacgattttgattgcgccgtctggtttcggcgtcttagtcgttttgatcactttcttgggtggctcggctgtggcgggtgggctgggagtgtactcgaccatgtcgaggcttcgcttgtcgcattggaccgccagcttcgcattcccttggatagtgattgttccctttggccagggcatcttgagtacctgatacgcgtagtgagatgcggccatgaacttcgtgagtgccgttctttcgatgacggcgttgtatgctgtgtcgaactcagtaacatcatatgttatctgctccgttcggaagttgctcgcttggccgaaagtcaccggaagcatgatcttgcccaatggcttggacgaagattgaggggtgattccatggaagggttgatcggtaggtgtcaactcgcctcatggaaatcccattgcgtccaaagtgttggcgaagaagattgatggagctgccgccatcgacgaggactcgcgctaccttgatattccgaatagtgggtttgaccacgatcggatatcgtcatggtataacagcagccttggggtggtcttcatctgagaactcgatcttctgttcagaccacttcatcttgggtgcagccccctgccatgtcgaacaaacctcacgctctacttttttgtattctcgctttgaagagtatgttgtggaacctccgaagatgtgtgagacatgaagatcagaatctgggtacgcggagtccgagtcctgagtggttgcctcagttgccttctcgactacacgtactcgcttacccttctctaaagccagcttcctttccgatgattttttgaagatgaggcattcctccagagaatgtctgtccgacttgtgtatggggcaccatattctctttgtatcactgccctgtgggtctgggtgtttgggcgggcgttcgtattcagatgcaaggacttctgtttaagctttcctcttcccattcttgccgcttttcttcttgcttgattcgggcgcgtccttggctagcttcttctctcctcccgcctttggtttgtcgtttttgcgtctcaatgcgtcgtctgcatgggcacatcgatcgacaacctcgaataaccttcgagtagtagtgattcaccttgttgccaactcctgggtagtatagcgatctctgacaccggttttgaaagcgcggatcacagaagcatcggtgatatcggggatcgtatttctccactcattaaagtgccgaacatagtccctcaaagattcaccctgattctgtgttaacacgtgtaaatcgtcttcgatcgcgtgacgcttgtaagttccctggaagttcgcgacgaattgttgccataaatctgcccatgaagagatcgagtaaggtgggaggtgcatcagccacgaatgcgcagaacctttcaacgccgtcggcagataatttactaacgcgttgtcgtctgtcccaacggcgtatagtaccgtggagtagacctggaggaattcttcagggtcagaacttccatcgtacttctctattgctccgggtcggaatctctcgggccatcggacatcacgtagagaacggttgaaagccctacacccagcgctgggggcagtgggttgtcggcgatcgtgtgtcctccgtggacgtctatcggatgatgaagacggagatgatgatgacgatgacgacgatggctcactaggctccggtgtgcgattccaagggcgacgttcaggttctcgagagttctgtcgtcgtccaccattgttgtcctgcgccgatctccattatcatcaccgtcatgctgatgccctcgaccaacatcgtctggtgtccgatgttcgtgatcgtcgcggtcgcggcggttgtgacgattacggtggtgttggtctccgttcgagcgtcctcctcgatcttcgccctcgcgacgtcgtgaagaaacacgatgtcgggaacgattctcgttgtcttgcgcgcgtcgtgcttctcggcggccatttagatggtcgtggagatcgccggtgccgcgaggtggaggagtagctcgtctcggcgacgtccgctgctccggtggttcgccgtcggtaccgtcagccatgggtcgttcaggttgtgctctggtagcagcttcctcgaacgcgttactgagattggccaccgattcccgtagtcgttttgtccaacgtgcgagatcatcgttaagcacaggttgtaaggagcttctctcagtattgcgttgacggtgccgagatgctgggccggcgtacccgtctggttctccgcctctgcgttagcctgtgcggatgtgctagtcccaccgatggcaaacacgtcgcgtggtgtactggaagatgacgagccacaatcttcgagtaagtgaaggaccgatggctcgtggggattgatgtcgattactccaacgaatcaatccgaggtcaacgtcactccttgttccttgcctgtatcctcgagagaggttcctgactgccggaccttaggaggcgtcgtcttcatggcgcggagaaagaccttgcagcttgagaagtcatgattcttcgtcttgtgaataggacaatagacatcatgagttggagaagtacgctggattccacgctctttgcaagcacggatttcagtttgtacgttgagaaaaacccagcaagcttgcaagttgtgcttcctggacttgtggataggacaccaggacttggcgacctcggaagctgtcctcgtcggctcgcagtccttgtcggaaggacaaggctcggccgcgctaggaatcttctcgggctcgcatgacgtcgatgttccgttctccgccacggcgggaggatccttcgacatgggaccgtccgggtttataaccacggcgttctcgtttccggttattgatgaaccagccgagattggcaccgtggtgtaaaccgggaagacgatttcgccgacttgagtctacaccagcattgttgaagcagggattccttggatggggccggtgttgactctgttgtcgacgaagctcgatgtcatagtagtagaaccttgagcaccaagtccctctacctggtgcgccactgtcgacggtgagtaaccgtagaccggatatagagggtattggggtacgctggtacgaggatctacgtagtacaacatcaaggaaacaagagacaaagattatactggttcagaccccttagcaggtaatagccctaatccagttgatatgggattatatggaaataaccacagattacaaagggaatagtagaactcggtggtaccgacgagatcgtagtcgagttaattagactagaccacccggcgacttggctcctatagtcttcggcttcgtaggctgtggttgtcgtgtaggctatgagattcgatccttatatccccgcggggggtcccttttatatcgcaggtcacgcagtctccaagtaggactcggaggcatcagaccctgcacgatatagtaacgacccaatctatacgggtaggaacctttccattggcagacttcgtgatggacttccttagcgtattcagaggacgtccgtatatgcaccgatataccgtattgccgtatagcatacgtccaagggtagagggtatatcttatccgtaaccttgacacatctgaagttagcatgtaattttttttaaagaaattccttatacgactggtaatgtatttaaaaaacgaacgaacttaattcaaaattataatatgttgtacgtactgcaagtactaaatttgtaatcaaaattatttgtctttgttaggttgcataattttttttcatatatttactttgttatgattttatagttatttagttatttttaattttggatccatcctaacaatatggaatatccatataattttagctttggcctgtttcaattttgaacgttgttttaaccttttgagtaggtgcaaagccgcatgcatgcaaagtcagcccaacgtgtgaacatgcaaagtcagttgaacgtgtgagtggcttgaactgacatgcagtcgaaggcttgcatgtgcatgcatgccgcgtccctagaggacccggtcacacaccgacacacgaacgagtgaacgacgccgaaaattcgaacgggactcccatgcaggcgacgatgaacacgcacatgacattgaaacaaacaacgagacgggtaggaatcgaaaacggtaacttaccaaaaattttagcaaaagcatcttcaatttttataatagtatttttatacgcataaagtttagagaaacagagtttataagtcaaaagtttatatatccgattcaaatttaaatttgaatttaaatattttttatatatagtattttctatacatctaaattctatagacccaaagtttataagtcaaaagtttatatacccaattcaaatttgaatttaaatttaaatattttttatatagtatttctacacataattttttctaactttgtttttttattttttaaaaaattatggtgtagtaggaagaggagaaggggaggaggaagggggagaggagcgtgttatgggggatagcgatcacccgcccattagcgacacccggagtagagggcgagaaaagaggagtttgaagccgttgacacgttgtggccacgcgttgagcgcgtccgagagcggtcggcgccggttttctttttctctctcgcgttaagcggtgaggaatgaagatggacagggactgggctagctggggaggctgccaagtgggtccaaaccgtggtaacctaggctagagagaaagggaagggtagaaacatgggtagactagattttggatgattttccaggtttatttctcttcccatctttgttaattcatatattaatttgtggtgcagataaattcatgtagattttactggagttaggtgattatacctagatttcatttttttttgcacttaaaaattatgtgcagtttgctctcagaaaaatggagaagatgggctcagcagaattttgtttgaattgttagaaggtctaaacagaagaaataaattctggaaaattatagttactcttgataattaacctagtatttgaataaattatttcccttatacacttcccacttccatgcagtttaatgcatattttggtgagttaagattttagccaattaaggtttataattagtctattattagactcgtttgactgatttatttgaggtattagcttaagtgataaattctgaccaaaatttcagtgtgttgtacacattggatagtattcatgtgaatttttccaagatttaattatgtataaatatttttttagtaattgatctagtctatcctttatatgtattttcatctcgaaatgcatttgagcatttatagattttatatttgaacacttctttacctaaggtgatattattaaacttagtttcatacccaacatgcacacaaggactcaaacctaaccatgatctatatgcatatgcatgcttacactttgttactcaaattccattttggtttggaaaggaaaagttttaactagccccaaaattccctatatgcaaaagttgggttgacctacctaggtttaaaatgaaaattttaagctcgcaaaaataaaaaatttatcttccaacaattttgacaaggaattttaaaccctagaatttaggtatgttacagtcctgcaacgggcctactattcgatctgttcacctcgaaggcagatgattattatcagtggtgtatttatgagtattattacttgtaacaaaactaaaaggatactccctccatcccaaaatttgtatgacagtgacgttttttcatataacgtttgaccattcatcatattaaaaaattgatataaatatcatttattttattgtggtttgttttattatcaaagaaattataatcttaatttacacttttgcatatttatactaaactttaaataaaacgaatgggcaaacgttatgcgaaaagtcaacggtgtcatttttttgttgggaaggagggagtatatagtattagtggtaggatctctttgatctaaaaaaaaaatagtgtatgaactcgcccagttggagtacagcccactgcccacaagttcatttcatgaaagttataaaagtcaaccaaattcagcagtgtttaatctttcggtttagtcatttatatcaaggtggccgaaataccaaaatttctaaaatttcggtccaaaattatatgaatttttaaataaaatttgattaaatttgaaaaaaatattacctaattcatgaaaaaaatttaaaaatttcggccgaaataatatcatatccgaaattttgaaccctgaaatgcaggccttctggaggggtagatagttgacctttatgccgacgactctgcaagctgcaacgaccgcttctacctgcaatatgattgatgctatatagtttcttccccggctgcacttcttcatttcttcctcctcttcctccgacatgcacttgtgaagcgactcgaggaatccaataagtgaggctagctccatttcataacagctcatcgggcgtccgtgcaggtactcaaatttcttgccagtaatatttccatcatctatttctgttttacttttgcaaagcatgatggagtagaaagtccaacatggtatgtgcttggagctttacgaaacactcggtcttgaagttgaactgatatgattgttgaaacttaaaaggaactgatgctattcaaagactagataaatccattcatgttccagtcttaagtattatgcacagcccaacaacaatcttctccaaccttcttaccgctaacagactagtttcttaatcacaattcagaactgccagttcaaaatcgaaggcaggagcaaaacctgaaatcccttacttcacatcaggaaccttttatatctatactcctttaaaaagagtagtgatggtggtgattggtgaatctgccaccacccccaccaccaactcaggacccttttggagtaaggtgatgccaaagggtccacacatcaaccacctccaccactttgttgtgaaggaaaaatgatattgtgaggccatagggctcatgttatttaccgatatatctagaatttaagaaatgatgtataaaaaataatgataatagtatgttttttttttggtaaatctcaaagaggacaaggagtgcatgttttcatataagaagaagaagaagagagttggtctagtttttgaatgataatagtatgttaataatcattttcatcaattaaaatcccgtgcaaaatgctagttagcattaagaatgcatatggacgaaagagactacccattggcatggccaacactcagcaaagaactttttatcaaggttttcaattttttttaaccaaagagatctgtaaatttttgctatacacaccccaaaaaataaaaataaaataaaattttctccgggtatctacttcatgtttgattcacgctaaaattggaagtttgattgaaattgaaacgatacgatggaaaagttgaaagtttgtgtgtgtaggaaagttctaatgtgatgaaaaagttaaaagtttaaagaaaaagttggtatctaaaccaggactttttctcatcccagatatcaactgtttactgcatttagaccatttactatgtgtactatttccctgtttcctaatgtaccctacttttgatgctcaaccaaatactagttccttgtagctcagcagtccagagtattagtatgcttgcgagtaactatcgaaggaaggagtaatagttttccatcctccaaactgtcacccactcaccctccaagtattatcttttgattcaggattccagcagattcaagttccgctatccctttttctatgatgatcaatcagattgtgcacctccctttgcgtatccttgattcttttccttcatgcagttccgccagtgcagttggcgttttgggaccgttctcacaccttttccaaaaagcaataaatttggtttgaaaaatatggaaaatatttgccatgtaaatataatgataggcacaacatagaaaaaggtatccctctaaccaaaaaacccaatcctagctacgaacctggacacgcatatgtttgtctttttagacggagtagtacgtacctaataaaatagaggtaaactgggcgaggaatgccttctttcttgcatatctaaggaatttagtagatctgtactgccataaataatatttaacgtgtatattttggtaataacatgctaagggcctgtttagactttagatcccactcaaaattttacaccctatcacatcaagcgtttgaatacatatataaagtattaaatatagacttaaaaaaaattaatggtacagattgcgactactttgcaaggcgaatcttttaagcctaattgttccatgaattgacaatgtggtgctatagtaaacatgtgctaatgactaattaattaggcttaataaattcatctcgcgatttactaatggatactgtaattagtttttttattagtgcccgaacacctcgtgtgacaccctatataatacccgaactttacatccctgtatctaatctacccctaagattagctctgtcatgtcgcatatgtatctttaaattaacattgaattgttatggtcagtagcggagctagtggcggagctagccaggagctacgcctagggctcatttatattatcttgttctaatgttctactaatccacacagattttagaaatttaaataaaatttacatggagtcatgaacccaggcctagggcttgagccctggctgccctaggcctggttattgttaatccggtaggccataattaggagtaaactggagattatcaaacatgacttgctccaaaaggtgttccatctgtttaattaggtggtgtttggatccataagtcctatggacttattttagtcctaggactaatcactttagtctatggctgtttggctatatggactaaaagggactaaagtacattaaatgcgctgtacaatgaccatattgccccataaaaccatgcaaagtggactgcaccatgccccttgctgcagcatgccgtttgctgccgctgctaccactttgcaagccaaaacattgttgttgcacgactgcacaaccaaatgcaagccaaatcaatgtttcaccccaacatcacaagcattaacccatcataatttggacaaatacacaccttcagcaagccgaatcacaagcaataacccatcatcattttcattatcaatatcacaaccaaatcacagaaattcaaagaagctcatacacatctcaagttgtcgaaatacatcacagaagtttcaatgttacaaattacaagcactcatggttcaattaacaagttcaaccaaatacaattcacaataaatttgaaccatatattacattcctttcaaagaccacaatccatcggcaacccagtcccgaaattggttcatcacatgcgagtccaaatcatttgttggttcgctagatggagaagaggttccacccaatggatcataattttcatcttggtcataattatcgaactctgcatcagccatttgactgtctctaatgaaattatgaagtgctatgcatgcatgaataattctgctttgctttttctgcgagtagctaggtaaattaaacaaaatcatccacttgttcttcaagaccccaaacgacctctctatcacattgcaacacgaagaatggttgtaattaaagtgctcccttcttcccctaggcaatgtgctttcgttgtacttttggaaatgatatgttatacccttgtatggtgtaagataacccggcctatttgggtatcccgagtctacgagataaaactttcctggaggtggctttggtaacttgccactaaatctagtttgagcatcattgaataccctcatatcatgaaccgaaccaagccagctagcaagcacgaaaataaatctcatatcaaagtcacagacgcacataacattctgactcttctccttatgtctattcctatgttaaacagcagctgaatttggcaccacaacttggatatgagtaccatctattgctccaatgcaattatccaaatatggtatgtactgtggagaaagcaattttttatggactgttgagaaaagaggatcttttggcctaatgatatcttttgcaagtcttagtagagcggtcaaaactgctttgaacttagtatgtactgttctaagagacctaacaaatcggtcttgggcttgcctaattgattggggagcacctactatccacaaaaaaagacccaaagactccatggaatccattttgtttgtggacttcaactcatatgattccacaagcaccgaatgtaacctctcaaaaactggcatgtgcatcctaaacatgttgtaacaagcagttctattggctaatgttctcataacccaatcatgtccagactcaggtgctactcttcttagagccttattagagtaaagttccaagtaatacgtaccaatcatgccagcaagcatacatgctcttctcctgttcatttctcttttcttcaaaatagaaatgataagatcaatctcctcatcactgctgtcttcctcacagctatctttatcagcattgccctcaccatcctacatgactgacatatgcatagaaaggaagcacatcataaatataatatgaacaaacttcaacaagaaaagaagggaaggtagttaaatagatccacacatcacatgttgattacatcacatcacatcaaagtagtagatagttcaacacaaaagtagttcagaactaatgcagctaagacccaactaatgcagataagacccatctaatgcagctaagacaccataatgcagctaagaaagacaccatatgcagcaatggcagagtgcctctagtgcagctaagaaaggcatcatctaatacaaattcttatgctggcaccatctcttcaaccacataaatcttgcttcattagtgctaatattctcaaacataactctgttatgtttggaagcaaacaactgtgtggcacaaaagtattccacattgtcttctgctgcaccacactctactgccaacttctgacagtgtgtcaaggactcagccatttcttctttcttctgctcctttaacttcttgctgttaacaagttcagtaattagggtattggacttatcacttttagaggtgaaagaattgagcagccccctcatgagcttcaccactgggctcttgcttttttttccaagacttgaagctgtggacacatcacagctgctactccctctcttcctgctgttagtgctcatggggctattctcaaaaccatcccctacagctctttcccctctagctgtctcccttgcatcccctgcttcctcttcttcttcctcttcatcttcatcttcaaaaccagggatatatgctgtggaaccatcaactgcaactccttgaaacatctctataagaaaatctaagtactcagggttgccatggcgaaatttcttggcatcccccttctcctgtattgacacttaatcaatatcacagatatctccaaaatcatgtaaactagatcaatttttgacaactgcgtaccttaattttttttcccaccaaacatttgatgcaattatttctccactagcacttctaccagctccagtttgttggttcagccacacccaagcaacgtaataattctttagatgggtgaatctattctttatctgtttggttgaatgccttaggttagccctttggaaatatttggccttcaaattctggtaccctctagttgtccatgctccattaggacaatgcccatcccttatttcctcacatgctatttcacacaatgtgtaagttttttcttctgtccaaattgccttgtcatatgtattctaggaaagaaaaacatgatttaaccctaaattaaccacatgaacagcaaatgacatattacaaatgcttagcccacggcatgcatagcaatttaaatatcatgagcaacaattgacatatttcgaaagcaataaa

SEQ ID NO: 6942 - DNA, 53529 bp, Oryza sativa
ttcggtaaaatggaggtcgtgggaacaaattctttcacatatgtgtgtgctatgatttgttttcttcctcaccaaaacaaatcttgtaatagatccaacgattcaaaattatgtgaaacttacatataagttacactgtagttacatgcaagttacagtgtaattacatataagttacagtgtaattacactacgattgtactataattacatctgtcaaatttttggggaaaaatttgtcgacaaatgtataggtagtcccttccgactggattgggagtcgcgggggcagcagcctgccggcccagtgaggtcgaacagctgggggagttgtctgcggcccatgaagcagacgacgagcggtgagtgagacactcgcactgcacatattgcatgaaaagtccatcccctcccccccctcctcccgcgtggggtgtgcacttttaattttgaaatcggacacccaatcttctaaactttacaatccattcatattttcatattacccctaaagtgatatttttggatggttgttttgcgtagatgtttaaataagcggttttgatagctaatataacatattatattacatgtcgttaatttctagacctcaggttatactctatagtaatgctataatagtattattatgttggtacttagtaagtgaaatactgagagaaaaaaagattgttagaggatatatttaactgaagatttcaacatatatttcaatgtgtataccacatagtcaagcccatgcaacatacttcctctataaaaaaaagattaactcctgaagatgagtatggacaattatctaagttcattatcagaaattggttttttctataatggagggtgtatatgcaaattagatgaaaaccaccataacgggttatatgaacagtattgtaaattttagttgttagatgaactttcaaccaaagtttagcggggtgacatggactttttcatataatctaatactccccctgtttcataacataatactttctagcattacccatattcatataaatgttaataaatctagacatatatatatatatatatatatatatatatatatatatatatatatatatatatatatatatatatatatatatatatatatatatatatgtttagattcatcactctctatctctctatctatctatctatctatctgtctgtctgttatatttttaaaacagccttgaaaggaggcaacacgttcactgtagaggctagaaattccaacattaatcggagaaaaagaaaaaaaaatacacgccattagattatagtgggtccaaattataacggtcgagatgtttcttgacagatatagaaagatatatcttgctctttgtttccgactctagttgtcataccgaagcaaatagattgttattaataccactggtcatatgccagccaaaaaaagagctttattaaggtacgttccggccggtcaacgactattggctggcaaaaaaaaaccacccatcgtccggtaatccataaaacacagctcttaatctttaaggatgcatatgactaaaactattaaaaaaatccatataaattagtagtaatataatttaaaaataactgaaattcaaaaattagaataagtaatattgaaagagaagtccatataagacccaatacgagatcaattaaaattcaaaataaaaaataaaataaaataaaaagagttcaagtaggaatacaattttgaaacaactgaagttggaaaaagaataaaaaatattaaaagaatagtgcatatagaacacaatacgagattaattaaaattcaaaataaaaataaaataaattttgaaattagaaaaagaaaaatagaatttcaactaggaatacaatgtataaataactaaaatttgtaataacaaagactattgaaagaagggaccatctagaacccatgatgagattaattaaaattatgaaaatttaaaaataataataagagtttaagtaggaatataatttataaataaaatacatcggaatgaaaaatatgaaattttcaaactcaacgatgataaatgacaataaagatgggagaagccataagcctgtaaagaagtaaagtgatgacggttgaaggggcatctaaaaactattaacaaaaccctaaagagaattcaatgatgattaaaaagatggatgacggacaggcagttaagaagcacgatctcggcggttggcgagacatctaaaaagtaaaaagtaaaccccaatgataatcatattcaattttaaaatcacaatggcaataaagaggggaagcaacaggcgagccgtagaggagtacagtggtaaagccgtcaccactgacggtttggcgggacttctagaaagtaaaaaatgaacacaaatgacaattatgtttgatttttgaaattccgatgacaataaagagaaagtagcgaacgggccgtagagtagtatagtggtagcgtttgatgggacttataagcaacatgtctgaaaaagagtagagtggtgacagttgatggggcatctaaaaactattaaaaaaacccccaaatagaatttcaacgacgattaaaagcaggaatgatggacaacatggtcgcaacggttggcgggacttctaaaaattaaaaaaaaaaaaaccccaatggtaatcatgttcaattttaaaatctcaatgacaataaagaggggaggcaatgagcgagccatataggagtacagcgacaaagccgctgacggtttggcgggacttctagaaattaaaaaaaaatgaactcaaacgataattgtgttcaacttttaaaatcccgatgataataaagagatgagacagcgaacgggccatggaggagtacagtaacagcgtttgacgggacttctaagcaacatgcctgtaaatgagtagagtgatgacggttgatgggacatctaaaaacaattaataaaaacccttagtagaattccaatgacgattaatttttactcaaccttatcctctacgattaatttttttatcgtagaggagtatagtggcagcgtttgacatgacttctaggaaaattataaagacgaaatccaacaagaaaataaactctaaaaactataagatcctacttttaaaggttctaaggagaatgaatagaaagtggtagatcgaacaagcaaataaataaggagatgacagaagtaaggggtagcaactggtgtaacttttaaaaactataaaattaaaaacacggggatgataaagtttagtctttcaaagttttaagacaacgagatagctatttaataaatttttaagtaaaattatattaaaaatatataattttgtacgggtgctagccgtgcaattgcgcgggccacccagctagataacatctatatgaatgtggacaatgctatatatgaatgtggacaatgctagaaagacttatattatgaaatggaggaagtatttactattctatcggatggcactgtaatcacctctctcataggctttttgatttgttcgtgctaagggaattactattattgtttcttgtgctgccatgcatgcatggtgatggcgtgcagatacctgtgcgattgtggcctgcaccgtggccctggaggggatgcaccggaaggtgtacgaggagtccaacggcgttgggacgttccctgtcgcttggcaggccgcggggagttggaacgagcagctgcggctcgcgtgcgagcgcaaaggcgtctggaaggcgcgcgagggagccaatgtgggcgatgtgctaatcaagattcaggagcttgcgggcgtggtgaccagtgtccccggattgttgatgccactgctcagttgggagaagcacagcgccgggcttacccgggagcgcgtggctgagctcatagacctcggcccctgcattgggagactgtgggtttgtccctggtaccattacttcgataccgataatggctgggtttatcttgggtgcggccgggacaaacttgatagggacgatagcaaagagcgctacagaaatcaggtgggctcgcacgctgtcgtctgcttcgcatatcgattctgcgaaaatggtgagatgcatgtgctcgtgttggacaaccatgatgatgacggcccacaacggtggatcgacgttgaagagctggatgcgatcttcaccctgaccgtggagtgcctaaccaacggaggcgcttctcccccaaggaggtgaattttccttcgggacacacacatatatcaaatactatatatcaaagatttctttatcaaatatatggtctgactagagttgttctcctggttggttcctggcaggcagctcgccgcctaaggaagcatcgccagccgcaagcttccgaaatcgaaccaaacatgccctccgagttcgagttggactttaaaaccttatgtctcataaaacatatgaggcctcgagacgattgtataacctccctgcttcttccggccgtagcatgaagcatcttgagctcctgcttctcttgtctccaaataactactagggaaaattcaccgtgtatccctaaaaaattgtccaatctctcatgtatttttctcattttcttcaatactcctgaatttatccttttcataaccttctcgttagttgaccgttaaattcttaaaaaagagagttgtccttttgtatgaagaaacacataaatttatagagtatatcattgaaatatagaaatttgttgtacggaacttatatatttactagcaaaatacccatgctttgatatgggtaaaataataataataatatatcatatatagaatatagcttttatcaaatatgatagtattatttattttcttgtttttatgtatgatatccacttgattcaaataaatattaaactattatataatataaaaaaattatggactagctaatttataaaattgtaaaagtagtaccgaggatggcagaaccaccaaagaccgataaggctaaggaggccgaggccaccctctgctccgccacatccatcgcgccacttcacaaacaagcaccatcactcctctttctctctgcttccctcgattccgtgaaccgaaggaattcctcaacggagggaaggcgaacatgaagcgtggtgagggcggcctgcgccgcgacgtgttgggtgaaggggagcgccgcatcatcagcgaagagctagtcatggtggctggtaaggttcttgacgtgctcacagttgcgtaagaaaggagacgacaaggaggcgttgtggtcgatgtaggggaaaggggaagcgaggaccgctgtaaccctaagcaaccgccggctgcggcatgaccgtggtggcgcgagctcgctggagtcactggatcgggggtgtacaagaaagggagcgaggacgtcagggcgatgaatgctaagcaccatgtcgatttgcataattatatagggagccaatttgcactggttttaaagatgtgtagcaagagacgaaagatttaaagatgtgagagatgtcatacctggttttacggtgaggggagacgattcaacgtggagcaagagatgaaagaatgcaaaatatactgcgtggggtttacatggcgcttggccaagttgaatccgaccactccacttggaagaagttggaaccgagtcgagagcaaattaaagcgtggcctgcaggagcagagcgcggccgctggactgcgacatggcgtggcggaaactgatatgcgctaccctgccgctctctactctacccagactaaactgtccgtggggaacaacagcaacatagcctacgctaatgcggcggggcacacgcttgagtgcgaactcgagttcgttctcgtgcaagaaactaaggcagtggctgggagtctagataaccagaacagcgaggaagaagggcagcggtgcctcaccgacggtggcagtgccgcggcggccggaagtagaattaatgtgggccggcgatggaacatcttcggacggctctgtggataacgaacaatggtgggttagcgcactggacaagaacagaagaactagctgaggggagcgggggaggaaagctcaccagggcctccctgcaggtggcgtggcgagaactcgatcggcctatatgcgttcgcttcaacgcccattctgtcaggagagtaaggcaagggattcagacagcacacacggtgctggactgctgggagggtgagcagctattggtagagccgtagactcgtagaggttgcgaaccctgcgacgaatggtcgacggtgggtgtgcaggatcaggcggccggcgatgcaagatagcaccaacaccaaactgtcaacttcctccagaaccagatagccagttagccacagggtggttgacagtacttcctccagaagtagatagccacagtatttcctccagaaccagatagcattctcgtttcgtgtaaaatggttaatccggaagtggttatggttagaggaataaacccttataagttagttttactcttgctaaactagcaagttggtactaaacatgcgcacccaactctcatgggccacacatgcctcatcttaattgtgtcaggatgttaccgtggcccaaccggcaaggtgtgctttttcaaactaataaactgtgtgttttgtgtgaaatttttttaataaaaaatgctttaaaaatcaaataaatttatttttcaattttttaatgatcaatatttaattaatcatatgttaattgtgtttctagttttacgtgtagctaatcatccaaattcaatagcccaaaagaacatagcgtaatttctcattttgcatagcaggactttgtcgttacttggtgattgctgaaggttacgaatttgctatattggaaaataccatcattacaattcgtgaaatttgtcacgtgtcaatggaagtttgcaaaattccaaccataacattgccctaaaaaaaatgtttgcacctccatctaaacgtagaaattgtcgaaattaccttttttttttcacattctcctttctctctctgcagttcttctccgacgtggacagctacaccttcttggacgtacgccacctagaccccgccaccgctcgctggcctctgttcggggtcaatatctatacgcggagggagatggccaagtttttccacgccaagagcaggttccacaagagtcaagaccatggaattccactgtagggaaagtttattgatcgctcgagggatatcctcttatttatacatatatctaaatagttataaacaaatttaaaataaattgacaagatagataaggatgaaatatatcacttcacaaacatgcaagttagaatttaatttctacaagttgtaaaaaaaacaaatataattgcgaatgtactataactatttttagttaatttgttctttttattgcaactagtagaaattaaatttggccttgtattttttagagtaatatacactacaacggtcatccacatctcaatcaggcggcaaaccccatatgtgtcgggtatggcgcccgtcacgacgtaaaggttactgatgtgagaagttatctctattgagcatacagccgtcacggatgaagttatctcaatcgggccccaactaaagcctgtcatcgatagctttgacccagacgaccagtcaaataagggctcgtcacggatgaccttatttcaattgggcctcaattaatgcccgtcacggatgaccacaatctcaaacgggctttagttgaggcccgttacggatgagtcatccgtgacgggtttaagttaaagcccgtcaccgatgagtatttcctcccaaaaaataaattctgttttttcgctagcctcaggcctttactagccatgcccgttgtaaaatgaagaaacaaatatatttcacaatatcccagcatccccaatcatatacaatcattcacatacacatatgctattcacatatttcatatatccattattcacatatttcacacatccattggaatacacatccattattcacatatttcacaataacatcttcaagtgctaagcatcaaaacctgcaaaacagagttgtaaattagaacaaatttctaactggcgaaggaagaggttgaggcggcgggcgtgctcggggacagcgggggacggcgtggaggaggttagtggaggacggcggccggctcgaggacggcgtggaggaggtcggtggaggacgacggccggctttgggatggcgtggaggaggttggtgtaggacggcgggcttgggcatggcagtggacgtcgatgcgacggcggcaaggacagcgtggaggaggtcgacaccggctgatgtgggctcggggacggcgccaggctcggtggatgacaacgctgggctcccagacagcggcggcagcacgagggctcggggacggcagctgacagcggcgacgctaggacgtgcagttagaaaaatttttgatctagatatgagcaaaagtgaaaccctagtcaaagcattatctcaatcggggtaatttatactgtgcaataaatatctgtaacggtctaatagttatctcaatcgggcctcaagttggagcccgtcacagatgacattcatctgtgacgggcctaatagttatctcaatcgggtctcaagttggagtccgtcacggatgatggatatcggtgacgggtttctgttagggcccgacaaaaatatcatcggttatctttatcgggcttcaagttgggctcgtcaccgataggtgtcatccgtgacgggctcgatttttatgcacatctaacatgtcagtgtgagtatatctttgccggcctctttttgggcccgtttgatgacttcgttgtgacggcccgcaaaatctaggcatgtgaggggccgtctatgagaggatctgtaatagtgatatttcgtactaatctatattgttaaatttttttaaaaaattataattatatttagatgatatgtaaacaataagtggacaatccctttaagggatgaaaatctatatctgcatatgttttttttagagaagggtatttttacccggcctggatatatacggccattgaaatagggaacttagccccgcaaacaacccaatctgaaattcgctactatagagatttgaactcaagaccttgaagtactatatatacggccattgaaatagggaacttagccccgtaaacaatccaatctgaaattcgttcctatgaagatttgaactctaagaccttgaagtactactcaggtcactgcaaccactaggctacgtgccctttcgtatatttgcatatgtgtgggatagagaaaaagaaaaaggctaaagaaaactagaaaaagaaaaaggaaaagcgcgcggcgtgtgtttctcgcgcgtatgcacgaattcgagctcgacggggcttctccggcatctcatggcttggataaggattgtgaatggatggcgaaggtcagagcagcaagccagcaacagcgtcagtacagcaaatcggaaggctaagaacacgctaatttaccgttatactgtaccagaaccgtagcgggactttatcataaaaaaaggccggcacttgatgacctttgtcgttacatacatttcctttattagaaaaaaatggctattttaatcttattatcgttatatgtttagttaaaatgaaattcattataaaaattcgttttgatatataactttttagaaaattatgaactgcaattaagagtccgatcatctcaagttagtatttaagtttttttaaagatatttcttatacgacttcttctgtatttcaaaagcgaacaaacttaaaactaactcaaatacggatatggatatgtatttctagaaacgaacgaacttaaaaataaaccgactcatacataaatgacgtaccaaattattggtaaaaatatcttcaatttttataatagtagagatacagagtactcacgcactcccacctacacttaccatgtggatgcaaacacgtacccctccgtaaaaaaaaataatcaaatcatacgtgtccagattcgtagctaaagtttatcattttttggacaaagtaatacattttatttcgaagaaacttgatagatttttgaagtggacgaaccattattatagacacctcgctatcaaggttatatcatctagcacgaaataaaaatgctgttaaatcctaaaataaatctagcaaaatatgagtgttgtgtcacattaacaacttaaatatcttactcgttccgtttcaaaatacaagagaattttagtactgtaaatttgaacatgatattttagtactataaatctggatatgatcgtattagtaatatgataaatatatgtatttttgaacttcaatatagtcttcgagatgctaatttaaccaataatatatataaaactaagatttttttaaataaaaagagttacatattatgataactagaaaaatgcatgtgcgttgcaacgggtgattgttattttaatcttattattgttattgtcggtgacatgggaccgggagtatcatgacttagagacttgaggcagacatgatcacccacgtggtctaaccccctcgggggggggggggggggtcgggcccgagggtgatacggccgcccttctctttgtctccccgaggggtcggaccgctcccgtctcggccccgagggccgaggcgccccgaccccttgtgggttttgcgccgcgtatatggggtaggtgagcatagcggggctcacctaaccacatttattgcggtttggacgagcgcgtcacgccgcatgtaacgcagtgcagcgcactcgtttatccggtctgtgaccagtcacagaccgatcagatcgtgggttaggtggcgacaggcggtctgacgtacgcctcgccccatcccgtcaggatgagagcctccaagcactcatccctagccggagccggcgtgttagctcctggagatggcacgttggtcccggtcagatatataccaggcttcatcctaaccattacaagcaagacattgtatgaagaggggcgaacatgcagattgataaactgacgcgtggtggacaagaatgaccgatttgtgaccggtctgacattggtcatgtcgtcagcagacagccatgttcccacgtcgcgcctgcttccggcggaagtggaggtaggtatgggccgtcccatcagaaggtcattcagacggcaaccatacaagtctccgtctgtttatgaaaatataggataagtccccacaaaaaagagagagatggtgcatgtggtatccccttgaggtataaaaggaggaccttgcccacttagaagggggatattttttggggggggggatccagaacgatcagagagggagagagtaagagctctctggttctccagctcttttgtagcttcttcatacatagatccaccaaaacacaggagtagggtattacgcttctcagcggcccgaacctgtatacatcgcccgtgtcttgtgtgtttccattctcgcgaaccttccacacaccgagagcttagaatctcacccagggcccccggccgaaccggcaaaggggggcctgcgcggtctcccggtgaggagccccacgctccgtcatctggcgcgccaggtagggggttctgcgtgtgttcttctaagctctcgcactctttcgtgtgcgccaagcttttcctgttcagcccaatggccgaacaagcaaaggcgcacagcctctctccgagtgttagcggtgacgacggggagccgaacccacgccgtcgagctcgtactccaccgccccttccacgccaaagtcctaggcgggaggaggcgctcgagagggtcgaaggatccgcgacttcgacatccacgggtgatggggaagggcggcgagatggggagcgtcgcctcctcgtctacggcgacggcagcacgccccagggcgcgctccaagctgcgggcgcgctcctacgtcacccgcccattgtccctgacccggagtctccagcccaacgttggctggacgacgtggccaacttggtcatgacggcacggcagcgcctaggtgctggtgggcggtcctccgccaccaagacctctggcgctgctaccaccggctccgtgtcgtcaaggcggagggcgtggcgagcggcggctgttgctcgccattcggccgccactccttcgtcagcgcctccgacccaggaagatctgcgtggggggccggatgcccgcatcagtatcgagcgccggcgtaatggccgacgtgctgcccacgcaacggagggcgcctcctcgtccggagtgtcacatcaacacggacgcggggatcagccctccgtgcccccggttggtggtgtcggctgtagagcctttgtggcgagccttcggaacgtccgttggcccccaaggttccggcccaccatcgccgaaaaatacgacgggagcgtcaaccccgccgagtttctccaggtctacacgaccgggatcgaggccgccgggggtgacgacagggtcatggcgaatttctttcccatggccctgaagggacaggcacggggttggctaatgaacttgccacccgcgtccgtccactcttgggaggatttgtgccaacagttcaccatgaactttcaaggcacatatccgcgcccaggtgaagaagcggacttacatgcagtccagcgaagggatgatgagtcacttcgctcatacattcagcggttctgtcaagtccgcaacaccataccatgcatccctgcacacgcggtgatctacgcgttcagggggggtgtgcggcacaaccgcatgctcgaaaagatcgcctccaaagagccccagactaccgcggagctttttcagctcgcggaccgagtgactcgtaaggaagaggcatggacctggaacccctccggttccggtgtggcagcttcggccgcccccggatccgctgctcggacagggcggcgtgacaggaggaggaagaagaggtcagcccattccgacgacgagggtcatgtcctcgccgtcgagggcgcttcgcgggccacccgaaaggggaggcctgcgagcgacaaaaagaaggaggccggcgctcccagtagggagcgcccaaccggcaagtggtgcatcgtccacaacacctcccttcacgacctcgcggactgccgcgcagtcaaaagtttggctgagcggacgaggaagtgggaggaggagaggaggcaggagcgccgagagggcaagtccccggcggttccttccggcaatcggcgaagtgaggccaagcagaaggcccccgccgaggacatcgatgacggcgatgatgacctaggtttccaagagcctggggccaccattgccactgtcgatgggggagcgtgtgctcacgtttctcgccggagcctcaaggccatgaagcgagagcttctggccgcgacccctactcatgaggcgacgcgccgggcgcggtggtcggaggttgccctcacctttgaccagaccgaccacccaccgtgcgttgcccggggaggatagatcgcaatggtggtttcccccactgtttgcaacgtgaagctggggcgtgtcctcattgatgggggagcagccctcaacatcctttcccccacagcccttgacgctatcaaggccccggggatggtgctccggccgtcccagccgattatcggtgtgacgtcgggtcacacttggccgctaggtcatatcgacctcccggtcaccttcggtggatccgccaacttccgcacggagcgggtgaactttgatgtggcggacctcagtctgccctacaacgctgtcctagggaggcccgcgttggtgaagttcatggcggcggtccattacgcctacctccagatgaagatgccgggccccggtggccccatctctgtccatggcgacctcaaagtcgcgctcgcttgtatggagcagcgcgcggaccacctcgccgctgcgtccaagcccgagggtggcgacgagaggcttggcacctccgtccccgccgtcccgaggcagcggatagtcacgtgcgacgaggtcccggtcaaggaggttgctgatgcgaacccgctagggtttgtggcccgatctttcgatgagaggtaagggataactcgattagatgaagacgacgttcacggcccgactacaactgtccaaagacgctgcgccttagcaaccgatacaccgtctccaatggtcgccgcgaacttgtggtgcgcgtcaacccggccacgagggcactcgtcctgcaagcaatcgaagaacaagcaagaacaagtaggacaagcactgaaattgctagataaagatgaaagtttcactatcaaactcaatatggtggggttccgattacaggcagacgggcggtttagccaacacgcgcgctgcgagctggtagcaagaagctatctctatcatcaaaacccgtctgttcttggcgacgactagaggtataaaaagaggggaagaactaccatagggtcgtgctccaaccctaggacgcgcccctaatgggcccaacttggatacacagcccattgggccaaaagaggtgacgcaacaccatggacagaaaatagtcgggagtaaaatgacaattgcggccgctccagaacagatatggacatgtggctggatccatttgaaagtagacttgataagctttccatgaagtacttgcacgcccaaatcggagttcgcatgaagtcgtggcggccgtcagaagttggcgctgccctgcagtccgaatccaccccgcgcgaatcctcttccctttggatcatctccatcgttcctgagtaaaacacgagtgcacgcgtctccggggtataaagacgaggaatatgaactcaagaaagaactcacctgataatttagttgacgtgcacgagcgcgggtaataggaccatcatgctgtacatgggggacgtggatgtatcgatggtgttgatgtcctcatcagttgccctgggcgacggcccgtccaagaccacacgaatcggtggtcttctggatggcaaatagaaagacgcgctcgtctctttcctgcgggcaaacgctgacgtcttcgcatggagaccggcggatatgcccggggtccccagggaggtgattgagcaccgtctcgccgtgcggtcgggcgcaaggccggtccggcagaaagtacggcggcaggccccggaacgtcaagccttcatccgcgaggaggtggcgcgacttctggaggccggattcatccgcgaggtcatccatccggagtggctggcgaacccggtggtcgttcccaaggcgaacggcaagcttcggatgtgcatcgactacaccgaccttaacaaggcatgtcctaaggacccttaccccctgcctcgcatagatcagattgtcgactccacagcggggtgcgaccttttgtgttttctagatgcatactctggttaccatcagatttgcatggctagggaggatgaggaaaaaactgcgttcattacccccataggaacttattgttatacgacaatgcccttcgggttaaagaatgcaggtcctacttttcaacgtactacttgaatttctttgggtagccaaataggacgtaatgttgaggcttatgtcgatgacttggttgtaaagacgcgcaaccaagagaccttactctcggatctagcggaaacttttgagagtctccgctccgcccgcataaaactgaaccccgataagtgcgtgttcggtgtacctgcgggcaagcttctcgggtttttggtctctgcccgaggcatcgaggccaaccccgagaagatacgagctatagagcggatgcgcccccccagcaagcttagggatgtgcaatgcgtcaccggttgcaaggccgccctaagtcggttcatatcgaggctgggagataaggcgctacccttatttaagcttctcaaacgctccgggccgtttacttggacggaggaagctgaacgtgccctcactcagttgaaggcgtatctcagctctcccccagttctggtcgccccggagccaaatgaacctttgctactctacttagcggcgaccccgcaagtggttagtacggcgttggttgtggagcgcgatgaggacaatcctcattccgcgcacccccaccctgtgctggcttggcccgggagagagcagggaggagaggccctcgagccgaacggtggcccaaggcccccgacgaccggagcaggccctctgcccgcttgtcaggcggtgccaggtgcccccgacccccaggatggcccgagggccactgcgggaaggccgcacctatcgccctctgaccccgaggctaaccctgtgccgactcgacccgggagagagcagggagaagaggcccccgagccgaacggtggcctaaggcccctgacgaccggagttggccctttgcccgcttgtccgacgacgccaggagcccccgacccccaggacggccccgaggccactgtgggaaggctgcccctgtcgtcctccgaccccgaggtcgtcggcacagaagacgagtgcaccccgcgaggccgcttggacaaagagcgccccagggatgtggcccctagcgaagaggatcggccccaccgaaaggtgcagcggcccgtctactttgttagtgaggccctccgggacgccaagacccgataccctcaggcccagaagatgctttacgctattctgatggcttcgaggaaactgcgccattatttccaggcgcatcgggtcacggtggttacgtcttaccccctcggccaaatcttgcataatcgagagggtactggacgggtggtgaaatggacaatcgaactttctgagtttgatttgcactttgaaccacgccacgctatcaagagccaggccctcgccgattttgtggcagagtggaccccagctcccgagcccgtctcagtccacgaggccagctcgggcccctcgcagctgcctcacaccgcccactgggtgatgcagttcgacggctccctgtctcttcagggcgccggtgcgggggtcacgttgacctcgccgagcggagacgtcctcagatatttggttcgccttgacttttgggcgaccaataatatggcagagtacgagggactccttgcgggactcagggtggcagctggactggggatccgccgcctcctggtgttaggcgactcccagctggtcgttaaccatgtctgtaaggagtaccggtgctctgacccgcagatggacgcttacgtgcgccaagtatggcgtatggagcgccattttgacgggatagagcttcggcacgtgcccagacgggataacacggttgctgacgaactctcacggctcgctttctcgcgagcccagaccccacctggcgcctttgaagaaaggcttgcccagccgtcggcgcgacccgaccccttaggggagacggacgcgcctgacaggcccccgaggcccgtcggagtccaggcctcgggacccgaggggagtgctcccagctcccttagattgattgcttggatcgctgagatccaagcatacctcacagataagactctacccgaggactgcgaagggagtgaacgcgtccagcgcatctccaaacactacgtgctggtagaagggaccctctatcggcgcgcggctaacggaatcctcctgaagtgcattcctcgggaacaaggcgtcgagcttcttgccgatatccatgaaggcgaatgcggagcccactccgcctcgcgcaccttggttggcaaagcctttcgtcaaggtttctattggccaacagctctcaatgatgcggtcgacctggtccggcaatgcagagcgtgtcaattccacgccaagcaaatccatcagccggcccaggccctgtagatcataccactttcatggccatttgctgtctaggggctcgatatcctgggaccgtttaggcgggccccgggcgggtttgagtatctgtatgtcgcgatcgacaagttcactaagtggcccgaggcttatccggtcgtcaagatcgataagcactccgcacttaaattcattaagggcatcacagcccggtttggagtgcctaaccgtattattacggataacggcacccaattcactagtaaacttttcggcgattactgcgaagacatgggcatcaagctctgcttcgcctcacctgcccaccccagaagcaacggccaagtggagcgcgccaatgcggaaatcctcagaggccttaaaaccaagaccttcaacatcctcaagaagcacggcgattcgtggatcgaggagttgccagcggtgctctgggcgaaccgaaccatgccaagccgagcaaccggggaaacgcctttcttcctcgtctacggcgcggaagcggttctcccatccgagctcaccctgaggtcccctcgggccaccatgtactgcgaggctgatcaagatcagcttcgcagagatgacctcgactacttggaagagtgaaggcggcgcgcggccctccgagccgcgcgctaccagcagagcctgcggcgctaccatcagcgccacgtccgggcccgatcactctgcgtcgacgacctcgtcctacgccgcgtccaaacgcgtgctggattgagcaagctctcaccaatgtgggagggtccgtatcgagtgatcggcgtcccccggccgggctccgttcggctggccacgggcgacggcacagagctgcctaacccgtggaacatcgaacaccttcgtcgcttctacccctaaagggggatcgggtgtcaggtttcgggctcgggccaaccccgcacccccctcgggcgtgcagggttggccgggggctaccacatatgcatattcttatttctcttatatctgtatttcaataaaagcattttcgatttcctaaaggctgtatctgtgctgttgtttccttttgaaggatcttgacttgaaataggtcactcgtgttcaatcctgccctcgggggctcgggtcggctaaaatcgccaaacggggcccagaaccgagccgtgccccggggcgtagtgaactccgggggggaatcggcaaaaacccacaatcgggtcacccataaccctcggtcaccacgctcccggcctggccagtctcgacatgtggatctccccaggcactagccccgacccgagccatttgaggactaggacctgggcacgagcccttgttcaaagccaagacacaaaaggaccgcggcacagacatcctcgtctcatacacacaacaaatagaattgacacaaaaaatttcctctttatttgattgcagattaaattagtctatacaagaagggggcccgaaggcctcggaagaagaaaagaagaaactatttaaagattggcgggggcctgggggctcactccgatgcactcgggtcgccagcctcgtcgccactgtcgcccactccgccgtcatcgtcctcctcgtcggagttgagggcgaacgcgagccgaggggccgaaccctcgaagctgtggacgatatggtcggcggcgtcccggacctgcgcgcgcgcgccgtcctcggtcccgggagggaactcgtccagcgccgtccatggggagaagtcgggatccctggcttggtaactcgccagtacgagctccaccgctcctcgggcgaggtccctcgaggatgacttaatcgtcctctcgagctcctcggggagccgttggagagtcccggctatcttcgagaggcgctgggtgaggcccccctggttggcggcgtacttcgcagtccgcccgccccagaggcccgcttgccggccggcgcggtctagacgggagacggcgtcccgaagcatgccgggccctacctcgcctgccaagcggagggcctcgacctccccggcggacgagtctagcgcgccctgcagatcggcgatggtgtgttcggcagctgcgaggcgggcggttaagtcgctttcgcccgcggccgccccgctgctgcgcgccctcgcgtccaactccttctcccgcgcctcgagctcagcggcccgctggttcagcgcggccctctcggcgcgggcaccttccagattatggcgcgcctgctcctcccgcgctgcctcgcggagggacaggctgtccgccagccgttgcgccgcggcctcggcctcctcgagagctcgctcccgctcggtgagcgcgtcctcgcggaggcggagcgcggactcctcttcggcgcaggcggcctcgtgcgcagtcagcgttgcctcccggatggcaacggcggcctcgcgatccgccaggtccctctccacggcgcaggcacgctcttccagcgccatggcacgggcctcaagggcttcttcgcgccgccgggatgccacctcggtctccgctgcccgccgttctcgggcagcggcagcgtcaaggaccccccgggcggcgtcgagcttcttccctagctccgcctcccagctcccgtattgaaggcggagggtgtcctgcgcctcgttcatcacggtggtggcgatgagggcagccccccgctcctcctccacctccttggcgatctcccccagcaccttccgacgggtttcgagctctgagacgtgccggcggtgtgccttgcggcccacctccaccatggcctccaccgagcgtcgcccctcttcgacacgcgcccatgcggcgtcgagctccgcccgctctgcttgcagggcctccacctgggcacttaacccgtccaacaccgtggtgtttgcgacggccaaggcctgcagaaggggttctgcgctcagtggagcaacggaaggcgtggggaagagccgcctcgaagaggatgccgcgcggcttggcccgccgatggacgtgccggactcggggatgtcccccggacctggtttgtcctgagcgtcgcacgagggagtgggcccaagcgatgcgcccgcggcctcgtcgtgagttgcctcggaagtcgtcgtcgcctcggcctggcgaagtctggcctcctcccgagcggcttcttcagcttggcgagctcggacggccacctgggcagcttcctcggcttctcgaaggcgatctgcggcctcttgccggtcagtttcacgggtcgcctcggaggatgtcgtcgcctcggcctggcggagtccggcctcctcccgagcggcttcctcggtctggcgagcccgggcggcctcccgagcggcctcctcggcttcccgaaggcgatccgcggcttctcgccggtcagattcccgcctccgggcctttgtggtcgccgggtcctcggcctcagactggccggacttggaatggcgggagggacgcgacgggatctcgctgaaacagaagaaagaccagaagacaaacaagatggatgagtgaaaactcgcgttgagggaatgaatacggccacgatgggcgtgggacgaacctgcgagggggtcggttaaacgaccaccttggaggggaaataaggtttccccgggatggttctgtcccccccatcttgcggagccgtttcttcttccgctccccctcgggctgcgacgtcggcgtggccccctccgggcgcctgctgctggcacgcgccgccccgccccctcggcgaggagatgggggaggggttccttcctgcttcctcttcccccgggcatcggcagggcggccgctccccaggcccccgtcgcggggcccagaagcacgaccccctcccggggtagattgttcccccctgcggctcccgcccgcgccatcgtggcctcgaggagcccgctcctccgacgccccgaccgcctgcatgatggtcaggatggaggcgcggtctggatcgctgcagagggggaggactccttgaggaatgagggatgcctccacggagctgagattcagcacccgttggaccactatcttgaagtcctcaggagcccagtcccatttgaccccctggtgggtcctcatgtagtcttcggacccggtgtactcccaggcgccccgggcgcgctgctggagcggcgcaatccggcgacgaaggtagtcgccgtacaccatggcccctgtgagcccctgggatcgcaggcccgccaagcggtcgagaacggcgtcatagccatctcccagatctaccggcgcccgccagctggaggcctgcgctggaggctggctcggaagtcggaggcgcgctttgtcggcgaggggggtgtagaaccagtcgctcttccagtcatcccacttcttgcggaggacgcagggaatgtagcggttcagcaccggcccccgcggctggaagtagcaaccaccaaccaccgacggcggcgacaccggctgtacggtgaagaaccaccggaacagccgaagggatgggcgcaccccgatgaacatctcgcacaggtgcgtgaagatggccaatgtcattaccgcgttgggggtgaggtgcgccatctggagatcgtaaaactccagaacatccatgaagaaagaagaaaatggcggaaccagccctgccattgcaaaagggaggaagaagacggaccgccccgggtagcgtggcgctgggcatccctcgcccagcgagactatctcccggccggtggcagattccggcatgaagcggcgcggcagcccggcctgtctctcgctcacgatgcgggaaggcggcagcacgctaccgtcaagcggagcggagccccgtgccatgatgccggaagaagagatgtttgagagcgagcgcgtgtggcgaaggtagggcacaagaaacaaggagttagggcgcaagcggcgaagacaaggggaataatggcgagaggaaggaagcaaatctcttcctcggcgactttatacccttgccaacgctgtgcccggctcctcgtttctcgcgcccactatcttgccccctcgtttctcgcgcccacgcttccactaatcctattcgcccgtttgcggtgcatgaggtggataagcggctgtggcagtcgagatggaacatctcgtgcgcgcattaattacgctcgccgaccgaagcgccatcaccatatctccaggaaaaacgaaccggcttgtcccgatttttagaccggccccacctgtcaccaggccttaggaagtggcgtcacgcccgaccgcttccctcgaggagggcgatcgccctggcataacgccgggggctactgtcggtgacatgggaccgggagtatcatgacttagagacttgaggcagacatgatcacccacgtggcctaaccccctcgggggggggggggggggtcgggcccgagggtgatacggccgcccttctctttgtctccccgagaggtcggaccgctcccgtctcggccccgagggccgaggcgccccgaccacttgtgggttttgcgccgcgtatatggggtaggtgagcatagcggggctcacctaaccatatttattgcggtttggacgagcgcgtcacgccgcatgtaacgcagtgcagcgcactcgtttatccggtctgtgaccagtcacagaccgatcagatcgtgggttaggtggcgacaggcggtctgacgcacgcctcgccccatcccgtcaggatgagagcctccaagcactcgtccctagccggagccggcgtgttagctcctggagatggcacgttggtcccggtcagatatataccaggcttcatcctaaccattacaagcaagacattgtatgaagaggggcgaacatgcagattgataaactgacgcgtggtggacaagaatgaccgatttgtgaccggtctgacactggtcatgtcgtcagcagacagccatgttcccacgtcgcgcctgcttccggcggaagtggaggtaggtatgggccgtcccatcagaaggtcattcggacggcaaccatacaagtctccgtctgtttatgaaaagataggataagtccccacaaaaaagagagagatggtgcatgtggtatccccttgaggtataaaaggaggaccttgcccacttagaagggggattgatttttttggggggggggtccagaacgatcagagagggagagagtaagagctctctggttctccagctcttttgtagcttcttcatacatagatccaccaaaacacaggagtagggtattacgcttctcagcggcccgaacctgtatacatcgcccgtgtcttgtgtgtttccattctcgcgaaccttctacataccgagagcttagaatctcacccagggcccccggccgaaccggcaaaggggggcctgcgcggtctcccggtgaggagccccacgctccgtcagttatacagtttaattaaggtgaaattcactgtgtgaatttgcttggatatatatattttttagaaagtcataattaagctgtaattaggagtccgatcatgtcaagttagcatgcaagtttttttttaaaaaaagacttcttacatgactccttctgtgtttccaaaagcgaccgaacttaaaaactaactcaaatatgtaaatgtatttccaaaagtgaacgaagttaaaaaccgactcatacacgaatgacgtacgaatgtaccggcaaaaacatcttcaattttataatagtagagatttgtttaatgataaatttagtaactttaattttacatgattaagcttttttctaattaatagtcaaagttaaaaatatttggcttaatactatattaaaaatgcttatattttagaacgggcagagtatatttcattcaacaaaaatttctttaggacggatggagcagtaaatactcagccctactggataagatatgctcagtcgctgtcgttggtatacaaggcagagggccaggttaagcacaattgcactaatgtcccattccaattatttcagtaaggtgtcccatcaaaaaaagaatatttcagtacgtgtttttaatagaaaaggcgtctcctcgtaagcacccggaaattctgctcgtggaaataggcgctgctcgtggaaaggcctcactttcacagtagtaataaaaatgaaccagcaattccgtaataaaaattctgatggcgtcactttcgccgtcccggccagaaaatacgaagtaaaaaagaaccagtgatttaagcgcgtcgatcgatcgacgagggactatgtatttaccgacttactgagaattccaggcatcactgatcaaccgtactaacaataagccatagctagtgatcgatcgatggccggcgtcgtagaaaccgccgacgaagctacccaagcaccagctgttgcttccataagtaccgcagcagcatatgcacggccggtgggcacactgcttgatccgaagctgttcatggctgctcgccgcggtgacatcaacgggcttaaggaacttcttaggccagacgacgacgacgacgacgacgacgacgaggtagtcatcgtggacgtcgaccctgtgcctgctgctccctcctcctcctcggcctcggggtcgtcgcatcatcagctccaacaacttgatgatcatggggtgaccagcaacgagggtgactccctactccatgtggtcgccacccgcagcggcggcggcgacggcgaccggttcgtcgcctgcgccaacacgatctactaacacggcagcagcaacggcgccctcctcgccgcgcgcaaccacaagggcgacacgcccctgcactgcgccgcccgcgctgggggtgcccgcatggtcgcctgcctcgtcgctctcaagacggctgaggtggtggccgcgcccgcgggagacgggccaggtgtggaggagttcctcaggatgcggaaccagtgcggggagaccgcgctgcaccaggcggtccgcgctgcctgcacggcctgcatagacgagctgctgctggtggatccgatgctggccaccgttccacaggagggggagggtggcgcttcccccttctacctggcattttcactgggtaaactggatatcgcacgccatctgttggacaaaactaatggccagttgtcctactctggactcgacggacaaaacgtgttgcatgcggctatttctcgtggtcaaggtacgtgaaaatgatactaagggcctgtataaatcttctggcaaaatttttcaccctgccacttcgaatgtttggacgcatgtatagagtattaaatataaacgaaaaaaataactaattatgcatattgcgtataaattgcgagacaaatcttttaagcctaactagcatgatggcccgcgcagattgcgcggctaacatcattatattttctctcatataatagcatatatatttttttattatattattaaaatatattataatgacaatataattttaaattttacaataactttacgaaactactaatgtataatattcatattatattttatatacgtattagttattaattatttttaatatcaaattttagttatttgtaaattatatatatttctatatggactctagacttgtcttttaatatattttttaattctgaatttttattatttctaattgtatttctatgtggactctaaactcatctttcaatattctttaatttttaatttcaaattttatttacttctaaattgtattcctatattgactttaaactcttcttcctatgtttttcttaatttcgaattttagttatttgttaattgtatttttatacggctaaacactacttttcattttattatgtttcttctaaattttacctagttttaaatttctatatagactctatactctacttctaatattccttattttttaattcttaatttctattttttttcttaattgtatttctatatggactctatactctacttctaattttccttatttttaattccgaatttctattacttcctaattgtatttctatatgaactatatactctaattctaatattttttatttttaattccaaatttcaggtattttctaattgtatttctatatggactctagtctcctcttctaatattccttattttttaattccgaatttcaactatttctaaattgtatttctatatggactctagactcctcttctaatatttcttattttttaattctgaatttcagctatttcaaaattgtatttctatatggactctgcttttttatatggactctatactctacttctaatattccttatttttaattccgaatttcagttatttcctaattgtatttctattggactctagtctcctcttctaatattccttattttttaattccgaatttcaactatttcctaattgtatttctatatggactctagtatcctcttctaatattccttattttttaattccgaatttcagctatttctaaattgtatttctatatggactctaccttttctttttctccgattaatttgagaatttataggctatgagagcgaacgtggaggctcctttttctattcctttaataatataatagattgctccatgattcgacaatgtggtgctacagtaaacatttgctaatgacagattaattaggcttaataaattcatctcgcagtttatatgcgaaatctgtaatttgttttgttatagtctatgtttaatacttcaaatatgtgtccatatatttgatgtgacacgttaaaatttttcacccctgatctaaacacagcctaacactacgctagatcggctcacatgtgatgggtcaaaagtacttgtcacggatggcctcatctttaatggattaataaggccataataggtgaggccatcggccgaggcctgtcatatttatttggttacctgtgatgggccaaaatttacacctgactgaggtctacctttgccgggtgcaaattctggccctttatcggtataaatttcagcccaacacaagtaaccatatacatgtgatgggtctcactattttagccaatgattgcaatttcggttgaagttggtcaaagtttatttaaattcagttaaaatttcggtcaaaaaagtgcaaaaaaatcccgaaattttggtcctaccgaaatcaccaaaatttctgccggaatcaaaagtgtaaaccttgtgttctaacctgtcaaaggtgagtttaactcatctctgatgggctcaaacactgacccgttagaggtgttggaaccctatatatacccttaccgtcaattgctttccatctcaatcctgcacacttttcacttttcgggtggtaaggtaggaggcgaatttttgctggatgcatgcatcttattttgcgggctaattaagagtgatcgagattatcacaattaattaaatacaaactgcaactgcatatatacataatacatgcatgcagcgctgcctgtgcttttggagtggctgaaggacgtgacggtggacgtgcaacaaggcgaccgtgctatcagggtgcctcttgtatcgcatctggcgcagcaaagggaccatcagacggggagcacgcctcttcacctggctgcatcgctggaagggtggccatacgtgggcattctttctaaatggttcccagatgtttggccgcggccgaaatcagcagtcgcgctgctgctagaagccaacacatgtgcagcgtatcaaccggacgctgaaggattataccccatacatgtggctgccttggctgacagcctcgacgtagtcaggaccatgctgcagaaatgcccggactgcgccactttgcgagatgccaaagggaggacgttcctccattccgcggttgaggcggagggatacagagtagttgaatatgtctgccgccgaatgccaaaagaattttcgtccgttctgaacatgcaggataacaatggggacaccgccctacaccgagctgtccatctagggaatctgccggtttttaactgcctaactcggaatccgcatgtacatctgaacataccgaacaagtatgagttgacgcctcttgatctttcatggattacagtcccttcatcgttttattatgattcggtaagttactagtgctattgttcttatttcaagaggcagttccctccacccaaactttataagttatccctccatccaaaagtttaatacctatttcattttaccatcaaaactaaagagtaattaactcatccactacgtaacaaaaccattaaattatacacaaacaaataagtaataagatggtttctcggattctggtcaacaatttaatttagggactatctatacaacattcaactgaaaattagcctaaaaatctatcaaatgtaactgtaacataattacaatgtaattttcataattacactatatttatactataattacatatgtaatttttataattacactatatttgtactataattacatatgtaacttgcatgtaactcacgtgtaattatagtataagtaagatataagttcaagctagatcataaaaatatagtagcccaatggggcagtcacgccttcatcccatgaggtcaaagatcgacccctaaatatggttttgtttttcttcctaaaagcacatatcttgatgcgtattaaactgttatagcatgaatctaggacacattcaacggtttagaaagtgaaagatttagccataaaaaatctgtcaacaaatatttagcaattccatttaatttagtatatagagattacaaatacggtttaaacttttggaaaaaccaaaaggtgaaatagattttagacttttgaatggagggagtaatatttttatacaagatcattgcttaaatgatactagtatattaactgttcattctcgcagaatccaaggggtctcatacaattatcattgcaatttgtgggagctccatgcggtgcaagtcgaccggacctcttatcccaaaaacacatcccaaagatagacaacggcaaggtctcggcgcatctaacaaatgcatcgcaaatgctgggcattgtgtccgtacttgtcgcgaccgtgacattcgcgtcagcattcacgttgcccggaggttaccaaaccgggtcggataacgcggcaggcacaccactgcttgctgggagctatgcctttgacgccttcattttatctgacacgctggcattcatttgctcgtgtatggcgaccttcagcctgatcttcgctggggtccctgcaatggacatctctatacgctgcaggtacttcgaaatttctgccctcttgctgcggagttcgggaagaagctttgtggtcgccttcgcgttggggctatacctggtgctggctccagttgctcacacgatcgcgactgcggtctgtgtgattatctttgtgtcttcgctctacgggaattcggaagcctggcagatccttcgtgtcgcagacatggcccgtgctagattgggaactcgaatgcatgtagcatggactttaggactcacgttctataacgtctttgttaatttgtttttgaacttctggtccttcattataatctttggcctcccagcagtaattcggaaggttcatgcaagggagtagttttcgctacctttccatttccttcgttagcattcggttaaaactaaatctccatgtgatcaattagcaagggacgcatgggctatatacatgtatgtaatcatcccatgtacaagattcatgccccttcatgggctatatatatgtatgtaatcatcccacactactgaaaaaattatctttgttggttcactcaaaaatcacattagtcctggtttgagtaaaaaccaggattaaaaatatctttagtcccggtttgaaaacacacaggtattttttgatcattactccaggttagtaacaccaaccggaactaaatattacttttactcctagttcaaaaacatatcagagccctgttatttttagtcccggttggtgtccatctttagtcccgattgtttataccaaccgggtctaaagttaaaaaaagttgcgaaaatccttgcaccgagccacgcgcgctgcctcgtccttatcccctcctcttctcctcctcccctctcattttctcgatctcctccacctcctccccctccccctctcctcccccttcccctctcctcccctctcccctccctcctctgacgatgacgacggcgacagcgggtggcggcccggcggcgcacgatgcggtaggcgggcggcagaggtcgggtcgccaaagcggcagcagcacacggccgacggcctaccctccgccagatccggtgggaggggaggccgggtggcggcggacgggcgaaggcggcctggcggagacggccgggcggcggaggccgagaggcggcacacggccggacggcgtgttttgtgaaaattttatttttggaatgatttgtaatttttgttgtagattattttagattttgggatgattttgtgaatgactcgtggatgtggatgattttgtggatgggctaagaactgtggatgatttgttgtgcatgatttggtgatgatttgtgtggtttggggatgatttgtggggatgagggtgacaataaatgcaagaagcaaaaaaaaataaaggaaagaaaaaagcctaaccaaccggactaaaatgggactaaaaatccattgagtatctttagtcccggattggtcgtcccggtttacaacctgggactaaaaggggttataaaccgagactaaagagcccttccccagtaatgccatgtacaagtgaaaagtaaatacaagaatcattcatctctagagttctttacttctaacatgttatcacgcacgttagttgttccacttaacgatagaaggccaagaatacgttcttcgtcaacaggagattggtcgatttcttccaaggtaagaacatgaatcaatttcattcttctacctttgccatcggcatcgagtggctcttccccaaaacctttcgcaagatgccgcaatggtgttgccatgccatggtcactgctaaaaaaaatactcattggtgctggctccaaaggtcttataggtgccagatttggaaccggcacctataccaccgttgccgccaccttcaccaccacacgcgtgcgacgtgaagtaggcgggtgccaggggaggaggggccaccgccgccggcacgcggaggagaaggggggaggaggggtggcggatggagaggacggtggagaggaggagaccagtgtgagagagatggagaggaggcagtctcgaaaatataaggacggagaggaaggatgatggcctattttttttaataggtgccggtacctatagttatattataggtgttggtttttttaaaagtccaacacctgtagtattggtacctgtttttctctaaaattgatacctgtaatgtaagtgtaggtgtcgattcttctaaaaaaccgacacatgtagtattggtaccagttttttccctaaaactgacacctatgtgtttaaaggtgccggttctatatttttttcattgtggcagaggtgagaaaaggggtataggtatcggttttaaataaactggtacctatgggccagtcgtagtagtgggtctttggtccgatattgcacggagaaatttggtgccgcccatgcttgcatcttcgttggcaaccccgacggcaccggccttgctagctccggcagcatcggcgccaccaccacagccgacccattttgactggccacggcaaaggcgctggccatccactcaaatgatggcatcaccttacagggggaggatttttttttgaacttttttatttttaaattataaaaacagaccattctaaaacttattacagaatctaaacctttggccatatcaactagtctggcgtggcaaaacaatactgacaccccacacatagcgagcataataattttgtcctactacactagcgagaatagtgtgaccaaataacgttgccacgccagccagaccgacgtgaccaaataacgctgccatactagccagaccaatgtgatagtattattttaccacgccaatctaactggtgtagccaaaaggttcatatcttgaaaataagttttgaaagagtttgttttaaaattaaaaatttaaaaagttcaaaaaataaaataaaaatttgagggagagaacggccgcctgccgaaccccactccattctctccaccgcgtggtgccggaccagacccccctcccccgggtgtgattggtcggtgaccagccgcgcggggctgcacccgcacggtcagttttgcccgccttagtccattagtataactactgctgctacaaatactacaactactactaatactaccacattaccactaccagtaatagtagtaatagtagttctattaatactagtactactactataattatatatatatatatatatatatatatatatatatatatatatatatatatgcgcgcgcgcaaagtttatatactacgtattaaaaaatttaaaatactaaaaaatatatcatgtatacaaactttgtatatacatatacaaactttatacacacgcatataaagtttgtatatgagcatataaagtttatatacatgtatgtatataaagtttgtatccacacgtataaaaaaccaaaaaaccaaaaaaaaagaaaaagaaaaccagagaaaactattttttttaaaaagaaaaccaaccaaaaaaacccacccacgtgggcttcccacgcgcgagcgactgccccccctctccgcgtgccacgcgtccatccacgcagggggaggggcgcgcgccgcgtgccacgcgtctatccacgcaggggaagggcgcgcggatatccactttttagcggatctgcccccaaaccacgacatatgtcctacttccctgcccacttctacatggatgtgcagccactgggggatggggatgaaagcgatggagtatgtgtagctgtggctgatggcagaatcgcggtatccctcctacgtcgtggccccgggccaatgctcctccctcctcgcgcaatgtgtccacgccccgcccgtctcttgacaaagtgaaaaggtggactctgaagaaaatggcagaacagtttcagagcttcaagggagatctgtaccagaaatatatcctgaaggggcagacaccgaacttcgacacattcccaaagctaagggatcactgggacgagttcgttgcatataagacaggtgaacaagggcaggcgatgatggaaagaaacaaagaaaatgctaccaagaagaagtaccatcaccacttggggtcaggcggctatagcgtcacgatgccgaagtgggaggagatagaggctagcttgcttgagaggggtatcgaaccggccaccgctaattggccggaatgatcgaagttctggtactatgctcacggtggaacgctcaacccagctgatggctccctgatcttcggcgatcagatacgcgaggctgcgcgttgactaacagacgtagtggaagcctcttctcagggcacgttccgaccggacagagagaaggacgagctgttactcgccctgcagactccagagcatccaggacgaacacgagggaaaggagtgattccttggaagattgggttcaaggaggacatccacacgtataggagttggatgaggagcaagagagataccgaggcgaagattgcagattttgagttcagggtatcgagctacgagctcagcatgcaagaggaggtggcaaggaaggttgatgaatgtcacgcccagaaattcccgaatagaattccaagcagaatgtgcattaaaatccccgtccaggaccggccggggtacacaaacgacaatgttgacattcagatccacgtcttacaaatatcataaaagtcttacataaatgcagcggaaagaaagaaagacaacaggagctaagccttgactagaactgcagcgggaacaccactccacaggcatcctcgacggcacgggcaaagcctattcctcggagaaaccttcatctgacacatactcgtactctggggttgggaaaagtagagcaagactgagtactacccactgtactcagcaagtcataccggaatagaggcatgatgcagggaatcatcaaagaagagctaaagtggatcatttgcataaagcgagcatttataaacagaagttgaaagattaaacagttgtaataattaattagtattaactatccactgtccaacgctatcccacgttgcaacaggcccaaccatccacctaaactatccaaattctaaagattacactagggtgatactaatcacggtgaatctggttgaccgcccataaccgcgggcacggctattcgaatagttttactctgatcagaggtgtacaactgtacccacaagacacagccccacaacacgtttccatgcgccgacatgccaccacgacatatcggaaagaggccgtgacaggacccttcgcataaccccctctagccaagcacaccacacctcaggtttcacccccgtccccagcgggcaacgggcagtcccctctcgtgcctaggtgaatccggaagcgacagaggccgtcgcagggcccgccccgctccatcacgcccacccttgcctggatgcgttgactagaggagagctacactacaagcccagccgttgcccacgctggcttgtggtaagtacgataagttcttccagggcatcccgcgaacaggtccttaattgccatgggtgcgaccagcaaaaccatgcacccacaacccaccatgtgatttattttaattaaccaacaccaaagcggtgtcactaatccaacaaaaccattagaaccaacagtctaaacattaataggattttccccattgtgcactagttgaactaagcatggctaagcaatccctggtccaatctctagtcatgttataaccccaagctgacaaagggacaaggtacaacaataacatggctaagacaataggtaaacatcccatagtaacattataaaacaatgcaatatttgaaaggaaacaatagagcatttgcaatataggatcaacatgttcaagtgacaagcatgacttgccttgctctgctgctggaggaacctcggcgactatttcgaagtacaccggagcgtcggaggaaccggaatctagcgacatacaaggcaaacattgcaaacaggctataagactactgaaacagggaacaaaaccatttttaatggattctacacatttttcttgatttactgagacttgaatgggcttaaacggagctcggatgaattagttatgaattttagaagattcactgtgtttattactatacaagaaaaaccttaaatcatttattgcgcaataaatcccagggctgacatcagcacggagggggcgcggcgccggcaagcgggccccaccggtcagcggctcagggggagcggttcaccgtggactgggaccacgcgggtggtccaccgccggtccacgggaccgacggcccagatcgccctcgggccgatcggacgggcggcgatagaggcggccgccgggcttggctcggcatcaaagccgaccggccggccatggctagcggcgacggcgcgcgcgcgaacgcgttgccggcgacggcaaccggcggcagaggcgacggcgcaaaagcgacgcgaaagcggcggcagcggacggcggcaacgaccaaaggcgacggcgagcgcgggcggcggcgacgcacggggaatcggggaagtaaaggaaaggggagggagttcctcaccgaaggggacggcggcgaccggcgacgaggagcgacggagggaagtcgacacgcggccgacggcgaccgggacgacctaaagaacgaaaagaaagagattagagaggaagagaggggccataggaggcgggaatactggccgaaggcggcggacatggcaacccttaccgtcgcacgacgggaacggctctccggcgacggacctcgacgaaggaggggtggacggggtggatcttggccacgcgaacccgacggcggcgacggcgcggtgcggcggcgagcctagcggcggctagcggcggccggagtagcggaaacggcggcggcgggtggttgcacggcgcgggagcgatggggagcacgagggagttcggcgagaaagggaaaaagcgagagggagcgacggggaagcttaaataggggaggggagggccggacgtggccgggagaggcgggatttcgccggccaacgtggggaagtgggggaggagagagatgcgggattcgaaaatcgaatcccggccatctcgggcgcgggcgcgggcgggagagagaggggagtgggcgcgggggacgcggcgcacgcgcgggcgtggtcgacgtggcccggaggaggcggaggcgtggcggcggttgcgggcgcggcggttgcgggcgcggcgccggctggaggagggagacgggcccgacaggtgggccccacctgtcggcgaccccgagagaggagggaggcgggacggcctggatgggcctcggcctgcggccggcccaacagggaggagggggaggaaaggagagaatgggccagcggcccattcgaaaaaaaaggaggaaaaagggaggaaaaagagaaagaaaaaggaaaaaggattttccctggaattaaaatattgcttgctcaattttaattggttaaaattatttctagagctctgaaaattccactaaaaatcctgttagtgaatttcgacatgtagaactcaagcaaaattctacatgccaaatccgattattatttgcattactttcttagggttttctcttgatttgcacctgcattttcttggggggtcgtttataaattaaatttttggcttgggaggaaaacttcggggtgtgacaatgaacgcatggccgcacatcggtccaatgatccccagccgaccattcctcctgcaatggtgagcccatcaggaaatcgtagcagctgcgcctcaacggggcaagtaggatcacagagcatggacgccatgcaaacccaggacgaaaccacctgccccgttgatgacatcactcagcggacaccatgtgagctgcatatccccttcaagaacttatcaataaaggtaaactcgtagtttatagattttagatttggccattccgctagttgctgcttatatatgttgattactaataaataacctctcaccacatgaaggtggcgtcgggcatggccatctcaacggacccttcaggtacttaccactacaggccgattccagcaggatactccaaggtcgaagttgagttggtcgaaggcgcgtacgaggacctcgagctggattaccctggaggagacggtgagacgcatctacaagacacaagccacgccattattctatggcgcaagcggtacatcatcctccctgggcgacaagcggcgtctcgtgcactatctcctccggctccgccatctcctcctcaggctcctacaccgtctcctcctcatgctccagcaccgtctccacctcaggctcctgcaccgactcctcctcaggctcctgcaccgactcctccgcaagctcctcttccggcaccttctaagtcaagggccccccaagctccaccacctgcccccacaagggcaacgaagaaggcgaaaattgacgccgccaagaacaaggacccagggtacgattgcacgcaagaggagcttgacgcttacgtggcatcagaagtcaggagacaattcaagcctcgaagtccagaaaagaagattcctatagacccgagtgtcaagaacttcttcaggggtatgtctacacctgccaaggaggccataaagctattggactatgagcgaacactcaagaaagcatcttctggaaagtccaaaccagtccctcagcttggagagcaaccaaactaggagatcgagccgttggtgaccggtgaagattttggaatacaagactttattaatgacaccgggctaactacggatcaattgctaggagacgcaccaatcgaaaaggcggaagtgaaatacatgtacgaactcggtaaaccgcttgtcaagcctgagctgttgcagtccctacccacacaaatgtacaagttccatcagctgtatatggagatgagcgccaccggtagagagatgatcggagcgaggatcagggacacggacttcttgcaaggagatgacattctctggatcaatttcaagggaatctacgaactataccagctggacgccctcgacgtctctattatgagttgctggattttgtaagtatattgttcggttagacttcttactacatctcctttaattaattaggtccttctatataagtagactatatataatatatactcccttttatcgttgtagaatggagattcaaagggcccgatggcgggggttttcgatactggattcattgacccccggaaagtaaacgtcgcaatgctcgaccaatatccgcaagccacagaggacaatctcgtccatctcctgaaggcgcagcattacaagacgttcatactgttgccgtacaacacagagttagtttaattttactgtcttcctataccaaatttcattcccgtacgaacatgctaagtgtttcatatgtaatgcatcccacgcacattgcagattccactgggtgcttttactcttcgacttggaggcctgcaccgtcaacgtatatgactcaatggataaaaaagagtctacgtttgataaggttttcgaacttatagacaggtactgtcataagttcctatgttaattaagaatcttgttatagttaattgctactacgaatcatagctttaaactccatatagggcttggtatcggttccgtcatttggtccgcggcaaatggagagaaagacttaggcggaagttcaaatttcctgtgattacacatgctctacatttatatttctccgattcaaatacatacaagtgtatattaattagatctctcgtcatttatttatagtgcgtaaagcaaaagcagggaactaacttgtgcggctactacgtgtgcgagtattgccactgccttgcagaccaaatcatcaccacaagagagctcgatgtacgtacaaataaattcaaaatttcattacgtatcgatttgttgtttaattactaatcaatttcatacattcatatagtttattcgcatgagggataacctgatcacacacaaggaatttatcgcggtggttcaagaacaacttatgggattcatcaacgaacaaatccttgatcccaagggtgaattctactacgacggaaacacaattcataggtccttagcttctgagatagcgactactactacgtcgaaatcgtagctagctaggacatataatgaattataattaatacatgactatgtttctatatgcatgtgtacacattttctataatgtaaatatatattttagtcatatatatatatatatgcatttgcataacatatatatgtataaatacatatatattatgcatgtacatatgtattgaaacatatataaatataatataatatatatatacatatatatgtattgaaacatatatatatatatgtatggtttatatatatatatataaaccatgcagcaacagggccatgcaaacaaaaaaaagttagctcgatctaacaccaaccggtactaaagatggctcagtcgggcactggatgatcgccggacactggtcgattacgacatccaggagtccacgctccacctcgccgtccgcctccgcggcggcagccgcggccactatccctgcctcgctcccggcctcctcgccctcgcgcgcaagtacatcgagatgaagatgatctgccgcaagtatgcacacgcttccgatccgatcgatccaaaactcaagtggggttaattttgggagtacccctggttaatttgaacatgcatctatctagttcgctccgttcaaacaagacgcagtagctttgtgttgcaaattaagtaaactttgtctttgcatgattgcatcaacggtatgaaatgcgaaaggaaggaatctcaattggtgtgcatctcagctttctgatgattttgattcacagccgccttgtttgcatagttaattagtttcttgattagttgggtggattcttgatgggcataaatgatgaattaattagacgtgtacagttacattattattgagctagaagcctataacccttttgcggcaaatgtattatctgtctgtccttttaatcaacttgtttaactgtttgcctctatgagttttgaaagttttgtcatttgctagccatttacttaagcttgctttactgcttaacttagcaaatcagtcataatggactaaaatctttaggcacaaacttctgactttgccattcatggatgtgctgtctctttctttccctgaagaagctagataagttgttccgctactaacattttcttttcttgcaggtgctatgcacgccttccccccaggtctacaaactgccgcaagaagaagtgtggtcacagcaacaaggtgagccttgttatcaagctatcgaagtgttctttgtgtgggctttcgctgattgtcttattggccatggccgtcttaactgtatccatattcttggcttgagtcatcagtaatcctggcagcatccatgcatgttcttaattagcagcatttcaaccaatgtcttaatttatgcttgtttcagaactgtcattgcttggtatctataaatattcttattaagccatttaggcatcaatacttgcactttgacattatgttgtgtttttcacagttttgaacagtctgtatatagtaagtgtacacttggattcactaggtagatgatagtggatttaaggtgacaaacatgaattccttcattctttgatctgatgtattttacaacattcctgttttctttttcagctaaggcgtaagaaaaagttaaaggactactgaaccatgggaatggaaaagcgaacgaaacgatgatatatatacagctgctgtcagttgaatacttgaatgggatgtctttaagtcttaacatgatagaactaccgctgcggttagttgaatgagatgtcttagcatgatggaactgctgttattagtatcatactggagtttaacttcagccctagctagtttaacatttcctgctgggttatgaaccttgattacccgtttccatatgctaatggtggtttaattttgaagcatggcagttacatgctccagaaaccccggctgaaagttgctgaactttttttttatcacactatggatattactgcatcgtgatggttcggatagaaatgctagttgcagatgaacattgcaaatattaatcttctggatgcaatgttccctagctgtctactgtgtatcgactagaagtgatttttgagaagataccgagaggtgcgtaaaatttgatatattttggtaccactaatagaaggtatcaaatctacgctaaattaaaaaaattaatatctttttatgtgaatgaattttagtatattttatatttcgtcgtaggttgtttatgagtaattcaggacgaaggaagtaggtaagtgtgtatttagttcgcgaaaagaaaattgttgggtgtcacatcggacgtttgaccggatgtcggaaggggttttcggacatgaacgaaaaaactaatttcataactcgcctggaaattaccgtgagatgaatttattaagcctaattaatccatccttagcagatgtgggttaccgtagcacttatggctaatcatggactaattagtctcaaaagatttgtctcgcgattttcatacataattagttttttatctatatttaatactccatatatgtgtcaaagattcgatgtgacgtttttggaaaaaaaattgggaactaaacaaggacaagcatcacacgtttttgaaaattttttttggaactaaacaaggacgagcatcaccaacagtctacctatcttattcccaaaactgatttggagggattttagccaaaaaaaaaacagcttcaacggatcccctactatcctacccgagttttagagttcccttctcccgattccttgttcagtttgtatacggacactaaagttgctcccaatctcgccctcccgcctctctcctcccgttcccacgcgtgggagatagcgatctttctgagcgtgaaagaaaaaaaacggaattttctcctcccgttcctgcgcgtgggagatagcgatctttcggcgcatgaaagaaaaaaaatggaattttccgttggtagtttaacagaagggcccacttttaagttttggggattgaatttagactatctgttagaggaggagttttttcactttctattcttctatctactttatagttcaacaaatgctttcactcattctttcattcatcactcaactattcaaatcatctggtgaaaatccaacggtccaaatagatcactagcctcccacctccatcgaacgcgtcatcgcgctgcccctaatcgcctccctcaatcccgcgccgcatcctcctcccttcctctctctctctcgcctatcgcctcgcctcccccagacgccgccgccaccgtcgcctcccccagacgctgtcgcctcgcctcgcccgccctatcgagcccaccccctcccttcctcactctcgcgcctcgccggggggcgggactggcatcctcaccggcaatggcgatggctactcggccgccttctcctggtgaacagtgggggcccacctcgcgtttaggaagcccgtggtggtgctggtggtggtaccatcggcaggccctggaagcgttgtagaagcggtggtcgcttgccatgcctccggccgagctccacggcggtgcccatcatcccttcaatcgtgcccactctccagcatcaaagctccatcatcgcccccatcctcgccgcgttctccgcatcttttgctagacgcggcatgctctccacgaatccaccaatggcatgccttgcctcactggctcacttctgagtcatcgtcctgactatgccggctttgccctccatcttgttgagattttacaggttggttggcgaccttggaccttggtcatttcttttcttgattcttccctcatgttacatgtatatgtggttattcatgctttctgcacaacttttcttgattcttctatcatgttacatgtatctgtggttattcatgctttctgcagtctgcagatctctgatatccaaatacgatatgtccgcttcccacgatactaccaaatgttgctaatagtgatcagatttacatagtatgttatgcctggaaataaatagagaatgcactgatcaacttaaattcccggttttttgttacagaaaatatcttcttcatttgaatggagatgtgaccctgtatgctcttgcttcatgctagcagtgcatggcatgcatttgacattttttttaaagcgggcaattaatatatggatcctctaatctttagtaattttattggtttcttttcgagaataaaagagattgggcacactccaggactgattcacgcacatacggatttatgtggttgtctgtcctcgtaatggtaattctgtgcattgcactatcgcagttcttctttttcgaagccttttctaggtttccgttatcaaaagatatctaatttgcagaatatatactaggtggtggagattttatttccttcaggacatagatgttgcaagctattgcaaaagcttatgcctctaaacaatcatattcttgcagagtggaaatttaatctgggggtaaatcttgcatatttctttgtttcagcagcagttattacgctcacattttttctagcaatgttggttccatgtgcacaacttactattaactttcaatgtgacagttttaacatattcgatggcgctgaacgtaacatcccaaatcatgaattgctggtggccaggtgaagccacctaatggttctcaaatcttagttgtgatgtggcggtgatgagcaagcttggacaagagcccaaataagatatgacttaaagtggtgcaagttaatcaggacagcaaagacgcttagtcttatgaagaaatgtcacatatacaggaaaggatgagattggccaaaatgtttttttagtcttctgatttgcagatgcttgattggagttatcctgctcctgccacaaacaggaaatggtaagaactaagtagagtgtatactcacatgcatatatatcattgagttgggtgattctaaattaatatttggcacattgtagaaaatattggtttcaagctattttttttatcaagcatacatgacctaaaaggcatatggtttctatcgtaacggttgataactccatattgatctgttctttagaaattcatgaaatagacatttgcatgacatctggaatggttatcttctttgttgaatgttctttcaagaacttgcacctttttgtttaatcttgtaaatttgatgtgtaattgagcttgtagggtgagagaatcaagtgtgattgagcagatctatactctatgtactgagattgtgtagagtaaagacgatgtagtatttccttttataatacaatttgtcacgcttcatttatttttcttatggagcacatgttgatttcaatcattggaatttgttctacccttttggtatgaaatttctcttactgattaaatgatcttggtatgaaatttcccttttggtatggaatttgttatacctgtcctgatgtgatgtccactgctagagtcctactatttagcagaaaatcagtgagataattgatagtcccccttgaccataatggtgtatcaaatctgttctgggacaaggtaggcaacatggcatcaagccactccaaaggacaaaatgttgctttgtgacaagtgaataatacagccactttctggtatcgagtctaggttgcccattttttatttttcttgattttttttcatgttcttaaaaaaatgcttcaacagaaggatcatttgagattaagaaatgatcctttgaagatttttgtttttttgctgttaaagcctcatcatatatcttgctaattatgctatatgagcaatcatacaatcaattatttatgcaaagatgattaagtggaacattcaagattcaaagtggtatataatcaagtattcttgctgccattgcaagtatattaattagatcactgctggcaattggatgttgaaaatgcaataaaaatgttgaggcatggagatttatggtatttgacattatggcccatttgttttattggtcaatggcatgtgtcttgcccatcagcactgtaaatttgtaggttgcgaaaccaataaactaattagttgggctattttattagttactgaagtgtggaaaatgaactgcagatcacttttttttttcaggagagctgaacatcattttatagataagcataaatcttttttatgaaacaacactgaactattttatgttatgtgcaagtgcaacccccacaaagtgatttttttttaaaaaaatattttggttccaatatattaggtttaatttgtatgttgatcataacgtgcatcggtgtgcagaggctatactgctcaaaatggattttcttatcttccaaagaagcgcttaagctcaaaatgataagtcggtgaagtgcatattgtgttgttcaagaaacctggagcgtttgatctgcatatgtagctgttgagctcttttttttttgtcgaacctattgagcgcatatttcactctaaatggttttgggaactcatatgtgtggcatgactgttctgttatttccttcaattaagcctagcaagtacatgattaaaaagattgttcatattattcactgcatatttatttcatcaattcttttgtgctgtttctcctcaggagagaatgagttggtgtagatgcttctttcccttgtcattatgttttcttccctgaattcttttatctgctcttccatttcatgccatgttgatatcatccccatgtgatatggtgacaatgttttcagtattctgccattcacttgttaagatctagaagattaaggtatttttcgaatatctattcattggttgccttgtcccttgaacctcatagatgggaatcattatcaatctatcatcctaaatataaactactccttactgcgcatgatagccattctattttgagttttatagagccatgatacaatgtctgtaagagataagcgacggatacaccaccgccgccatctgtcaaggccttgagaggccgagaatattctctctcggtattacgaaccagctcagaaacatactctataatgtccattcaaaaacatactctgtaatttcagagaggagtaagtgccaatatagtggttttaattaacatccaaacaatatagatagaatgcgagcatgtgatacttctttgtttataacaattttgtgtatcaatcttttttgcgaatttatctcattctagacttggcaaaatatgttttctttcttacggttgttcgatatatatcattaaacattgccgtagcgttagcacgagcggattactagttttcagtttagaaaaaaatatttttttagagagagataatagataatctgttgctgatgctctaaatattgaaggagtctaacgagtctgacgggcgacggtcgacggcccagctccgtttcattcggtggagtcttcgccgtttggcgatagacggctgggccctctccggctctccgccaacctcgcttctccccgcgatgcgaccccgaatcccgccgccggccggggctcttgctccgctcccccctcgaccaggggcctcctcttaccttccgaggccgtgtgcatcccatcagatcccgacctcccgtgctccgcctgccgacgccggccagagtgctccaggagcaaaccaaccagaggccagagccactggcctgccagggaatggtaatacgccggctccggcctgagaagcgcatcctgttgatgaagaagaagaagaataggaagaatacaaggcaggtagtatgggtattgtcccatcttaaattttatattcagcctgcaacctagcattttgatctgtttcgcctccaaatgagacgattatcagcagtggtaggtagaggattattgtattacttgtgggaaaaccataatattaatgtatgctactgttggtactggggagtgagaactcgcccagttggaactgcccacgatttcggcttcgtttcatgacaagagtaatcaaattgaccaaatgcaggccttccaggaatttgaagatgcagatatagttgaccttcacacggacgaccttgcaaccgcttctacctacctgaaatatgattgatgatagtagtttcttcctcagctgcacttcttccacctcctccaatctgcacttgtgcagcctgtgacgcctgagaatacatcaagtgaggctccatttcgtaactgctcgtcgctcgtccgtgcaggagcctattaacctacaggtaccaaaatcgaatttcttgtcagttctaatttcctcctctatttctactttacttttgccaaaacatgatatagtagagtgcccgacatgggatgcgtaggaaacgctcattcttgaagttgaaccgattttgaaacttaaaaggggactgttgctatttgaagaccctattatacatagcatagcgacaaccttctccaaacttgttactaacagactagcctcttaattctattcagaaatagcatatcaagatcatagaaaggagaagataaaaaaacgaagtccctttttttacatcaggaacctttctagtgttccattggcatccccatcactccgccaaaaagaactttatcaaatactagttccttgcagctagcagtatagagcactagtacgttatgagtaactataataaaattgtcatcctccaaactgtcacccttcaattattatcgttgattcagttttctggcagattcaagttccactagccccattcctgtgatgattgatcagattttgcacctccctctgcgtataattggttatttccttcatcttaatggccaatgtagttggtgttagggatcgttcttacacctttttccaaaagcaagaaaatttggttttaaaaaaacatggaaaatatttgccatgcacatacatataacatagggagaagaataaaaggggtaaaatcctaaaacataggccaactgggtgagcaatgtttatgcatataaagccttcattctttcatataaaatatttttctagatctgtactgctataaataatatttatcatatatatttatgtgacaactgctaaaattagctctgtcttgccacatttgtttcttcaaattaaaattgtctcatcttctattcgcaataaaactaaccagaaattttacacatgacttcctcagaaatcagaaaagtattccatgttttctttttttttggctttgcacattataaactacagaaaaaagatatatagtgatttcagtaatgcaccatcttcatgaatttgcaggcacaatataactatatcttctgttcactcttatgggagattggtatgaacaattttcacaatcttttaaggatgctgctaaggaaatgttggcaaaaacagatattgatccaaacgttaagtgcttcacaagaaagcagatgaagcgcatttcaaacaactacagaactatccttgggaaagggggcttttctgtggtgtacaagggtaggctcaatgatggccgtgcagtggcagtcaaaaaatataattggaaaacacagaaaaaggagttcacaaaagaggtaatcatacagtctcagtttagccataagaacattgttaggctattggggtgttgtgttgaggcagatgctccaatgttggtcactgagtttgtccccaatggtaacctttccaaccttctgcacagcaacagtagccagtttcctgtttcattagggacacgcttacagattgcactggatgtagcagaagcacttgtatatatgcattcctcccaaaatcatccaatccttcatggagatgtcaagccttcaaacattcttctgggtgacaaggatgtggcaaaactctgtgactttggaatatcaaggctgttatgtatggatagtgacgaatacacgggatttgttataggaagtagaggctatgtagatcctgtgttctgccagactgggcggttaagtctaaaaagcgatgtctacagttttggggttgttcttttagaactcatcaccaaaaagaaaggaattgatgacaagaaagtgtgccttgcagaaacttttgctcgcatcagtagaaaaggtaatggacacgaactatttgacatggacgttgtaacaaatgagaatatggagtttcttcaaggaattggcaggcttgcacttgaatgtataaagtttgaagtagaggagcggccagaaatgaaagaagttttagagcgcctttggagtctcaaaagatcccgagataggagaatccgtgagatgcaggttatggtacggagcgagattgaagtactttggagaagatgtggctttggtaggtttatgatctcgaaagagagaatggacgatatgacatactacttcaaaactgttctcaaggaatgtgcatcaggcaaggcttacatagggagattttgcaacgcacaactgctggtaataaagatgtcgatttcagttttagatcaatggaaaaacatagtctggaacgaattgaatgtccaatctagaattaagcactggaatgacgccaagcttctcggttactgcttagatctttgggaaggtctagtgcttgtatacgagtatggtgcgatgagcttgtatgatgttctttttcatgatgcaaggaaggtatctcccttcatttgtggcctgcgcctgaagattgcggttggcgctgcagagggccttgctcacttgcactcacttggcattgtgcatggcaatgtcagcactgtcaatatattgctggatgatctttcggtactcaaagtgattagccgcaattacccagtaaagattgcaggctatggaacatcagggctccctgacattgacaaggcacagcacacaggattcttcatggaggattcgcttgtaaccagtcatgggaaggagcatgacgtatactgtttcggtcttgttctcctaacgctcttcacatggaagaaggtgtcactgcaagaggcggataccgtgtttgagcagctctgggacattggaccgccacatgatgtgaattccgagcctgagaaacctgggcaacagctcaaggaagccatccttagatgccgtcatcttgaggaggttaagagcctggtttcacggtgtctgacgtccgaggtgacgaagagaccatccatggtggaagtagcaaaacatctcaagaacataaatgatttacatgatagcacagcttgccatgagctggcgatttatcaatctcgaatgctttcgggctaggctaggctgcaagtagcagtcgtacatggttcttctttgagtaaattaaggtgccgtagtagatgctataatgcaagcgccaagcaacatattacatatgtgtattttatatcccgacaaagaaaaaaagacatgtgtattgcatatattttgtaacagcaacggatgtttgtcatgttgattctcgtggcgctgctgccatataatgttgattgacagatccttggggaaccaacggatgaactaatggacctctcggcatcctttgccaatgactcttgcttcttctgaggtttggtggctctttcttgtttctaattcttattcagtgcatttgcctacatctggccctttggcctttctttcttgtggccgattttgctcgatctttattttttgtgtaacagaagaaatttactacggctcatttgctccagtgcatgcaggtccttgtggccctttggatggtactgtttcttgtatttatgtatttgtgaaaatttccagttttaacctctcttgtggccttgtgggctccaggtggaagtgtgtctggggtaaaaaaatcttttgaaaggttttgccttaaaagagtttccaaagttcatttccatatgtggagggatgatggtcctgattgtaaatttgtaattatacacataataatttgctatccttacgatgacaccattgctagggccggtcctgacattttggaggccctaggcgaactgcgaacttacactatgagcccttaagaaattaatgattttttttacttctaatatatatactctatataaagcacattgatttatcatagagtgacacagataaacatttctaacatgataaattataaataaagcagtttgcaaattgcaacagagcaatttattctcgatagataatatcgatagtataattgacaactaaaaaaacaccatagaaataaattaatatgaataccttaataggagaccacaaatatctcatgtcccttataaaaaaaaaagagcttcttcacacattttttgaagcgaaatcatcgatgacacaatgctacatatagccaagccattcaaactttcctgtgacatagttgaccaaaaattgatattctcgttttcttttgttttttttctaaacacccaacaaatatttcctaggtaacattattataacacctgaaatagtgaaattgcaaagtaaattatataacaataactatgaattgaaatgatagaggcatagccgtatagagccagttgggcagttggttcttgcactggtggagaaaggggctttactcccggttggggaccccctgtagtcccggttatacaaccgggactacgaatccgggactaaagatgggtatctttactcccgggtgaaatcttttttcttaaatcgatttgctccctaaatatccccgatcacattcccaaatcatccccaaatcaaagtagcatcacagatctaaaaagaaatacatcacatattgaaaagaaatgcatcacagatcataatacatcacatcacagaatcttaaacaaaaaatacatcacaaatcctaaaagaaatacatcacaactcccagatcagatccaatatcacgtacatcacagatcaaatccaatgaatcacaaattcaaaaaaaaaaatcggcaacagagaggatggcgctgccggcctcccggccaccgtcctcgcgagctcgcccggccgaccgccgcgcccgcccgcccggcaggccgccgcgcccgcccgcacggcggcggcctgcccgcccggctgccgcacccgttcgtccgcctgccgtacccagacagccggc

SEQ ID NO: 6943 - DNA, 12411 bp, Oryza sativa
cgccccacctccgacgacgacgacgccgcgtcggtcgtcagcgggtcgtcgatggccaccacggcgccgaagaaggtggaggagccgttcgtcgacgccgcctgcgccaccctgatcgccgtcggcttcgtcccgcccaccacgtcgtggaagtacaccttgaacttggtcatccccgccgcgccgtcgtccgccgcccgcgccaccgccgccgccgcgcacagaagcacggcaagaacgaggaaagccggtgacgccgccatggccggagctgagcaagatgaggaggagggaggaggtagctagagctagtgagagatcgagtacttatgaagcaagaaatggagattggagagtggttggtgtaggagatgatgaaattcagtgagatagagtggatgtggcagagcaagcatatgcaggttgccttttctaatggggtcggtaggtgaggtgagaagtggtggccaagcagtacttaattatagtactcacttcattgctaaatatttatcaccgttgactttttaaaatatatttatcgttcgtcttattccaaaatttttgtgaaatatgtaaaactatatatatgcataaaagtatatttaacaataaatcaaataataggaaaaataattaataattacttaaattttttttaataagatgaacggtcaaacatgtttaaaaaggttaacggcgtcaaacatttagtacggagggagtataaatttggcaattaagttttctgcttaattaatttattaataattaactaatatacctaattaatgtccagactaatgaggtgattagtcctagtatattagtactgggagttccgtatagtgaaggccagctactaccaccaagaagtgaccttttgtagcgtgggctgtcatgaggttagttaatgagctcatgcgtgcccaactcgtcagctaactaattaacctactttcttgtactatactaattgtagtagtataagctactttgtacagggaagcagatgtgtagtttgtacctgcagattgggagctgttgctcttgaggcaacttagattaactgtctatgaattagacgggcaacgatatgtgtactacttctttcattttagattataagactttcaaatattgcccacatttatataggtgttaatgaatctagatattttcagattataagactttctagtattgcccacatttatatatgcattaattaatctagacatgaatatggacaatgctagaaagtcttataatctaaaatggaggtagtacacttttgaactttttacagacattgaggtatcacattacggttaaatcttgattattattttttacaattttcagttgactaaatcaaatggttaagattttttgttagaaagaagtttgtatgggatttttgttactaagaaatttgtaagaaatttttagtatgtgcagccaccatcgttgtcactatcgacaccatcctcgagccctagggatgccagatccggcgtccccaggtggggggacgccagatctgatcggccccaacctcgtggtgggtcgattcggcgttggttgagttttctctccactcacgagcatcgccaccacctccaccttgagcttcggccgcccccaagcgccggcggcaacctctccacctacaagctcggtttgccaccgccaccaccacctccttcatcgagccacaggggtgccatatccagcctcctcgaggtcaggaggtcggggggacactggatttgaccgcccccaacaccgtagtggctggatccggtattggtcatgtcatctctcccacccacgagcacccccgtccctccgcctctacctcaagctctggctgccacgatcatcgtctcctttgcccccaagagccagtggacgcctctccatcctcgagctctggctaccgcctcttccaccccaagctccacctgccccctccaagcttgttgttcaacttgcaaaagaccacgacggatggtggtagcggtggaggaggaggtcctggcggctagttgcaatccttgtcggcaagctgccagatctagccatgcgagcccctatcggccatcctaggtcttgtctaccttatgagccccttccgaagagtattgtttccacagaaatttcttatggttcctcatgtgagatgtgagattatgtgattgtgatgatcgagatcttccatgtttttttccgcaagagattttattgcatttagtttgcagtgagagatccaaatgattgattcctttctgtttgtagttttttgacactgtgttgatacgacaacgatgaacaaggattaactttttattttttgcttttccacattagtgcatataagtgacgggtgctaacatgtgaactgatttttttccctattaagcagctcattgatgggtgataatatgtagtccgttagagaacaatatcacctgtgacgggtgaaattttacgatctgtcacatgtgatgagtgaaattttacgacccgtcacatatgatagtcatcactaaaggatgcctccacccgttagaggcgagaggagacaacactgaccactcatctctgacaaaggttaaatccgtcagaggtgatgttttgggcctgtcactgttgatctggactactgtagtggctggacctcttttcctcttaaagcttccgattaagctgtctcctatgtgatcctttggggctttcttggtcagtgaagtcaactgtttaggttaagatccgtcgtagcaagtcggagctgcttatcttattgtaagcttgataaacaatcgataaatcaagcatgttacaacaacaaacgatgtttaacaaacataaatgtgcttatgtatgtcgctcatcatcttctagctacgccttgacgaagagggtgtactcgacgatggtctcgccggacttgaagccggagtcgacggtgcgggcctcggcgtaccccctcgccatgcggaacttgccggagccgccgacgacgctcatctccctcaccggcgacatcacctcgttccgccccatgatcgccaggctgctgccgttgtggtcgccggcggtgaacacgaagttcatgtccatcaggaggccgatcaccctctggtcggcgaacgtgtacgtcccctgcgcgcgccccaccacctcccccgccgccgccgccgccggcgagctcgtcagcgggtcgtcgatggccaccaccgcgccgaagtaggtcgacgacgcgttcgtcgacgccgcctgcgccacccggatcgccgtcgggttcggccccgccaccacgtcgtgccagtacaccttgatctttgtcatcccggcgccgccgccgccgccgtcgtccatcgcccacgccaccgccgccacgcacagtaacagaagcagctggagagccgccttcgccatggctgcagctggagcttgagctgatcgagcaagctgaaggaggagctagtgagaggatgagtgctgctaatatataattaatgtagctactactgctgtactccttccgtcctaaaaaaaacttaacttagaaggagatgtggcacatcttagttatccaaatttgttatattaaaagagatcatattttttcttaggttgagttttcgtgggacagatgaagtatttaagatgaaagggaagcaatggatataatgcgatgggagtggttggtgtaggagatgaagtgatgaagcagcatgcacgtggtagagctttttcccttttctaatggggttggtatgtgaagtagccatctccttgatttaacctatatttagcatctccttaattagcctatagttagcatttctctgtttaattattctgtctttttttctattatatatactcccttcgtttttaatgagacattgtcaacacctaacaattcatcattcatcttatttaaaataaaataagtacaaatatatagaaaatataagtcatatatacttgagccgtgtatttcattcgtcctaaaatagtaacgtttagtcttcaaagtttatttaaaaatataacaacatctttatccatgttctcttcccaactaattacaacactccacaaatcaatttcctcacttatcttcacttgcatccaatcacaatcttccctatttaattctatctgttttgttaataattgtgttcaaccctaaaaatcctaatattttgggatggatgtggtataaaacaagtcgcaacaaaagaaataatgcttatatagttcttttagcaagataaatagtaaaattctatgttcagaaatcgataattaacgtcacacattagaaaacggagaatgtgtatagactaatgaggtgattagtccttaatagtacactagtagtgtcagtagtacaattcatgccactaccaccaagaagttacccttttttagcgtggactcgtcaggttagtaaattgcattacgcgtgcacatctcattagctaattaagcaagctatactttatagtgctgtaatatttatttagtaagcaactattaattattgttagtgacaggctgatagtagcagggaagaatgttaagcatgtgaattgtttgtacctgaaaactgggagtagtcggtgttaaggcagactgactgcgactagctaagattcttcagacattgggggtggttggatggtggtgacactgaagagaacattattcatgcaggatttcagaaaaggagttaacaatatgcagtggtgattggcctgcttaattacattttgatcaactggtttcattattatagatatattgaattaatcatccaagttatagatatgccacctgaagattttaataattgagaaattaaaattaaggtcgtggtgtcaacgtgtcatcactgcattgcagatctgtagtcactgtttgtcgatatgcatcttggttcttctagtgtgttcctatattttatcatcttcaggtttggtgggtataacaacagtaatatgataaggagagaaataattgatctgccttttgcagataaccaacttcaccaacacagattcgttcttcctaattttgtttttttttataatgagagtttttattgaaccagttaattatatcaattttttttctctccttactatttcagagatttgttattacgaaagctcccagatttaagcaaaacgtaaataaattagtccaattactcatgcacggtcctgtacctactcatgcacggtcagagagtgcacatgatggactcttgcttgcagctaaatttacactcgcagaattaaggagttgtaattaacacagtacggagtttttcatattattaatctctgcttgcgtatacattaacacagtactagtaagttagttgcgtcagaattatcaacttcacccgtaggaattaattcctctcttcttacacattggaagaatcagaatgcaattataaggactagtccaaatacaacaggtcagataaagtcactccaaacaagttatatttagagctgtctcagaggacagatgtgtttgtttgtcattggcacattagtgtgtgtgtatgtgtgagagggatgcatatatacttgaattattagtttcctgtgtcaaggaagagaagctaagaacaagacagggagagagagagagattcagaattttcagacatgagagtgactcagtggcacggtgaaagttccctgacagaagtttccaccgattatgctgagttctttagagctcattgagaaaaaaaaagccgagaaagctattagcatataattaattaagtgttttaaaaaaatatctatttaattctttaaagaaacttgtaaacaatttcttttaaaaatattgtttatcagttaaaaaagcatgctagtagaaaacaaagcactggtcagcccaaaaagctcaaaagaactaatcttaacagtgactcgtttgccaaggtgaaagccataggaaagaagttgcctgcagccatgaaaacatgattgacctgtatgactaccaaccaaggctttcagtgctgatctgtctgtcaagctatgtactctacaattgatgatcttgggagtagtttttctggccatgatcatctgtagaggttcggtggtgtgcgtaaaagataatactcccctgactggccgaccctacctaattttgcaggtaaccagcgcgtacctttgtcccaccatgttgccatcgttgtaaagcttttgttctcgatcgattttcaggttccaaatccgatcgaatttaagcaaacagatcgaacaaattcctctgtgataaagagcataacttttctctacccatttctccatctcgttttgttcagcaaagagtttatttgtgatgttcagtggtggtacagaggttgtgatgatgttccagttgagatcagagtttttggagattcttagttggtataattgcgcagtggcacatatactccctccgtttcaaaatgtttgacaccgttgactttttaagtacgtgtttgaccaattgtcttattcaaaaaatttaaataattatttattcttttcatatcatttgatttattattaaatatactttcatgtacacatatagtttacatattttacaaaaaattttgaataagacgaacggtcaaacatgtgctaaaaagtcaacggtgtcaaatattttaaaacggagggagtaagaaacatgcgcaatacgtacgaattttgtttggtttgaaatggcgaaagattagcacaaattaataagctttgcgcagctgtggtgccactgagcctctgaagactgaaggagaaagagagggtcggagaattaaactccgtacgcactgcgtagtgggccgcagcttcacaattcggcaaattgcaccgcgttgggcccgacccacttcacagatgggccttcagattatggctgcttctttactttggaggcctgaagggcgatggtccaaactgcatgcggcccagtcattttgacaagtgctagatagatgaaatactccaatacattaatctttttttttaaaaaaaaatgaacgcaagcatgtccagactccagaaaccagaatgacatgtgcgtatgaacaaagttattggccggtcgattttcatggagcaggagatatggaaaataactgcgtacggatgcttataatttggagcgagattaattcttctacctgatggcgtacgtttatgtgttaattaatttggatctaatttggagttgatcgttcatgttcgaaagggggtaatttttaaaaaaatggattatttgaatttgaccctgaaagacgtggaatgcattgaccagctgccgcatgccgcgtttctacttacccatcacgtggccatgcttacgttttttcacactatactacatccgccatggaagcttcctcttccgggtgcactgctgctgacctttctactacctcatttcaaaacataaacatttttaaagataggctgtgtttgaggaagagaggattgagaagattgggaagatacgtaaaacgaggtgagccattagcatatgattaattaagtattaactattttaaacttcaaaaatagattaatatgattttttaaagcaacttttctatagaagatttttgcaaaaaaaaatgcaccgtttagtagttttaaaagcgtgcgcatggaaaaggagtcgcaatctcccctgtctcctgtgaacgaacgcagcctaagggtgtgtttgagaagaaggggattgaggagattgggaagatacgcaaaacgaggtgagccattagcgtatgattagttgagtattaactattttaaattttaaaaatggattaatatgattttttaaagcaactttcctatagaaattttttgccaaaaacacaccgtttagtagtttgggaagcgtgtgcgtggactatgatgtattttctcaccctaacttatcagaacgaacgctccctaaggatagaaacggatagaattggtagcatctgttcgaaaaatattatcgattaatctggaattgaccaactatttagtgtcaacaagaagatcgaataaattagaaaaaactaaaatttatatattgttagagtcggaaacggcaacacttgtgtggatacgacgctcggttagtggggaaaattttccatgattattttgagtatatgttatcttgacgggatggtcagtgttaggtgaaccaaggcgtgcacaaaaatcttggaggaatattaccatccatcaaaataaaaaattgtaacaaaggtaagctaatgaagctctcattattctaaaacacattaagaacttataaacaataatcatcctcaagaatacacccctaccaacaacaacaacaacaaaaatcatagctagcgtttttttacagggaaaaaaaaagcatatgacaccacacccagcttatatattctagtaatcaactggtcaacacacagcaaaaaccggcagtaaaatgaactgatcaacacgatcatcatcttcaatatcatcgtctcaagtaatgagaatgaatgaatgaattaatcgaggcggagatggatgttgtactcgacggtggcgtcgccggtggtggcgttgaaccaccacgtcgtcgcctggcagtagccgcgcgcgaaccggaacacgccggtgccgcccaccaccggcatctcccgcacggcgcgctccgccgggttggcgccgaggatcgcgaggctgctgccgttgtacgggccgtcgccggcgaacacgaagttcatcgccatcatcagcgacagcgcgtccttgccggcggcgacgtacatcccctgcgcgcggccgaccagccgcgaggccgtcaggttgggcccgtcggtgagcgggtcgtcgatcaccaccaccgcgccgaaccccgtcgccgaggcgttcgtcgtcggcgcctccgccacctgcgccaccgtggagttgggcccgccgctcaccacgtcgtgccagaacacccgcagcttcgtctccctctgcgcctgcgccgccgtcgccgccgccaggacgaggagcgccgccgcgaacacgaaggaggaggaggaggcagccattgcttggttcggattaagctagctttagctgtgtgatgtgatttgcgacgacgtgtgcatgggtgaatttaaagggggaggtcggggacgtggttggtgtgtgctggattcgaaggttcttcgatcgtcgtctacacggcgaggaaggcgactgcaaaaatggtcggatatatgcaaacagtcaggttagaaatataatggaggataaattagttaacactagtggagaaaggggttttactccctcttcggaacccctgtactcccggttttacaacaggaaggacgaatccaggactaaagataggtatctttagtctcgggtgaaataaccgggcttaaaaatccatctttaaagatggataggggccacatcccaactgttttttttcttttatttattgtttctttttgctgcttgtatctattcccccagccaaatccacacaaatcatcaatcatgcacaataaaaatttccacaaatcaagcacaacaaaaatcatccacaatacatacacatccacaatctacaaatcttgtgagatcatccccaaatcaacaaaaaaaatatccaataaaatatacaaaccattcatcattcactacaaaaattcacaaaataaaaaaaatccagtcgctgttgtcgccgcccggccgtgggctgctggcctccttgcgcccggccaccgcacgggccaccgccaccggccgccgccaaacaatacgtctccaatccagcgagtagatgaaagagcgagccattccttgccatggcggtatgcactactacagaaataatttttctagacaagatcctctttagattgcagacagaccgtaactagtccagtatgtaaaaaatcgtactccattttcgcatacagctccttaataggaccgcacgcaaaaatcgattttcacaagtggtcctcttaaggattcgcacgctaaaataagcttatttttacaggcgaacctctcaaagagacgcccgtttcgcaggcgggcctcttaaatatatttttgtggcgggcgacgcggctgacaacgagcagcgggctgtgtggttgacggcaagcggcgagcggatccgcctccgccggcctcgtaatgggcggcggatggcgtggctgacagcgggcagtgggtggtagcaacggaccacggtggcgggctcccccgcacgttgaaggaggcaacgacagcttccttgcacggaacagtcgggcggcgagcggccgcgatggagcacggcggcaggctccgtcacacgtcgaatgtggcgaaagcggctcccacgcggatccagcgggcggcgggcaccgcccggatctgctggcagagggaggagcccggcggcggtggctagaatttttttgcgatttttaattttttcagatttttatttttaagtgcggacgatataagcacccgcatgcaaaagttgaattttcgtatgcgggtgctccactagcatagaaaaagagagattttttcataactttcctggtagacgggccagagttccgcatgcaaaaatgatcacttttggcccatcttgagatatctaaattatttacacataaaaattttggtatcatggaatatctagtagttgaagatataccaaattttacataaaaaatacgatatctcataataccttctctaaaagatgaaaaaatatattatcttctgacaccttcttaaggttagctctagctgatcgtgtgttcaatttagactttgattaatttacattgcattcttcaataattcttgcatgcttggattaactacatgtagaaattcttatggcattcttgcgtgcatgcatgcaagttggatatgttaatttattttaaattcttttggcgtgtgagagggtaggaatggactgggtcggtgatcggacttttgaagaagctggcaacagatgcagtaggtgaagtgctgactgtgaattggtacgtatgaactactcgcatcgatctctggggttttcttcttcttttcttttttaaggtgaaattagcacgcgtagccgcgtatataggtatttggtgagatgaaggcatgcttggtttaattaatttccaagcttcttcggtatatatgttctagaaatctattgatgtaattaaatatgctccgatcatcacctttggtctttggaacgtctgtacgtgtctatccaaattgtgataacagaattatagcaaagttatgttgcttctgtatgttcaaaaatcaacagatttttttttgaacgcttagaagttcttgctgacaaggcctctagtttaacttcgtttgtgctaggcttattccgggtcaagtcgggtcaacagaaaaacaaatcagtttatagttcagtccaaaaatattttgtctatagtccaagtattggcaattaaatcgtacagaaattgtaactgtacaatacttatttacagctcgttaaagccaatgtctacaacagacaacactctaaagagaaaggcactcctacagaaagctttttctcaaacgatcatatatattcagctttttcaaacagacgccaaacatgtataaaaatactgattgttatgggctggcaccgtaaccacatgcaaaatcttattttcgtaagcggacatgtgaagatgttctcctgcaaaagaattttagccataaaatctccaagataatttatacccctagccaccgtcaaatcgggtaagcttgaaggctagcgtcgtagctgcccaaagcgaggtatgagaagaggcgatgaagctgtcatcattgtcccccacgtcgagctccaccagatccaacgagcctgaagcgtgctgccactacccaaagctcaaccgtgggaagcgagggacggggagaggcgatggaggtcaccattcctgtgccgccgacggtggatccgtcactcctgaggccattggaggtggatcgactgctctcgaggccagcgacattgtccagtcagctcgcggcagcggctcttccctgtcaaagagccgtagccataaacgttattgccgtcacagtcctcacacaagtgcaatggctcgccgccgccacccgtcgccggccacaaagccattgccggcgacctgctcgccgtaaccatattggtggctcggacccggctggtctggataatattagactacaccgccgctgccatagttgttgtcgccgccgacgttgtattgttgtggttggcagtggcgctgtcaccggcgccggcggcggtgtggtctgggttagggccagagcgctc

SEQ ID NO: 6944 - DNA, 16669 bp, Oryza sativa
  unsure (1)..(16669): unsure at all n locations
gtcctaaactctcttcccatcaatttatatttttaggttataaggccgtgccaaaattttaattttaaaatttaattttaagagttaattttgtgagtttttatcatagtttattgtttagtattggtttttaaatcgcaaataatatagtagaaaagttttgtctataaattttttttagttgtttgtatgttgttttacattttatcagttgtaagccaaccgatcagactaacccaaggaaagactcggagaggcttgacaaccatcttaatcgagtgatcaccaaccatctggtttactctgaggagccttgaacaattccgtgatataatcctgttcgtttatgtttaagatacacattctatctcaattttcgttagaaagtttttaaaaccactaaaaagtgtgtttcatgtgaaattttatagaagttgctaaaatatcaaatatatatttatttttaagattaaaataattaaaactaaattaattgatccgcttcttcatctatctctgaccgggtcacaactcttccaaaatccagaaagaataacctgaaggaacgacttggccattcactcgttcaggccggtcaatgcagcatcacattaacaagacgaggcaacagtaacaaaagagcagttggtgcacaacttttcaagcgatgtccccattccaccggaaagttttccctagcggacacaacaaaagacaaacatttactctgccccttttttcctcttcgttgtcagacacgtcaccagtgaaaattaaattataaacatcgaaccttgttgttcatgcatggtacagtatggaggtgagtcaagagatggactagccgtagaaactgtaggagaaaaaggaagaacagtgattgggaccaagatgactcgttcacccttatatttaattaatcagcaccgtttcttttatgaatcatgatgtaatggcgtcattagctacccttatttacccgccaggaatcgtgcacgcacatgtaagcgaggagggaatttgtggtactacactactactttgttcaatggaaaaagcttttattcgaatgaagcttaaaaacataataatagtttagagcataacaagaacgggagaaactctgcgagaaagcactgattgttgtgaaaccagttccttaggtttaaattggtagacgatgtacctatcaacagcgatgtgcccataatgactttatcaatatcaagatatgccgatccaattttttaaaggtagggataggatgtgtgtttataaagatagggtgtgtgagcatctatgtttgtattgtgtttctaaaaagaaatactacctaatatgatttactacttaaaataatatggtaatctctcccttaccctcttagtctcctgtcctaaaaaaactcattctgaagtttaaattttgtccaaaaaaaaattaacttttaccatcttacctaacctcagcacataaaacgagaagttttctcctttaaatatcctttatctacctattaaaatgaggaccgctacaaaacgagatctagttgcaacgggatagatatattaactattctcttgcacgagtatcacagataccagataacaggtattacaggtattaggtaccatgcagctggtagcctggtaccacaacagaggtaacaggtatcacaggtattgggtaccatgcaactggtagcctggtaccacaacaggtatcaggtatcctcgtataagggtatcccattgtattaggtaccaggtactatctcatagaagggtatcccgttccaatgagataccgttgtataagctttctgattaaaattactactttttctaacaatgaggggtattttagtcatttttactcttcactaatctttctttaggatttaggaatgggcctttctgggaccgaggggagtacgtagtaccatgaaccgtaaaagtctctaaactgaagcatccatctgactgacgcgactgcaagcaagcgtacggttactggcattgacgaccaaaggtgtggagatgatgaagagtttctgaaagttgcatgtcggaagttggagactacggttatgtaattttttgccaattatggttggagatttacaaatagacttcaataattgtaatctccttatattagactggattctttattgttccttgcggtgtgttctattcaattagatctaccctatgttcgtcaaacgcttctatgtaataattggctgtagctcttttgagtaaatgccgggatatttatttatttcattatctaaaaaaaaactggcattgacgaccccgatttttgtcaattggaagctttgaatcgaaactcatctaccattgacgatcccagctactaatccttaataacaacaataaccctagaccagatgacacttatctgtacgatcgatcgtgccgtccgtacacacgaaaagacagccttcgagaaaaacgcaggtaaagcgatccaaagtaccatcaccagtacggcagattttaaattttgactcgatcaagatcaaatcgaaccgaatccgagcgaaaacgaagcgtttccgtgatctcgtcgtcgtggttggtgcgtactacgtatacgggtcatgcatgcatgtagatcagttctgtcaggagttttacgcttggtggttgcttcataattctaaatcaacaattaaatgctttgtcttattgtctaatggcccttttgcttaattttggtgtttaaaccttttgcttggtcgattaattgtttgagcctagcttttaatttatctgtccttgaaaaaagtatttatttgagcctacgtatctgaacgtacttgagtattttttttaattaatcatccacattcaattttcttcatgcatgttttatcctgaatcaccctcgtctactatcaaccatctcccatttaataagggtaacattttttttctactcaatgttaatatttgctaaaactgctaggatgtgtttatattttagaatggaagggagtatatacatatatatgtgtgtgtgtgtgttcttcttaatttcttctcttaattctctatctcactcgtagactttaaataaccactattaataattggaaaatatgttattcattcttttgttacttttctctctcactcatggaatttaattaccgctgctaataattgattaatacttttgtctagagttggacccctcagactctgctggcacatcgagtgtcagtagtaaaagtgtttactgatagtcacttagtcagcttccttgatagattagagtgctcccatatgaatggtatgatgtagttgtaatttaactttcattggttcccaaaaatttccttctggcggtgaggtgtggaaaattggtttacttaagcattaagctatacacatttataaagttgttactcgatctatttattcatcgtctattttgattcaattaagtagtgagacgtgtgatgggtatagacaaacactgtgaacaaaagaagcgtgctacatgaatgatcttgtcaaacatccaagatttcttttagaaatgacaacttagctagatttgtgccagataataatgttcctttagggcactcccgatgaaagtgttcatagttattaatggcgtgatatgtagatgcaatctaagttggtaacagaattgaggatgcatgtgtgagagaaattgaccaacttatggaaaacaattaaataaatatagtattgtgaccaaccaaagtgattccacatcagaaaatcagaggaaaatgaacagagataagagtaaaataaaatgatgaactccgcctcactgccggccctctgatagccagcttgatggtttctaagtaagttccaaagttttttccacataaattctttggtagatctattatatataaaagttagttttttctacggtgttgatagaattatttttttaagagttgtttctttctttgttggtgcctacttatttgtcacgttttatagtcttctataaagacataggaagttttatctatcgcgttgtcgatgatccaatcggctcgttgactttagagtctaggtcaccaatttattcgatgacactggtttatatactttttggatatgccggaatcatatctctcgcaacgttccaagatttggagtttctttgttctatttttggctcttaaatgtctccttctaccaaatggttagaataatctcttttatttaaatccaatttgccctgtttcaggaggggaaaaagcagagaaagtgacgatgaaatttattattcggcagcgcttgtaatattattgcaactggcaggtcagcttctataatgatgtccctatgatatgcaatatgaatttatgatagacttcacatggttggtatatcattgtgaattccctagcaaacaacaacataatacacttaggtcgtcgtactaggcataattaaaccaagaactcatcaatattggttggagataattaagagagcgaggcccccacttactatatatgcattaattttgttcaaaaacattttagttttcttaataagtacgaaatatatattattgtataatctaaacggacccagctgatataatgtttgaaagttgaaaccttaccagtaagtccgtaacatggtacagttttgcatcgatcgtacggttttttggacactgatttttagccttaatcaagcgggccattgtacagcatgcgactttatgttgtcgttgaaacaagagttattcatttgacatgagctttgcgttaggttaatttggtcccaaaaacaaacacagcacaacggaagtaaacatccatcagtagtcatgtgtactcatgttatgttaggacgaagctagatatatattgtaattgatggacgcattaacgagcatcggatagagagtactacgtgatggctcaactcacggcagttgatatgttaaataattgctttcaataatttaccttttatgtactccgtgaaagagctaacggcgctagctatcgtggttagacagttaagggttcttactaattatcagtacctttttaaatggagaaattttatagtccttaaaatagtatctcaaagtatctaaattttacgctaaatttttgctacctcaagatacgtaccaaatattacattaaaaagtgccgtacctcctggtactttttcaaggtggtaaaattacccttttagctatccacggtgtatgctttacactgaatcgggatagccgtctgatcagctaaaggagcgtacatgaactatatctagaaatagagttattatctaatatgtgtataccctgaaatcctttaaccgaataatattttttttgcgagtaatctttaatgaaataatgaatggccatacaaatgtatgtacagcttcaccgtagatggggacaagttgggagcatattggacgtactgacaaccattccaactggtaaatggacaaagagataatgtagctagctgaggtagttttcatgttggcctcaggacaaaataaaaggccagcaactatagctaggctaacccactaattaacactgatgtctcacctaatagtgcacaatccaatctactaccaaatttaatcttggagatgctttttggtccttttgtttcatcatttttgttttggagcaacttttccaactccaagctggtccttttggttccttgggttctagaagccctgtggtgtgtacctacctacctacctaccaacttccccttatttggtacctaaactaaccagcatggatactgttggctaatagtctactgatcaatcaattgatgtataccattacaaagattgtgtatagattatggaaagagatggtgggcatcagccatttggctacctatggtaagagtgtactagatcccttaattagttttcatgatctaaccaataggcacataggaattctttttttcttcttaagttaactgctaacaccactctctcttcactactggaattccacggggtccctagggttttcaaatgttccctagagccctaattagaacccaaggggataataagttccctagagccggaactaaaactcaagggaactgagatgatccctagagtttttgcttgctcatagggaaactagtacagttggcactgataggagaaccacggtggcagggtccactgactttttcagaaaccaaccatgtggaaaggttgtaatagtttctcccgccttgtgaatccaaaatttggactgacaccatattcgctttccattggaaagtaataaagtaccccaagctgctaaactttcccctttcttcttccttcaacatgttctttcatctcttcctccccaaatcaactccctctccagtctccaccaccaaatctactctcaagtagtagagatcgacaggagcttcaaccttcgagggtggttgcagcagcactcctgaaggccgtggtgggcgtgggctgattgcatttgtttgcggctgagaggcgacgccgggacaggggtgaatcaaggccacggcgacctgtgcagcgtggtgttgccgagctgctctctagttagcatttagcaaagatactcgagcagatattttcctgtgcatattttgaagttttgatttttgatggattcggtgcttgatgcagatcggtaaggccgagaagtcaagaacttattactgcggttagtaatcaaagctagaaatcatgtgcttattatattgaacaaatagagaatcccacgtatatatatatatatatatatatatatatatatgtagctgcagatttccataagttcttattttcttcaaccttcctactcattttgcagcttgatgacttctggaagtgctattacgtaccattcgcattggatacaactactgcagaaggctatatttgtgttttattttgtcttttgagagagcaaagccacgatctattaagtgttcgtcaattttcaactctggatgtactctccctctgcgtgtgtgtttttttcttttgtttttcgatgggcaactctgcatgtactcccaatttttactgttgagattaactttataatgcagtatatatattttttgttcaagcaagttgacaaaaatatgattggaatgcttactggcttgtttgcaaaagaaataaaataaacaaataaaactaatcaatgattaattaagagctaaattaatctgcattaatttctaaatgaaatactccaataaaaatgttccctagggtgccgtaccactttccacgttggattttttctgtccaggtggcattcaatccctacattttggaacacgtggaaagcttctttccctagattctactaagaaaacccaagggaatcaatttgttcccgtagaatgcttccctatgggccattccctagggttcactgtagggaaacccgatccctagagtttttggctgttccctagggtttttagctctagggattactggaagtgacacagaagattattagacgaaaatggctagaagtactagtaggtttattgtgatattacagaaaactatcgtgacttaacgtcagtggcgtatgtatgggtggtctaacttatataattttttaaataccctaaatataactaagttaaaagtataaattgatcaaatatacatagtaatataataataaaagagttttttttaagatttatgttctcatatgcatatatataaatatatatgtattgggataggattttttgggtggtactgggaccacccctagaagcgcctatgcttgacgtggctatagtagtgtattaatactaatatcttagggattaaggtagatcaagttaaaagaacaagctagaacatctgagtacaggtcgtccatgtgccatgttattctctgaacacgacagaaacaaaatattctaaccaacttcaatttaatttctgacatcaaaacagcacacatgcacattgatttgttcaacatggaaataaggatcattaaacaaataacgccggcggtgtctgttccttgcaggccattacgttgctttacgtagtattactggtaaaccagggaagaactttctccatgatacgccatcagaaaatgttattttcatcgctcgtaattgtcaccccagaatctctctgttcagaccacgagcctcattttattttatgcttatacttattaaacaatttaattttttaactttaaatttgaagctgattttaaagtttttcattaaagtttatttttcaatcatctttgtttttgtttttggattgttaggaacacatacataaaagttttatttataaattattttttatttacaagtatgatgtttggcgatggggcagtcgcaggaatactcatctcatattctcatcattgacatgtataactacttttccatgtttgacacttcacaagtacaaagttatgtagtacagtacttcgtactactcgtactatttttgtcgtctgtcaatgtgttttgatactgcagtaacttttgcaaccatggatattggatttagtattttactccattgttcaatgaatgacaacgttttattgagcatactgacttcaaccattgttttttttttccgaaagctaatatgagtcctccacgctgttatgaaagagaatccaacaacatgactattgtaccaacaaaacataactctagaccaatataaaaaagtactatcggttaaagttgtgatatgagagttaaacgttgttattagcactaaattgttagtataaaggtggcgtttgtttctactaagggcatgtacaacgatttttattagtggtctctctctattaccatgcaagtaaatttggtgacatgtaggaaagagaaaggagtatggttgttatgcatgacaacgactcagagtcgactcttagcatttactaaagcaaattttgttgcatggtggtgaaagaaagaaaataaaagtaagaaaaagtattttgatacattaatgattagagaccatattgtctctaactgttgtaggatgctagtctctaaataacgtagagctcatatccgactctaaataacgtagagctcatatccgactctacctttgtacatgccctaaagataaagatggagttatctttaaaaaaaacgagaaatccattagcacataatcagtagtgttttaattattataaacttggaaacatatttatctgatattttatagcaacatttatatggaaagttttcacgcgaaatacatggtttaatagtttaaaaacgtgctaatgaaatcgaggtaaaatctatattttactcgaaaaagaacgggacctgagtacacttttagagaaatattaagctcatatgcggcgcagtaaattactactggcatgtttggtagagttctaacttttaaatttagctctgaagttgtggagttgtctaaacccagctctacctctttagtttattttgtgtgagaactctatccagctcgttttctttttaggtagagttgaaactaaagctgaaactgttttgctgatctagaccgtgccaaacataacctgcattgcgtgcgaggcgagagatttgagatattatgcgctcgtgttgtggtatgttgatagatgtagtgatgagagttgtgacagttgagagcgagacgaagaaacgcgtgagggaattaatgcatgtgccagaatctacacgttcacacttcaacaacactatcgagcttgtcgccgaaccttgcacgttaagatcgacacggaattgacaggtacggaataatgataatagtgtcctactactgctattttcctgctgattctgtgcagcaaccaccagcaactattgctatataccacatgaggcgagaaaaaaaaagatactatgccataccttgcaagcaaaagcaagcacttgcagcagcaaggagctgcgaccatggctccatccaagcagaagccatactgctcactaggctatcagaagaacatttatccaacgaggtgttggaagtatacagcaaaagaacttatatttacagagagaaaactagtgtgatacagggtgtataaatatgtacgggatgtatgcacatacatacattcatattaacagtccatgcccctacaaaactcgcttcgtcatgtcctgatcttccaagctccccataaatatccaatggtataggatgtaattatgggcggaaaaacagtgttcacctgaatatcttgttgcctgatactgtgatctgcaagctcaaaccttgaaaagcccacgagtaatcgggctggtaggttgatgctgtagccatcccaggattcctgaccatggtccaggatgatctggtccaacagctagataaaacattctgaatgactcttcaccagcatgagctctcacgatctcagatccctaaatcaaaggggagaaggcttatctctgatgcttgcctagttcccaaaggatctctgtgtggattgttctttcttgagtctccagagttcggtcgcttgtgcttcgattgcatcgagatcaaggctctcgaagaaatcatcgtcgtcccaaacgaagttattgttgactccagtagtaatgtgtgaggaaggttgtggtgccggtgccggtgccagttccggttcaaggtttataacagggatggaggcagcttgttggaaacttagcttcctctttctgcagtctaatgtggtggatgactcacaatgggctagacttgtttcaccttgttcctttattgagctggccctagccacaaagctttgttggtcccctagaggactagggccaatggtgtggtgtggttgatggatcccttgtggagtctccatagaattgtgcaagttctctgaagaacagctcgcacttgcgcttccgcttcttgaagcagaattgtcagggacatcttggtaccttgagggcagcactattggggtctgagtaagcagcgaccgcctgcaaaaaacatcagatggaaattgagtttcaaagtttctttcagcaaatttaatcaaaagtacagaaacatgacacaggccacagcgatgctcatctatacaaaaatcttggctactgttgaactgaaaaaggataatgctcactccacatttatctggttccgagtttccaacatggctgatgtacaaacttcttacagataagatagctagtttgtgtcataatagccactttgtcattaggtattcaatgtacaaaaatttaaataaatttatatacttgattacaacttcagaacttctaggcgaacatagaaatgctgctagttttttgcattatatactgagtagcttattcaaattaatctaatcgcagatgcgcccaaagcccaactggcaattgtacagctccactacaaccaatcggttgtaaagcaatatactgtaatttgggactgtactgatgacttcacagatatcgaacatgaaaagttgaaattgcaaccgcacaagggacatgtccaacagcacttttttggggggcagaaagaatgacacaagcaggattgttcaaaacaaacacatgggtagaaattaaaaagtgttgtttgatcaagtaataatacctgtagaaggccatcatgtcaccactgttttcaccatgatgtacgctttgggtaaattggcccgtaggagtagcctggtcattaataaaactgtcttcataattatcttcactatgatcattaccctcatccgctgaaacatcagcatcttcagacaccctagtgcatgtaagacatttataaattaatctaaacaatgattcatattggtaagctctactaatagttacaggaccagctttagtttgtttgctaaatattatataaaagattttagaaatcatactcagcttcatcatcaataaaggtatccagacacatcttggccctccttttgtttcctagatttggaatcaaaaggaatctatcaaatatatgcacaaaaaaaagagagatttgaaagttgtgattatagtataaggttaagaagcctaaatagaaacttgcaaaattaaagagaattacacgaaagaggctcaactcactaatagtgtgtaaggtttaacatacttttggtagcaaaattgtggtttcctccagcagcaatatcatatctgtcatctaaagacatggaggaaactcttttgatcttgtcagcatatttgcaaagtcttttgtacttgggtgcttcccggactgaccctggtgtgtcccctcctgacctaagctgccaatcatcagagaaactatcacatagtagatttgccattggagtatgagcagctggactatgtattttcacatttgatggatgcatccgctcttctttgtttgcttgagtctgatctagggcattctctcctggtgagacagcaagtttggatatctcagaaaaaaattgccctttcccctcaaagttcagaggtccatttctagatttcaactcattggcctttgctccctcactgtgtgattttgaaaaatcaaccttttgctgcacaaaatcagcatttgcagcactgtctgtctctaaatgtttgtggccaacttcaagcatcggagactcaggaacaattccttcttcaatataatatgttagtcttggactaagctccatatcttcttgacctgacagacctggctcactggtttagaattgcagggtttgtggcatatttcttttggacttaccaatgttttaggaggtggagttccatgtacatgtctgtcatcagtgcggccatatctttcagtgtattcaggtgaatggggaactaaaccaaactcatctgtaaggataggtttacttgaataagcaaaacctgcaaggcaatggaattcaatcgttggtctactgatgtcagcagccaatttgacggacgtggtcttgttctggaccttttggtgccaatttacattcctggcatccttatggaattcagatgtcctcggtagagcaggtacaaaggtgattgagacataaccgctaacatccatggctactaatctccactgaagaaagagtggacaggatatttcttaatcggtaaacttggtacgagaacatttttactccatgcagcttcaccggataaaacttccaaaccacaatattcctggggaattacctctttcgatccatcagcaccgaataggcctataaatggttcacaggtttagaatgtcatatatcaatcagaaaagagcaagcttaaaactctgcatgcacaataataagctgagtgaataaaaaaaatcctttttttttttgccgggaactgacagaatgccatcgacggtggaagaagaaccaaccacccaaggaaaaactacccccaacctctataggaggctactcggcattagttttaaacagccctgcttcctttcaaaattgtaatttcttctttgatcttctcaaataaaaaaaatgattttattaaagaaaccgtaggcccaaagaaactatatatggaaccagtaaaccatttttagaatctgataacattgcaaaattaatatcatgaactgagtaaactaaaatgggaaggatatgacaagcactgaccttcgggtgcctcatccattacaactggtacatcagcaggtccttccaaagggcttgcacactgaaaaggtgttcagaaaattttaggacttctgttttcatttctaaatgactacagagaagtcacacagatcttcaatgaatctacctttgtcctagagaaagaaagatcttgaagttgttgcatagcatcaattagcatgttcgttgttcggaacgaatgtggcactctgtagatatcacatggtgaaacctggaagctaggaaatgtaacaagagatggcttccagaaatcttctttgcatgcaccaaagtaccgagcaatcaatcgaccatcatcctctgacatcttattaaagattggagatgcgacattcacatcaactttgcttttctttgagcaaggaatatacttctctatggataattcaacaaacttaacttctggattataaacatgtggaacctatagggtgcatcatgaatttacgcaattagctcctccagatttaagaagcaactttatgaacacgatgataaaaagaattaccatcctaggactatcatggtattcaaatctgcgacgatcacgcaataacttcttcatagttttagtatttccttgcttacttaagtaccctttcatctcctgtccgctacaagccaaaaccagtttgggaagttaaggtaaccaatgcctgagagagaaatacatttaaaaaatgcaatttttgcggcactttggcaattttcaattttcaccaaccaaaaaaaggatatcaactctcccttcgttcttccttccagtccttcccatacgttgaatcatccttaatgcggagatgttggcatcaaaacaaaccacaagatcaacctccataatatctagtccttcctcaccaattgatgttgccactaaaatattgtattccccagaccggaatttctgtaaacaatttacagtcagatagaagaaaaaaatgcaaatcatggatgagcagagtatatagttcaatacatgcaaaatagcttgttgcattttctgtgtctggcccttcagttgatcacctaaaggcaaaaaacttgaaataaataaacacatcatatgattcatatgtttaaatgcataaatgctccattcatagaatattactaccactaaactacttggataaaggaaaatgtaggagaccactatgtttatttcgtatggtcattaccatccaaaatgctacaaactcctggagaatgaaaatcagaccagaacacatattctaattgaagaacttagcatattgaaataaaaagtaaagaactatagatcatatgtttcaaaatcatacttctatgaaatcagtgatctacaattaaatctcagctgatcaccgataacacattatcatacctgtagaactttgaccaatgaatgcagcaggcctcacaagttcaccatcaatatttcttagggagcacaatatttctctgtgtttcacagtataacaaaacattcaagccatataatagattggttctgacagacaattaagcaaagcacgaatgtacattgtttctgatgcacagctaaaataacaaacagattgtttgctggagcaaggagatatacacaatagcacagaaaattcaacaaaattatagggcatcctgagtcttaaaaacaacacagagaaactaagacatgaatgctagctatagttgatagggaactgtttaaaagatgcaagacccactaactgacttaaaaccaacccctacaaatgaaagtaaaatatgcatatccagtgcatagtgacatgttcagcactagtatgccttaattcgccgtttataaattatagctggttgtcaagaaaagtaaagaaattggatcagaagatttaagatgttgacaaaaagatgtaaagcttagttttcccaagctgacttgcctccaactatccatttggtgtccatgtttaatatgagctattgctgttatcaaacacaacttccttctgtcctgacattgtaggtttccatgtattaattcagtactccctctgattccatttataaattattttatacttgtgcacaagggtttagaatatcacactggaaatgtgaatcgtgtattcatgagtggtatcatttatgtataaacattatgaaagtaactattggagtattggtcaatgctggcatgaataaaatgaacatgtatggtaatctgactagcatactactagcattctctacatattgctctttgacaatttcatctagtactcattctgttaaaattggtacaggataatcagtggttccatagatcaagttaaaccccatgacatacattgcattgaaccntgaaagaccaatgacctgtcagtccaatttcactaagaacgcgtcaataccattctcatgataccttcagtaaaagttgtttaagagaattgctaatagattaacccctgtgaaacacatggtgccaaatggcttctgccttcaacatatttatcatcggataagctagtaagctacccacatgcaaacaataacaatgataataaactaataacaatacaaaaccaaaaagaacagccagaaaaattatgcatgcatcaaattttcagtgtaaaataagaatttgcaaattgatataatagagaaaaagactactgcatagtttcttacttgacgcattctcggtaatgtgcaaagataatgacccttgagtcctttggatttttgcctgtgtcaacataacagtatcaaagttgtcataaataaacttgaaacttcacaatgtttgccctggttttgttcatgcaaggaaatgaattccggaatgatattgaagtcaatcaataaaagtttcttcctatagggtgtgtgtatcttgtgatgcaatcatgtgaatgaaaaaaaataacatgtaacatccgatcagtgtgctctatagagaaataat

SEQ ID NO: 6945 - DNA, 1414 bp, Oryza sativa
gagcgggaggggaagaggccgacacagggagagagcgccccgacgccgggggagatgggccgagagaaattcggcccatcgaccccgggggaggtaaaatagacttttgcggagggatttgatttggaaggatttggattcggaattgaactcgacgatagatcggggatttgagatcttgagatggcacggacactagacaacaagcaaagaaacaaatttcgcaattagggtttttaagagataattttcccgctaggtgccacgacggaacgggcgctacacccatgttcctgagctaggacctaatgcatttcacccatcaaatcccaactgactgacgaataaatctcaatagttttactaaaaccctagactgactcgttttgacaaatctcacttaaacgagcgaccaagatttttccccttgaaccacaagaacagatcccaattttcccgtaacaaatccaattgcaaagaacatatgcaatgaaaaggattcagagggctcttaggtttttccatttggcttgtcctacggtcaaggtcggctctgataccaacttgtcaggcccagaaattcccgaatagaattccaagcagaatgtgcattaaaatccccgtccaggaccggccgggtacacaaacgacaatgttgacattcagatccacgtcacagggcccgccccgctcctaaactatccaaaatcaaaagattacactagggtgagactaatcacggtgaatctggttgaccgcccataaccgcgggcacggctattcgaatagttttactctgatcagaggtgtacaactgtacccacaagacacagccccacgacacgttaccgtgcaccgacatgtcaccacgacataccggaaagaggccgtgacaggacccttcgcataaccccctctaaccaagcataccacacctcaggtttcacccccactcctcgcaaggcagcgggcagtcccctctcgtgcctaggtgaatccggaagcgacagaggccgtcacagggcccgccccgctccatcacgcccacccttgcctggatgagttgactagaggaaagctacactacaagcccagccgttgcccacgctggcttgtggtaagtatgataagttcttccagggcatcctgcgaaccggtccttaactgccatgggtgcgaccagcaaaaccatgcacccacagcccaccatgtgatttattttaattaaccaacaccaaagcggtggcactaatccaacaagaccattagaaccaacagtctaaacattaaaaggattctccccattgtgcactagttgaactaagcatggctaagcaatccctagtccaatctctagtcatgttataaccccaagctgacaaagaaacatggtacaacaatagggctgcaggaa

SEQ ID NO: 6946 - DNA, 11750 bp, Oryza sativa
agaaacatggtacaacaatagcatggctatgacaacaggtaaacaccccatagaaacattataaaacaatgcaatatttgaaagaaaacaatagagcatttgcaatataggatcaacatgttcaagtgacaagcatgacttgccttgctctgctgctggaggaacctcggcgactatttcgaaatacaccggagcgtcggaggaaccggaatctagcgacatacaaagcaaacattgcaaacaggctataagactactgaaacagggaacaaaaccatttttaatggattctacacatttttcttgatttactgagacttgaatgggcttaaacggagctcggatgaattagttatgagttttagaagattcactgtgtttattactataaaagaaaaaccttaaatcatttattgtgcaataaatcccagggctgacgtcagcacggaggggggggcggcgccgacatgcggggcccaccggtcagcggctcgggagagggaggaaggggcgccggcacgcggggcccaccggtcagcggctcagggggggaggaaggggcggcggcgacccggctcggcttggctcaaggccgaccgaccggccgcggcgacggcgacggcacgcgcacacgcgaacgcgttaccggcgacggcaaccggcggacaggctttggggtgccctaaggaaggaagagagagagattagagagagggagatgaaccacggcgaccggtattcatggccgaaagcggcgatagcggttgaactcaccggagcgcgaggggatgcgaattccggcgacgaaactcgacggggaaggggcggccggggtagagcttagcctcgcgaacccgacggcggggacggcgcggtgcggcggcaaccctagcggcggctagcggcggctggagtagtggaaacggcggcggtgggtggttgcacggcgcgggagcgatggggagctcgggagagttcggcgaaatggggaaaaagcgagagggggcgacggggaagcctaaataggggaggagagccccggacgtggccggtaggggcgggatttcgccggccaacgtggggagtgggggaggagagagaggcgggattcgaaaatcgaatcccggccatctcgggcgcgggcgcgggcgggagagagaggggagtgggcgccggagatgcggcgcacgcgcggacgtggctgacgtggcccaaaaaaagcggaagcgtgggcgcggcggcggttgctggcgcgacagcgccagctggaggaaagggactggtccgacaggtggggcccacctgtcggcgtcccggggagagagggaggggcggcttggctgggcctcggcctgcggccggcccagcagggaggagggagagaaaaggagagaatgggccagtggcccattcgaaaaagggagggaaaaagaaaaagaaaaaggggaaaaggatttcctggaattaaaatattgcttgctcaattttaattggttaaaattatttctagggctctgaaaattccactaaaaatcctgttagtgaagttcgacatgtagaactcaagaaaaattccacatgccaattccgattattatttgcattgatttaaaagggtttactcttgctttgcactggtattttcttagggtcgcttataaattaaatttttggcttgggaggagaacttcggggtgtgacaaacctaccccccttaaacggaatctcggccccgagattcggaggagctggcgaagaggtgcggatgggcggctttcaactcatcctccctttcccaggttgcttcctcttctgaatgatgactccactgaactcggcaaaacctggtgaccttgtttctggttcctctttcgctggtatcaagtatacgaaccggcttctccacataggttaggtcctcctggatatcaatgtgttccgaatcagcttgttcttcaggtacccttaagcacttctttaattgggacacgtggaacacgtcatggatgccgatcatattggatggaagttctaactgataagcaacttctccccttcgttccaagattttgtagggtcccacgaagcgtggtgccaacttgcctttcgtctgaaaacggtgtactccccagagcggagtgacacgaagatacacgtaatctcctgcctcaaaagtgagctcccttcggcggttatccgcgtagctcttctgtcgagactgggcaatcctcaacctttccctgatgattctgactttctcttccgcttctgttaatacctctgtcccgaacagttgacgctcgcctgtctgatcccagaagagaggtgtgcggcacttccggccgtataaagcttcaaacggtgccatctgtagactggcctggtagctgttgttgtacgagaattccgcatatggcaagtttttgtcccaagctccaccaaaatcaagagcgcaagctctcaacatatcttccaggatttgattgactcgctcggtctgaccatcagtttgcgggtgataggccgtgctaaaatttaaacgggtccccaattcttcctgcagcttctgccagaattttgaggtgaactgactccctcgatcagatacaatctttttgggtactccatgtagacatatgattctcgagaggtaaagctccgccaaccttttgcccgtatacgtggtatgtactggtatgaagtgagcaaccttagtgagtcgatccacgactacccagatggaatcatgacccgatgatgtccggggcagtcctgttataaagtccattccaatctcctcccatttccattccgggatttgaagaggttggagtagacctgctggtctttggtgctctgccttcactcgttggcaaacatcgcagagtgcgacgaattcagctatttctctcctcatgctgacccaccaaaacttttctttgaggtcttgatacattttggtgctgcctggatgaatggagtactgggtctgatgagcctcggtgagtatcagatccttcagttccttgtcgtcaggtacacacaatctttctcccaaccagattgtgccgtgttcatcttcatggaaatcccgggcttttccgactctcatgttctttttcagctctgctatttcagaatcatttacttgagctgctctgacttgatccacgagcgtaggccgtgcctccagagcagctacgaacctgtgttcaacaattcccacgttgagatgctcaaactcctaccgcaattcctcacacatgccctcgatgcatagggcagtgcagtaacttttcctgcttaatgcgtctgccaccacattggctttacccgggtggtagtgaatgctcatgtcatagtctttgattagttccaaccatcttcgttgtcggagatttaggtccggttgggtgaagatgtatttcagactcttatggtccgtatatacttcgcagcggttgccaatcagatagtgcctccagatcttcaaagcatgaaccactgctgccaattccaggtcatgagtcggataattcccttcgtgtggacgcaactgccgcgaggcatacgcaaccactctgccctcttgcattaggacacacccaagtccgtggcgggatgcatcgcaatagacttggaagtctttcatctggtcgggcagaatcaaaactggtgcggatactaacttctttttgagctcctcaaaactcttatcgcactcagctgtccatttaaacttctcatctttcttaagcaaccgagtcatgggtcgggcgatcctggagaagttttcgatgaatcggcggtaatatcccgcaagtccaagaaaacttcgaatctgtgacacggtcttcggtggggtccatttggtaactgactctacgttcgatgggtcaactgccacaccctgagctgtaatgacatgtcctagaaatttgacttccgtcaaccagaagtcacacttgctgaacttggcgtatagctggtgctccttcaacttctcgagtaccagacggagatgttgctcatgttcttcttcggtctttgaatagataagaatgtcgtcgatgaataccacaacaaacttgtccagaaattccatgaacactttattcatcagattcatgaagaatgcgggtgcgttggtaagtctgaaagacataaccgtgcactcatatagcccgtaccgagtggtgaaggccgtctttggaatatcctcttcccgaattctcaactggtggtagcctgatcgcaggtctatcttagaaaacactttagctcctttcagttgatcaaacaaatcatcgattcgcggcaaaggatatttgttcttgattgtgacctcgttgagtgcgcggtaatcaacgcacatcctcttcgtcttatcctttttctccacaaaaatgaccggagcaccccaaggtgaagtacttggtcgaatgtaccctttctgcagctgctcatcaacctgcttcttgacctctgctagttcgttggccgccattctgtatggtctcttgtaaattggagcgattcccggtgccaagtcaatccggaattcaatctctctcttgggtggcatggtagtaaggtcttcggggaacacttctggatactcgcagactatgggtatatcttccaatttcctcaacttcttctccacggtgtccactgggatttccgcctcaatctgattcaaagagaccccttgctttggtgagtctggtgatttgtacactactgtttctcccttctcgttggtcaaggtgactgtgcgattcgcacaatcgatgactcccttaaacttggtcagccaatccatcccaagaatgacatctaggtctttggattcgagaagaataaggttggctagaaatggtgatctttgaatttctattgttatagaagggctgaattgaaccgaagtggagctattccctggggtatgaacccgcatcagtgtgctaagttcctctcttattaacccatgcatcccgacaaacttctttgaaatgaacgaatgcgttgcaccagaatcaaaaagtactgttgcagggattgagttaacaggaaacgtacccagtacaacctctggtgctgtttgtgcctcctccgcagatacgtggttgacacgagcttggataaaccttggcccggcacgcctaggcttcgggcatttgtcagcgaaatggccaagctcgccacagttgaagcaggaccctggttttgctccagtctccttggcttgcgcggacgggcctgactgtgccggtgtcattggtgggcgtggagatacaccgcggttgggctgacctccatggtggttctgactgccactggcgccctgggaaaattgctagggttgaacgggcggtactggcggacgatcatggtggtaggtccaccctgctgtccaggagtgaagtgcggcctctggtgacttccctgatgtgccctgaactgagcggccttcctcttcctgtccatcttgttgcgttgatcctcctgacggattgccttgtcaaccagcctctcaaagtcgacgtagtccccagatattagttggttggtcagctcgtcatccagacctgccatgaacttttcctgcttctcggcgtcggtgcggacatcctctggtgcatatcgcgtgaggcgattgaactcatggagatactccgtcacagtcctgttgccctgatggagtgcccgaaattccctcttcttttgtgccacgaccccgtctggcacctgcgccttcctgaagctacggcagaactctgcccaagtgacttcagtacctggtgggcgggtggccatgtgattgtcccaccaagctgacgcaggaccttgaagctggtgtgtggcgaaagcaaccttctcctgatcattgcactgcaggagattcagctttttctctatggcatggagccagtcattcgcctccatagggttggtggtgttggagaaggtgggtggcctgacacgtagaaactctggcaacttggactgagggggagggggaccaaactgctgatgctgctgttcggcgtgctgcagcatccgctggtgcatctgctggtgctgctgctgcatctgctgcatcatggatgccatcatctgagtctgatgtgccatcacttggggtagcgtcggattctcgggaagtggtggcggaccattgccggaatcgctgtggggatgcaccccattagtgcgctcttcgccgttgctgccctcgcctgttgcgcggctaccattcttggtgtaaaccatctggagggaaaatcagacgggggaaaagaaggaaaacagatgctcaggaactaagctttattatataggaatttaaactgcaattgttcggatctgaattaaaacacttaaaaagcaagcaaaaatccttattaagacagccatatcataggcgcatgatatcgaccgtcgactgaccccaagcaagcaacctaaacacacaaactaacaagcagaaactagacagtcgataaactaatggaaagcgagcctaatgctcggaacggctcctgcggtcggtggagtcgaaggcgtcctcctgctcgtcaccaggtccctctgagcgactcctggagcctggcagataagtctcgccgccgcccggctctgagccactggagctactgctgctgagatcgcggctgccactgggagtagcagacaaccaacctccgttgccactggctggacccctggcggctgatgctggagcgaaggagagagcggacgcgggagctgacacgtgaacgggagctggagctggtactggagctgcaggaactaccggagctgcgggcggaactggaggtgctgcgggagctgctgatggaggtgggttcctgggcgcaagctggatgcgcacgggtgcagtcgtcgtcttgcggggcgtagtgcggatccggactcctcctggcgcgggaagaccctttaactgagcattctccttcttcaggcgcgctatctcgtccttcagagcgacgatcctcatgagcttcccatcattcaaggccttggacgccttgtgcaggtccgagtgcatcctatccaatcccctcatcatagcacacatgtgaccaaaggtggtgtcgttctcgccggctgtcgaacggaaagtactgacatcatcaccgctggctcgacaagggtgaaatcggtacgccgtgtcgtggaagataaagttgtggcgctcccgtagtctggccatcatcaggtatgctgcctcctgacaggcgtgatctgctgtgcctccggatgcctcaaccaccatattagctaggcaggtacccacgtagccgtggacctccaggcgaacacggtgaggaagcttgccactgagtggtggaacagtcgtgtactctggcgcgttggggtagcccaccaccagcgtcatacgtgccaactctgccacaaagtcaatcatgccttctccgcggtggttgggtgggtggccggccatctagagaagacaaaggagtaggatcaatgcatgctcaaatccaaatttaaataaagcaataaaagactcaaataagagaatcgaataagagcgaaattttatgcatagatcattttgcatgagagcgaataaataagacagactcacataacgataaaataatggggaaattagatacatactaataataacactaagagcataaataccttgcaacccattgtcacgccccgaactagtaccgaccggaactagcccgtgacgctccaaattaacctgttaatcgataccagtcccaggaaacagtgctggtatcacaggaagacagattatcacagcaatagaggtctctttattatagagtagaggtacagtcatgttgggctgcggacaggccccgagctcacaactgcattacaaaaggaaagcggaagccaggactaggaccaaacaacacaggcgcgacttgggaactaggccgaaaccctaaaactcatcgtagccggcttgctcctagaagaactcctcatcagcaggatccgcttcatcttcttcagcaactggggggggggattatttatatagagcaagggtgagtacgggagtactcagcaagccaggggaaataagtgtttaatgcaggcttcaaggagaggctgttgtttttgcaattgattttatttgaactcttttctaaaaacaactaagtgagtgcttctcaaacgacacggatgagacagtgcgtctcgtccggtcagagtatgtgtaatgtatcagtctttagaattgaaacaaggttggcacccggccaacagcttttcaaacggccacccgggccaacaactttcaaacggccacccaggcctagctgattctatcagctacagatttttcaaacatcgaacccctttccacaacagcaatttcacaagcagtagttaaacaaaactacgctaggaatcacctcacatccgcccatgaccgtgggcacggctgttcgaacagtttgttaacctctgcagagggggtacactttacccacatgacattactaacccggatcacccagcccgtggggatcagccacgtcgggagacctccaagctttcatgacaaggcatttccaaagccgtcataggtttaccatatgccgacgagaggggtcccagaccaacaacaggttaggtcccagaccatactgtgccaggaagcccaggggtcctccccgacaccaccccggcgaatccacatgtctctcggcatcaaggctcccctgataagctagttactcagccaggggtgtcccattccacccatgtggtcgtacttgtcttatgtttggatgaaattccaaggaaacggtccttaagtgcaagagcggaaaaccgtacacccggtacgttccccggtccgcggttttggaaattcatttagttcgcaagcaccgacccaggtgtcaggttttccaagtcttttgtaaaacccaagttttacccaagttgttactcaaaattttaagtttgaaggcgtccgtcgatactcgtgcagggtgcacgaatatcgagacgcaactagatggttacaagggggacatggtatcacaattaacaaaggaaggatcaaatgcaacaaattgggtaggtccgccaatctgccttgcagatgggacaagcagcttaagtgcagtcctatcaatgcataatatttttcaagcaacataattaaatttcaaatataggctcaagatgttcaaaggtggcttgccttgctcgagatctggagcttgatcctcgaaatcagcgcactgcgggtcttcgggctccgaaactacacgcgaaacgggacaactcaacaaacggcgaaaataaagccctattaaagacctctaagcgtgccattagatagatctcgagatttgaggaattttggaagttgaacggagtcaaacggatttacggttgggaagatattgagtttctaagattattggatttttggtctaaaggaaaaggatttaattaaatcctttttgaaaaagaaaagaaaagaaaaggaaagagggagggaaaatagacttccctcgggcggctagggcgcggcctgagagaaagggtggctcggccgagcttaacgagccggccggcccaagaaggcggcccagagcggcccaagacgcgcgcgcgcgggagggaggagagagagagcctgtggaccgggctcaccacgcgcggtcccgggtgggacccgcttgtcagcggctcggctcaccgtgcggagggagcacgcggcacggcactagggtgggggagggacgcggtgcacgcgcgcggttcgcggtggacgcggatgcggcgggcccacgcgcagcctcacggctcgcggtggaatgcgcacacggggagggactgactggggtcggctcgacctggtcttggctgagctggcgccgatgtggcgcctacgtggctgccacgcgggccggcgggaggtagacgacgacgccggccggaacggacggcggacgacagcggcgagcggcggagcgaaccacggcgatacaggcaaaagcgagcacactgggtagttgcacgagacgaggggagacgagccaacggctcggattcgccggagggagtccgtcggcggcggattgcggcggcggattacggcggcggcaaccggcggagagaaaaggggaaaacggcgacgaggtcacgaggggccaattcccggcggagagagcatctacgcggctacgggaatccgttgctagcgtcggattgggcggagctacgccgagcgaggccggcgacgagcgggtgctacggagctcgggcggcgacggcggcgagcacacggcgagcgacggcaatggtcggggcggcgccggctagctacggggaggctactcgcgctaccaccgaaaactaagggggggaggtggagcgaggaggaagaacggagggaggcactaccgtgcgggcggggcgcagtgacgagaggccgacggcgcgggagtaatctctccggcctcgggccgaggaagaggaagaagagggtgcgcccggagtcctcttccgcgtccttgctcgtgccggctcctccgacatgcgcaacgacgaacggcgacggcgaacagagcacgggggcggcgacaatggcgtggaggcgaatgggagaggaagggaagggggaggcttgggtttatgggatggcaatgtcggtttgagaaccgacttagggtggtcaagacgcgagctagcgctccggctagcggccaaaacggcgacagaggtgacgccggcgagagggaaaaaggggaaaagagggagagaaaaggggagctcgccccttgcctctctgggaaaaggaggaggggagcgggggcgtcgcggcagtgggaggaggggctctgcctccgtcccttggcggcttgcgcgcggagaggcggggccgaggcgatgacgacggggatgacggcggggcggtttggagcggagcggcgacacgggcgacaggcgcgggcaggcgctgacgacggcggcgaccaggcggtcggccaccacggcacgcgcgcgcggaatgcaacgggaggcgcggcggtttgagtggcgcggctcgagcacgcgcgctggctgcggggccgagcggctgcaggcgtggcagggcagcggggccgggcggcgcagacggcgcaggcgcgacgcgggcaacgaccacggggcgcgcgcgcgcgaacgacgcgcgggggccgacttcgcgggtgaggggctttgccagggatggaggcggggaaggggcgctcggcgcggcggctcacgcgcacgcgcgcgcggcgcgcgggcggagcggagggggaggggaagagggagagagagggagcgagcgccccgcccccgggggagatgggccgagagaaattcggcccatcgaccccgggggaggtaaaatagacttttgcggagggatttgatttggaaggatttggattcggaattgaactcgacgatagatcggggatttgagatcttgagatggcacggacactagacaacaagcaaagaaacaaatttcgcaattagggtttttaagagataattttcccgctaggtgccacgacggaacgggcgctacacccatgttcctgagctaggacctaatgcatttcacccatcaaatcccaactgactgacgaataaatctcaatagttttactaaaaccctagactgactcgttttgacaaatctcacttaaacg

SEQ ID NO: 6947 - DNA, 45146 bp, Oryza sativa
ggaactgacagagtgcccatttgcaagaatactagtgaaaaatattcaggtgtcactgtaatactccctccgtcccaaattataaggcctatattttttctttcttttacgcggtcttcaatgacatactttgaccattaatatattacatgtatgtttccaacaaatataaaattagcatcacatgaaagtactttaaaatatgaatctattgatataacatgcataatacttagcatatatatggttaatatggttattagtcaaaagttaccaagtttgattttccttaaaaagagggcgccctataatttgggacggagggagtactaaacagaaaagtttcaccaacaaaacacttctatactacaaaagagttactattcttacaaaaatacaaatccacggaatgatgcactaaactttattctgatagattgagctattagttgtcctacagaatgagtaggttgttgtatagcaagcagtatacattatagaattattgatcaactagacaaagaagatatatgtaccacattacgagaaagttacttacggaagtgatctagcaacacttctaccaatgtccgaacttttggactgagaatgccttgagataagaagttctccatagttttctttacttccaaaaatgtgttatttcttgtaagcaccttccatgatcttcattacacaaaagccatgataaatttgagcacgcatggaagactttcttgtaaaactcggtagagcatgcacagaatcaagaaaaaaaaaagggtgagatctctagtctagtgtatcaatcaattaatttatatgagatgtgggtgtgttcactgctcaagtgtagggatggctcaccggaggatgagattgcctctagcagatggtgcagtagttggtgagtagaaggtagcaagggtaaataaaagaatctagatgggatgggaacaggaactggaagaatgatattgttgagatgtacaaggctacaagcttcattcaggtacttatttacatataccattcaacctaccaaaaacagtactatcatcagaagtgtatatggaacagctcaaatacaacgaactgactaagctcctgaattctcactatattggtatattatatcgaagttctaaacagaatggactagggctgctactgctttgcaaaagtataatcagtaaaagtgtaaaggatattctttcatgctcaaggggatgatgctcagaagatccacagttaggagcctaattatgcactatgatgacatgcaagtgaaacattgtaatagaagtgtttgtagagtgtaggcaatacccttctttatatttggcttcgattgactgatgtgctgccttgataccatagctcaaaagcattttcataatgccataaagtaaggttagagcttgaaaagatataccaatttcctttttgtctgctaaaggaatatttggcgggggtgcttgatcaaatttgtcctttaacatgcgcaactggtgtggactccactggaaaaaataagcaattaataatgcacatgagtagcaaatcagaagtgcctgagcagcaaagcatcaggacagaagtagataaattcttcacctaaaatgaatgcatctagatgatcgatgtattaaagacagcatgaaacatacatttgaagcatccctgtgatcaatgaccctagcagaacgcaatttaacaagatgtggacgtataacatccaaaagcttatcattgacttgttcagcctcatcgccaactggtatctgcattgaaacaagtgacccttcagaagagagaaacagcatagacaacttacaaatttatcactgtccatgcacacctctaaaggttcaactgtgcgcctctgaatataacggctgacttcaggatcactttcatcacagtgaaccaactcagaaatgcgcaaattgttgataacattttgtatagctggttgctttgctgaataaaacaggattgaaaaattagcaagcatctccatttttcagcacttctatttaattttgaggagactaacatcctggtgtagcagtcagagctaaaatccttaacggcacacgagctgcctccaactgtcaacaaagcagaaaagtagaaaaataacaagcaggtgtcagaacgactcattcatttacaccctaccgatatcatcttcttcaaatgagcttgatatggaggaaacccatgaaagataaccaacaaaagagattgcttgggtatcaaatatacctcacggactacaacacagtaagcataatttcgcgaggctcgatgagcttcatctatcaccaagcaaacgagttgattcaccatgcatatccctgccaaaagccaaattaacaatgtcaactcagagaaatggtagcattaaagatagtgggaacaagaagaaactactgtggtcggtccatttctgaagcgggcagtccaaacataaaattgaggtaataatacttaatgaaaggtggaagagaatggtgaagctagtgtcaaatgggagtaaattatatagctgagttgacacatgatttgcaggggcgatatgaactacaagtttggacatgacttcttgtcatgtgtgggcttttatatgcatctgttatgcacaaaatttctgccttcttttgtgctgactccatttcaatggaagctctagtgcaactgtgtttttactatgcgagaaaagaagtgatgctgtttcttccagaaataaatcaatatttggttgccacttgccattctaaactactcataaagcaacacatggaactttcaaagacaaagtacaattgtaaaatatccaataaaaatattaaaagcataggacaattggacaaacaagagaaataatcaccagattgtatatcattctgtagaacttgtggagtgacaaagaacactcttttagacttccaaaagcatgatcgctttgaggggcttagattccccttcaagtcaattgtccactcctgcaacaagtaaaaagcaatagttccaggtactggtagagaagaaaatttgatcttcaactgataccagataagcatgaacatctacagaaagaaattaatacctgtggtattcccactgtattatggcatgcctcaatttgctgagtaacaagaggacgtgtaggtgcagtaaatactattttccctttattttttcagatttacaagataagaagaccaactgtcagaaagggtttttcccaatttacaacagaagaggaaaaaagttccagcatggtacaaaaaattaccttcaggaaaccatctaaagtagttatacatcactactgctgcaataaaagttttgccaagccctgttggtaaagccactagtgtattggtaaataaagccttctctacaaattttttttggtactctcggacttgtacattagctgcaacacatgaacaaaagccacttaaattacacagctgacacattgataccttggttagagagctaagttattatgtgtaacctctaactatttacaaagcaaacatgattacagcagaagtgaactacaacaagaacagaaatgagcatttgagtggtgtttcagaagttattttttgtttcgcttatattggaatcgttacattattaatcactgaggaacagaatgtttgcacatctatgttggagagtggagacagggagtccaggagagttccctggggagttagaaggctatacaaaaaaaaaagattctgaggtccaaatgagcaatcaaaatacttagtacaccaatactgaaacatgcactaattaattgtgtctaaaccaggttattcttgcatgccaatgaaaatgctctagaaaactactgatgacggagtgattcttctcgaaatgcaggtagaaatggagaacactcacttggataaatccaagttcgcgctgcctcgtggtccagagcaacgccgcagggcttaggcacgacatcctcgtccgctctacgcgagcacccctcaccggcgcggtcactggggcgcccccagccgccactcggcgggaccggcgccgctgcgggcggcgaaccaggcacaggggggcccctggcgccactcggtaggatcggcgccgctgcgggcggcgaagcaggcacaggcggccccctctccatcgccgccatctgtctcctcctggtgaaggagtcgacgaatcggtcgagcgtcaactgccgcgtgccggccgccgccgagggctccggcggcggtgccgactccgacgcggcggaagaagacgcgagggcgcatcgcctgtcgatctcctgcacggccgcctcccagtcgaagtcctgcgggggggaggttagggtttcccggagcaaaggtgaaaacgcgagcggagggggggtgaccggaagaggagaaggaggcgcttacgtcgtcgtcgtcatcgatgatgatggcggggtgcagcggcggcggcggaggcggcgcggccattccgccgcgcgcgggagcttcgagaaggttgcgggttggggaattttgggagggggaggaggcggaggggatttgggcggggagacgaaaagttttcggaggcggtgcgcgcgtgcgatgctggtggtggtgatcgcgacgaaacgggcggcccgtgtgatttgggcctcaaagaacagtactgctagtaaaattacggcccatatgtatctgagaaatacggcccatataggataggatggaagaggattgtgggctacgtgacgcctaaataagaaaaagtacaccgaagatctctcaactttgtcgtcgggataaaaccgttctcgaaccacaaaaccggatatcacggatcccttaactatataaaaccggtcacaatttgttcctcgacaattttgatcctggttttgtcctacgtgactgctgagtcagcgtggaacccacgtagaccccaaatgtcaggatgccacgccaacacctttctctttcccctcttctctcccttctctctcacttctctacgctgcgcaggctagccgacgggaggggaggaggccggtggggcgcggtcccgcggcgccgcccgccgcgcgctccgcgaggtgggccgcgacggcgtcgtcgtcgtcgccggccgcgccgtctccacccagttcgccaccgctggtgcagacctttcctctggcgctgcggcgccggcgccggcggcgtcggcggcgggaggcgggtgtacgtgaggaggccggtggggcaaggcaccacatcattgcagccggcaagccaccgtccgacgccgaccaccgccacctcgccgccgccgtcggcccccaccacctccacgaatctcccggcgaacgggtggtactccacaagcgccttccccagcgcctccctcgccggctcgccaccgccgccgccgtttccgccgccggcctcgaacacgtgcagcgactgcaccaggtggcgccccgccacgcggtcgagcaccgacagcggcagcgtctccgccggcgtcggcgacgacggcgccaccagcgacctgctcgtcctcgtcaccgtgaatcccatatatactgtgataatctcgctagcttagctagcttagtttttgtatgtgaattgaatgtgtgtgtgtgtgtggagatgcaagagccagtgccatgtgtatatataggctagctagctcgagcttatcattagttaattaagctaagctatgctcgtcctcgccaatgtggttcctccattgaacaacgggatcaatgctgagcctgagaacctcgcttctgggtgttcaccatggtaacaaatcggtttgattgcccagtggcggcggtcctgcactcctgcctcgccccaccggtgaccgacctcctcacgtacacccgcctgcccgccgccgacgctgccgccgctgcggcgccagaggacgggtccgcgtcctcgccagcagtggcgaactggccggagacggcgcggccggcgacgacgacgatgccgtcgcggcccacctcgcggagcgcgcggcgggcggcgccgcgggaccgcgccccaccggcctcctcccctcccgtcggctagcctgcgcagcgtagagaagtgagagagagaagggagagaagaggagaaagagaaaggcgttgacgtggcatcctgacatgtgggacccacataaggtcccacgctgacttagcagccacgcaggataaaatcgggatcaaaaccaccgagggacctattgtaaccggttttctatagataagggacccacgatatccggttttgtggttcgatgacgttttttatcccgacgacaagttgagagaccttcggtgtacttttcccgcctaaatatgacgggctggaactgggagttcggctacgtgcggcccatacaggatggaatgggctcgtatgcaaagtgaggcccaagtgattcggtccggaaggcatcacgaagagaggtccatgtaatatgggctgaaatggtgctgtatccatgggaaacaatgtatcccgaggtcaaggtgcttcatggcttcatgtcccatgattttatcatgctcatattttaagtattgtagtataccgttactctaataaaaaataatattagttggttacatgcaacatatttaatgatgtgaatttactcttcgtttacataaataaacgaagatacatttattaaatgatgcccattttggaaaaacctcaataaccttaggccatgtttgacaaatgggatagagaaatgatttcccacccactaaaagacatctttaaatcctaaccattcattctccccctttcatttaatcctaacccttcattcatttcccaatcccaatcccacctctcatttcccattatccaaacacacccttagagaatgattaaaatgggatggaggaagtattttgatgttattgatcttgttaacctttactagaggatgatcaaattgggatctagggattgataataagcattcattcctagataaaaaaaactaacacttgtaatgcatgcaaacgagcacggatgcaggtcctctgcagtactgcatgtgcagtactactcactgacatgtgggcccgatgtgcagtactactcactgacatgtgggcccgagggcctgtggggcccacatgttagtgagcagtactgcacatgcagtactgcagaggatctcaattggacgagcacatatgcctctacaatctatatgtgtggtgggaccattctacattcgattggaccattcaacatatctacatagcagccatttactactccaactttatacactcttagggtatccacaatatagcattttagcaggtaataagcattaaatactcacttattacccggtagtaaccattgtaggactagtaagtagttgcagcccggtaacacggctacaatcgggtaacaggaattaaactatcttatttgcacggtgtttctgataaaatgcatggaaataagtcacggctagagattgccatcggtgattttttctgaagctggccctaccttgtttcctactgatatgctgatacattgtggagtgcatgattgcttactactacttgtagacctggcccatactactgacacactactaccaagttgggcaagtaacattgatgttgcccttaggatgggtcacatctcattttaggttgagttattttgggatggagggagtaagggtgtttagtggtagaagagtggttaaaaataatatatgaagaaatttaaattagagatgattgatgttaaagcagtatacattctaaaagaatgatagtactgaatgtgctccccaccatatcgataatttcttcatgtactttaatattacaaaataatcttgcacagttctatcttatttcatttctaaggctcccatttgtctcggatgaaggtgaagattttttttgcgcacataaaataaggcaagccattaacacatgattatttgagtattaattattgcaaacttaaaaatgggtttatttaatattttagagcaacttctatataggagtttttacacaaaacatatcgtttagcaatttaaaaaatgtgttaaccgaatccgatgtataatttgcatcttaataataaacaatcggggctttggcctacaataacgtattattctaaaatcagtaaaatcaaagtgtttgattgttattttgtaatgaacaattggcatatgatattatcggttttgatatttggagattattgacgaagtggatttagagatgattggaattttcaggtgatgaacaagaattactaacaaagtggttgcttatcagaccaacgtatgtgagcggtctgaccgaccgacgttgtgttggtttcagtttaggatcgattctttagatatccatggataattcatatttatgatttctagatagatactagtgtgtaatattgttatttgctattagtgagtcaagttggtgagaacttgcactcagatatggtttcttggttggtgcatgtgtaagtgatttgcctcagaagagcgttgccaatgatgaatcgggagtcaacttgggagaagatgacgtccagacgatcaagatataatgcaagatgcttaggctaacgattaatgcacgtggttagtgaagattccatatggcatatgatggagatattgtgtaacttttagttctgctaaaaatttcagttttttggtacttcaaccattcacctcttctggttaacttagttcttacagtccgatcctacaaaatcctcaaaactaatactccttctattctatatcaatcatcattcatcatataaccttggactcttcgtttgacatgtagcttatattgcatttaggcatgcatgtatgcagacattgataggtagttaagtcctcgttttctatgcatgtgggacttaaagtctgcgtgtttcttagttctcttccaccatatatgctcacattaaataaatactaggacttttaggcgcgcttcgcggcgccctaccgttcattaattaagagctatgtagcttatagatggtaatagggaaacatttcattaagagctatgtagcttcaaagcagagcaaatagcatgactatgagagagacgctgagagcacctaatctaaagcaatgaaaacatttgaccaatgtgaaggcttcgaacttcaggagtagcctgaacagtaaaaaacatttgcatacttcaaaaagctctactaagattatataaggcatattatcacatccgcaattgtatataattttactatcaccatctgtaatttttgacacgaaaatatttacagagttatgtacaaaagcttaaaaggaatttttttctttaatttacagagttatttaccaattcatatccataattatgggatggaaggttccatttgtacaacctacaaaatgcacaaatggttcatgaagtatttcatgtaatataaatgagcatttagatatgtggaatctgatatggaacctttggtggctataacttaactgaccaagtgaacttcacctcaaaatcagatgcaaaataagaacaatataatggtgtgtgccaaattcacttgagtttctagtttcaaaaaatcaattcgtccttacaaagcaaaccaaacctctgactgcacaggatctacagagcaacagatcacagctccaaagtatattgacctgcctgcaaccttgtggctccacgcattcagctcttttggtgtaactggcactcaacgtatgaaatttcagcatggaaaggaactgaaaggttcatttttctttcgaagaacaaataaaaaatgtaatgtcaatcaccaaagaaaattgtgtagaaagtgaaagagtatagcaattagcccacttagcagtttgtactgatttcaagttctactggagcaaattgcagtgtccctaagcagagcatgatgggtgtaggaatcttggtagatatttgcataggccatatcattaatctccgacctctaaccattatgtgttcaattcatggaaagaggattttgtgccatagctcaccacaacacgtttcagatccaatttatagtatttatatattaccaaacatgttcttaatttcatcattgtaacagaaacttccacacaatttcttcaccaattgctataggagcactaaatatatatcagtttaaatcagcatggcttagccctaaattagtagagttcattctgcatcttcaaagactaccaatgctgacttgcatcagcaccacagtgaatcatccaattacttagccagacctacagtttgtaattttagtcaatgatttttgcctctcaaatcctaaaggccaaatgaagaacagagttaccttcaagtgcttgtaatgatctcaccgagcccaacaacctaaatgctattggttggtctagtccaaaaacctcaccagaagcatcacaagtccaaaaacgtacttctattagtaaatgttgagcttctctgaaggtttttgttctaacacaatctgccacataacttcaattctgatgttaaggagcagaaatagagcctgaattctgcaatataaaatcctttagtgagcaagtatcaagtccagaaacctttagtaagcaagtatcaagtctagaaaccaatataagtgtatacttgaaaatgcaattaatggaatatatcaatgtatacgaaaataggtctagcccattcagtttctttaggaaaaaaaaagagccaattcagtttcattatgtgcaaggtaatctttatatgttgtcaaccatgtagctagaagcatcaacactaataaacatttgcttatgtaaatgaagcacaaaggcatttagaaaacaactcccccctaaacaatctctaataaacggggacattcatttctttgaaagaagcatatatgtaatgtgaatcaacaaataaaatgtgtagtaagtgagagtaaacatcaattacctcgatttgcactgatctcagttctctactgtactaaaataaagaatccctcagcagagcaggatagattcacagattccttgtagtcttgcagacatttacataggccatagcattacttgtaagaggcatgcaaaatatcatacctccgaccactgtaataagcaatttgagatagtggctgagatgatggtgagcaatcatatcagaacatgcagtgaaggtttcgttaaatatgattgtcatttagaaaaagagttcaaggtgaaccattgtggaactaaaatatcacctagtaaaattgaagtggaagtaggaaaaggcaaaaaaaaaaaggttcccaaaatacctatacatatggattctcaattaatgatgaagttgcatacatccattgcccctaagtaaattacaccataaataacaatggcaaggcaattgcaaatggcccttggctaggcgacgacagatggttcccagattacctgttgctggccagatctgcaattgcgaaacagtgtcggcgccgcacggcagcggagcttcaaacttgagcagaagggcgccaacccactgtggagatggagaaggattgcatcggctgaagagagcacaaagcaaaaggaatcaaatatgaattacagagacaaagaactactaaccaacggagaattcaacacaacaatagcccatggcaatgcaacatcactgatccagaccttcatggcgagcttgagtgcatgtacccaccggatctagcgataggccagcagatcgatcacctcgttgtcgttctccatcaccagcagccctggttgatctccatcaccaccacccctacttgaactgggaagagagaggagtagtattattatggtgtgtgtgtgtgttgggggaagggagggcgtcggcggcgaggagaagcgcaggagggggaggccggcgtctacccaccggatcgagtggcagggccagcagatcgaccctctcgccctcgttctgcatcatgaccactctccctgcttaactgggaagagagatggagagattgggcagggggagggcgacgaagcgacgacaggcgtcacggccaaacctcgccccgagccccacgtggtctggtccctccgcaggttcaccacggcgtcgacgattcaccaacgaccacagcagcgcctggacgaaggagaacgcgcagaggagtttgtgaggaggcggcgacttcggtgcggctagggtttttggatggcagtagagggcagccaaaagttaactcccccgtccaccctcgcgtgatggacggcaaaaaagctcgaggggcaagccgtcgtcgccggcgaggagaaggcaaagcggcggcggcgcaagggcaagggaaatgaagagaagggacgggggaacagtagtggctagggtttcgagggaatggggggattgggtgttctttttttttcataaaactcccttactttctctttttcagggcgctgtcctatacttggacagtcatatagagggcctaaggcagtgaacttacattgaggacttaagaaagattatcaaggtaagagaggatttttttgcaaaattaccagctccagcgctcttcatcgtagatgcttgatcggacgacgctgctggcgagtaaccagagcgcaccaaaatcaacagccttctagcgcgcggggggcgacgtggatacacgcgcgtgcgtccacgccgtcccaaattctctcgtgcgagcacttcgcccttgcttttaattaccccgattaccccgatatggtagttaaaatttgcttggttttgataaaaatttatatggggatcaatatggaatagacgaagtatattctaaacaatactatcatgtgggcaatttatatttatccgtaacaaagcataactatttagtaagttgtacaaaatctgatttctacccatacttatttttgcaaatataggctgtgttcggtggtgggtgttgggaacccatcacccacgcatgaaaaacggagcggtccattaacgcgtgattaattaagtattagtttttttttccaaaaatggatcaatatgattttttaagcaacttttgtatataaactttttacaaaaaatacaccgtttagtagtttgaaaagcgtgcgcgcggaaaacgagaggggagttgggaattcctgtatcaaacacaaccataagagcaagtttaatggtctatttgatgagcttctaactgctgcagcttctcatagaatcagaagctccccaaacagtccagcttttgatccaaattatgagaagatatagttatataatccagaaaatgaactagaagccagaagctcagaaacccagcttttccagtttctcagaagctggcttccaactagctgctttttataatcttaagctcctccaaataggctctaatactatagacaacaactattagcttcaagttatctataatcaatctaatagccaattcatacaatagttaactacaaatatatactacatcattaataattggtcccacatgtcatacacacgtaacgtttcagagttcgtgctgcagctggctacaaatttgtaacccgttttttttctttctcctctcttgtcttctccatataagtttatagctgacttatagtctattattgtacttgctttaaggtgtaatttaacttcaagaaaagtatgagcattcgtgtcgatacctcgaacgggtcggatatcaaacttggtgaacaggaaccaaacttcaacgcaaggttcttaatcaatacaagctgagctaggatgcaatccccacttcgcataatttgaattaatttgacgccaagaaagtttgaaatccaacttgcacacgttagagcagatgccaggctataagccagctataaatatattttaaagagataaaagaagagaaaaaaaagcatcgggctacagatctgtagtcagttgtagcacggactacaagacgtaatgtgtgtatgatagtatgacgaggtattaatagtatagtaatcaactattgtatgaattagctattacattgactatagatgatttgaagttagtagttgactatactattaaacttgctctcagtaacactcttaacttctaacttaaaatcactaaaaatagactagtagtactagttaataaacagtcttttgtcgtttagaattgaaaaatggctgggtctactgtagcattcctcttcttctttttttaaaaaaagagaaaaagttcaccgctcgaggagcgggcagttgtggactcttggagtttgtttgctaaatggctccgtctctttcttacaagttacatttgaattaacttttgttttgaagactgcaagagacggccatatattataattgcagttcacaatttgatttgacgacggaacggtcaatatatactatcttcattttaaattaaattgactataaaacagactagtgccccggtctatgttttgtgtcactcgaaatcaaaacaatggctagatccatcttgcgtaagcagtggttgagcaaaataaatgatgaatttaaaactatatgaacgcaattcacgtgttcgtttgacaaattagttggataaatggttcccgaagctaggggggttttcttataagtaatccatctagataatactctacatcttactgcaactccacgtatagtattcaacgaattaaaaaaaaccaatgaaccactgtcgccgctgtcatcgaatatacgcggccgtgggcaaccgcatcggtccacgccagcggcgaggcgcttaagcccgtctgcgaccatggcgtcctctgccacaggcacggaccgcacatcaagccatttgacgagattgaagaagaaaaaagaaaaggcaacgaagaagaagggaaacgggaaagcagctaacaacacaggatcgccccaccggtgcgccgtccgtcgcgctgccctcccgctacttaaagatacttacttcatcctagaataaatcaacctctcgtacaagatatgatatactctctctattctaaattgatctatatataattttttttagattattcctaaatgatctacgtatttgtgttgattcattaaatctattcgttatttatgcattggagtaaatggacattaacgtatgtatccatacacacacgtatttataacccatatgtaatatcttgattttctattggctaggaaatagtggagatggtgcatgcatgaagtttgttgctagagtgaatataacactataaaagagttattagcttttcttggtcttggtatacctataaaatatgtagatcaatttagaatggagagagtatcctgtaactatgaatctaaacatgcatttaagtcttataatgttttcacttcatcaatttttttattacacaacactaacatttactccctctgtccaaaaaaagacaaaccgtgggtttccgtgccaacgtttgactgtccgtcttatatgaatttttttataattagtattttcattattgttagatgataaaacatgattaatactttatacgtgacttatctttttaattcttttatattttttttaaataagatgaacggtcaaacgttgaacacgaaaatcagtgtttgttttttttttacggagggagtagtatataacaacactgttttacgacaatcccattgacttggttcgcggtcaatcacaaattcgcaatcataacagacgctccccaatccccagttccccaccccccacggccccacccacacacaacaaaaccaacaaaaaaaaatcccaaaaattcgaatagtatctgccaatcgtcctcatcgccggccatcgccgccgccgtcgccgccggccgaccaccgcgtccgccattacctcctccgcgaccggatctgctttccccaccccccctctctctctctctctcttcccctctgcacctgcatcgccatcacgattcgtcgattgctcgccaagtcaagtccactttgaaaattccatcccaactgcctccggcctctcccctcacccacctcgcggaagcgcccttatataccacgcgcttcgcccgccacggcgaccccgacgacccgccccgcctcgccccccaccgccaagcgccgccgcgtgctcgaccccgaccctgacccggacgccgccgccgccgcagccacggggaactcgccgctgggcggccgcggccgcggcggcggcggcggcggcggcggcggcccccgccaagccaacacctcggctccaccacgcggctcgcggctcccgctgccttcgtctggatcgcctccgcccgctccgtttgaccctttcgtcctcttcgcggatccggcgccgcggccggcgctcacgcgggaacaggtgaagtactgcaaggaggcgctcaaggtgttgaagaagaagctcaagcaaacagctgccattgacatttccaaggaattccatgctctcccggtaaaccaaaaaaaaaaaaaaatctccccccattttgcgctcgtcgtttatttcgtttactcgcttgataaacaattgcgaactggttcggcactaggttttattttagggtcgtttactcgtccttgggaattgtcgaattaaggaatgaactcagtagctagtcgaactgtatgatgataactacttaactagtgctattttgtcttacaagtttggttggtctgctgcatacttgcattgctttgaagtaaagcatcagggtagaggagaattcatgtgattgcatcatacggaaataagtgcattgtttcagtgccttttcagcgggataaaagatgattgcagtctatctttctcgtgggagaatggagatagctaacacgggccgttgtcttagcaatatcagtatgatccattcgatacgtatggactttagaacaatatacttttggttttgtggagtttttgttgctagtcctatgcttcacccaaactagtacgtgatgatgaaaaaggctatatttcattttgagtaatactttttatgtgtaattctagtcccgtggtctcttcaccaaaactggacatatttcttctcatttagttaactactgcatcacatgtaccttgatgcagtaaagtagttcattttgggggttgcgtaccgtgtaaagctattaagccatcattgttggaaccgattgtgatttgatattacaatcaacaatcacttatatggactagggatatgtatgctccatttcttacattatcttgggggtatataactgtattcttcatgtctctaaccccttacaatgatcatatacaggttatccaaatttatagtagtttttatgagacgagtagttatccaaatttatccaactatgaattattttttctagtggcatctcaaccatatcaaatgttgtatgaaccaactgattagacactcttttctgtacggagaacaaaactcatgaagatgagaagtcttatgacaatttcattcaaatctatatttgtgtcgtgttattgcacatttcaaaatccatactctacccaatgtaatggaaaactggctacactttcgtccatatatatgagaagaaacatgtattggactatgtattgttcagatgacctaatgtactgagaaatgttggaattgatttctcaattattattatttctttcaaacttcttatcaagtatgagaaatcttctgaatttcttttgaaattgagtgatataaagttgcaactcatttctccttaataaaacatttgaggcagcaagcattggttaaatttttgaatcctactattttttttttgtctaaacatgctctgcatttcttacaaagtctgtgaaagactgagagtagttcatatctggttctatatttcacaggacatacagacagcattccagacgggaaaatttactgctgctcaaaatcctgctaatagggaaaaaaaccgctacagtgatgtcatgccatgtgagcattatcaacttgtgttggctgctgtatgttagccaagagacctccatgacgtattattagtttgacttaacttctcttctttagttgatgaaacccgggtacgtttaaagccctcagcaagtgatcacccttcaagcaatgaatacatcaatgcaagccttatagaggtaaaaacacaggggcatatttcctggtgtttatgttatacacgagtttccatctttttcaatactgaatgtttcaaatcctagatgggacatgggacctctggatttgttatagccttataggttatttatgtggtataatatttacagactgatgaccaaggtcaaagtcatacaaagttcatttccactcaaggtcccttggtcaagacatttggggatttctggcagatggtctacgaaaaccagtgtcctgtgattgttatggtcactaaatttgatggtgccaaggtgctaatgttgtacactcctgaattctcagtttccaagttttatttacttgtctttacaacatattattgggttgctctttccctgcattatgttgaggctaccccaactccacttatccaactatgtcctacatgttttaatatttttattatcattatcattgtcatgctgaagtcttaatttcacatctccatggatccccctcttttgctttgttcaaatgggcatgaatttttttgttgactgttgcaaatctggatgcggctgttacatacttgcatgtatgcatcatctcagatggttttattatcatcatatattgatatgtaatctggccattggaagatgaaatagcttgcatctctatggagggcacatatacatcacctagattgtcatatgcaattgagaacataaaatgaacagaaaattaagatcttgaatctttatgcttgcgattgacacatacagctgtcaggttcagaggttctatgtaattcttaacccaaatacactcatgattgcttcgcatatgcatattttaacttgctaaaagccaattgcagtatgctgatctcaaccatgagttgatcctgcctgctcatattgcaatactttgatttctaccgaagtgcttagtgtaatctgatttggatttacaatttacttttggttgtctatttcatgtttggaattgatgtacagaaaatagcatggcatgtaagatgattgctgtgttaacaaattgtccttatgtaatcgattcaatattacagtagaatgagtactgtaaatacttgcatgacaattacagtatgatgattggatagtattttctgtcttagtttatgtttttgatataattgttttgagattatgactttgagaactactccctccttccctaaatgtttggcgccgttgacttttttaaacatgtttgaccgtttgtcttattcaaaaacttttgtgaaatatgtaaaactatatgtatacataaaagtatatttaacaatgaatcaaatggtaggaaaagaattaataattgcctaaattttttgaataagacgaacgatcaaacatgtttaaaaaagtcaacggtgtcaaacatttaggaatgtagggagtatttgtctattactggatgataccaaaaaatgtattaagttcattgatgtagacatacaacttgaatttccgactattttcaactaattactttaataaaattttattaaattattaactttgaaaaaatggcagtgtgacaggtatcttccaacgaacgaaggagaagaaagggattatggaaaattcagtgttaagatcacaaagttcaaatgcgatggtgtcttagaattgcgtggtttggaggtacagcagaatgaggtaaagattttcaaaggccatcagctacgttttcttgttgctattagtgaagtgtaaggtaggttatacttctgttcaaaaaacaggtaggttatactagcaaggcctattcctatgttttgcatcataggttatcaatttcaagattacagttgttcgtagatggatatatttaagctcctctttgcggcatatcttaaacaaatgaagaattacatctatatgcttgtatcatagctcagagatttccccaggttagggcctgcttggaagtccggtttttggcctaatgtgagtacaacacttctgaaaacttttacattctggacttggaagttgaaataggtgcttttatgggtcagtaacccattaactatccctatcttaggcccatacgactggaaaatggatgaccttggaaggccacactatttttcacacattttttctgagaaatctcaggcttgccttgagctcgagcttgctccaccctcctcgcctcagtgcctcattgccactgccacttctacagtaaccaccaacatcctcctggcttgaatgagcgacgcgggcctcctccagcttgaatccatgccactgcccccctcatattggtgatccaagttgtcatgtcgtctgttctcgatacagccctcctggagataggcagcaaacccattagcaggtgcagcagcggtcactctgttagttactctagagaacatgggcatcaacaacagatggcgatgccagtgacctctgccagtgctgagtggatttcctctgcctttgatagcatagcacacgcctcatcctcatcacccctgtccctgaatgtgcatagctttttcaatgattcggtctgaactttataccagtgagtataaattatgttgtgttgttgcatgtatagattcagaatttgctttccttgattctaaaacatttgttgtgtactcgcttctaaagcatgctattgggcaatacacagtcaaatttgctcatgatctgtgctcgatgcattcaaagtactccgtatatgactatgacttgtttgcttggttcccaaacagtattttacaaggtaaacaatcatgttaaggggggtgctactgcataggaaattacaactgtaatattttgtcaggtgtaaatatttaccaaacttccaagcaggcccttaggatgctcgtgtttaaatttgctgagtgagacgacaaattatccatggcatacaagctgtatttacctttagttgaatatattatcaagcttccttctgctatgtgtgttgcatattctatagctggaaacaggcaacccatcttattttcttactttttttttcttctcattgcttccatgttttctcctgtacttcttcctccatgtttgcttccctctctatttccttaagatgtcatcataagaaatgttccattgctatgctgaagagttatgaccagagtatctcctgactgctaatttctgacatttcagtcacttacagttcgccatgttctccacattctgtattctgactggcctgaccatggggtgccacatgacagtgcttttgtacgaaaaattttgaaaagattatatggcattccaaaagagcatccaatagtagcacattgcaggtttgattgaaattaatgccattcttccatgtgcacctatccctatacacaaactcaatactattgttttttctttctgcagtgcaggtattgggagaactggtgcttatatcaccatccacaacactatagagaggattttacttggtgacatgtctgctttggatctttctaaaactgtcaaaaaatttagatcccagcgacctggaatggtccaaacagaggtatgtgtggctctttatttctctgcctctgctacaaaatcctctgaatttgacaatagtttctgtatagtggagctggtatgtaccttagaagaagtatgttgttatttattttatgtactgcagttagtgaacatgtgactcgtgaaaagtgacaactgtaccctaaatctgacgcttagcctttttttttattacaaaatatggtgctccgttgatcttttgctttgtaaggacagtacgtataaagcagcaatcggtgactttcttgtctttaaggcttagttgggttttctggattacggatatgctttagttggattgtcagaatattatccatcgaaataacagtgcctgaggctacctaagagtagcacagaataaggatcactgcagatactgtcctaattcaacattttactctgcaggatcaatacaagttttgctatatggcaattgtctctgagctgaacgacctgctatcaaattcaaaacactgaatcatttctatggtatgtttcttgcacgagggccttactatacgcactatccattacgcggtatcacaagctgtacaaacatatgcttgtttgcatcagtaatctcgaaatgttgcatatctcaattctcgtctcatatcttctcctctgcaggaacaatcagtgccctgggtatctctgacagattgtcgcccttcaactccctcaattctttaagcctagctaacagcattcatgtatgctgatgatgtacagcatgaagactgaaaaattcatgcttcagcaggaagctttctctaacttctccacaccaagaaccacgtgtatgatcccaggttatgcctggttctgtatccaaagctgatgatgatgatacaaggtttggaaatttgcagcggcgcttctcctgcccacccacctaactttgtgattgtttggtagcttctcctgcatcatgcatatgatgaaatttttcggaagttttaagactcagctttgtcacttttcaagcagtagtgacgctgcccccatttgtttgtgtgtgtgaggtcaaatgtctggagaagattgaaacggctgttgctactgcaaatgcagccacttcttgatgatgctctgttctatctctagactgtctgtttctgggggttgaggagttgaaaccggtgttgccaagcagaatggcatcagacatctggagatgattttgttgttatctgtcagtggagttttcgaggggaaaatggacggtagcggaatgggctattggggttccagcccaacgcgaaaaagaacacgagtttttcagaggtgaaaagaaaaatttaccatctaaacgccgtaattagtactaaaacgtaaggggacgaccgaaaagaaaaccattggatcctgtgctttacgctagattgacatccctattctaagtggtatggtcatattgcaatgtaaaataaagacatgttcctaatttgtgtattaaataataaagacatacacgcaaaaccatcaccgtgaatgtactcatctatgaatattcccgaccttgtcctggctatacgtttattgtgagtgaggggatggatggtctatatgttaacgaaagagaaaaacaagttagattggtctactagtttctaagggataatgtcaatatgtatcttagaagaatatttcatttcaagaatgatcccgttccacctgttctctaaccaaatactttcattcaaaagtagactcacctgttcatcttataaatcaaacacatgcttacatgcccatatcacaggagcgactttctaatgtttgtaggagtatgtacaaaaattgccaaggtcgttcatgtaatgcacagtgaatggagatatatataatgaggtttattttaggggtaattaaatttaatgagacgttccagagggcggcttctgcaaaggagcagcacatgcacattgttttgctcattatattttaccagtcccctgagttaaaaggcagtgacgtaatccagcatgtaaaattttaagctatggcgatcacttaagctaaaacgtcattatgcgagttgaagtttaacaaagacacgaaaaaactcaaggtatttaattaattagacccactgtccattttgtctaacagttgacgagaagcaaactagattagattgctagtaaaaaaatatttgacattcaaattgtgcaaaaggggaaattaatctagcatttgacttctgctcataatgtgaaaggttccgttcagatcagggggtgcaaaatttataatgaattcttcgtgaaaaggtgagagtaccttcacgaagggagtacatcacatcacaagatgtgtttaggcaagtaatacaaacatgatgacgcttatttaataactaagtccattgactgtgaaaagcacatgggaataattccctattgatccctacctagtttattttccctggtataagtaatcaaaagctagctagcacagtactgcaggtgcttctcaagcaaagaattaagtaacctactatggatgaaagaacaatgagatgcatggtgtgcatgttagtgcaaatataaattaggagaagtcataaggttccatatatactactttggaataatggaataaacttagggatcttctttgcttttctcctctaatttcattatccacacccagccaattcaacaaacaatgggtggcaaaacaacatggtttttaatttgcgtgtgtaagaaatgtgctaatttcactcaatgtttcacaaggttggcacatgcacattattttcattcttcttccgaagtgctaatcttggctatcagtacattatttaatatttaatagcatccatcctattgggtactttccataaatacagtatacatagacctactggatttatttttataaactcttatacttattttagaatgtaaacattttatatttcctcaagactttgaagcaaaaaagaaaatattttctttagctaaatgtttcatccaaatcaagtaaattgtatgtagatttaaattacaacaaagctccaataaaatgcatagatgatacaatggcagcgctttaacttttaggaattgtttcttggtgatgaatatttacaggaacatttcaattatgggttgtatttaattctaaattgtgaactagtgcatttcacataatgagattactaaattggttgaatgatttctgatttgtctcatttagcaccgaactggaatacaggatgatgaacgggaaggtgttaatttatttcattttagacatcatttaccataaagagcacaattctaaagttagaatgttaataggcaattttgtgatatgaaaattgttattattttcttagaatgcacatcatgaaacaatcctaatttttctttaaaattaaaagagtacttacaattgctggaagttgatgtgagtctatagaatcatgtacaatggatataggaatttagtacaagcagaaaaggaaaggttagctaaaaataaaatttacccatctgtatttttatttccatacccatataaaattttacaattaattaatacgaaccttcaaattctgtgttgattcagtggacaaatcaaactgatttccacgatcattgggttcattgcaactagtttgtataatagataatctaactatctaattattgtatcaaagaaaatgttccaccaataaaaatgattagaattggggaacttacttccatcaccttaaaatgatatgagaatatggaatatagcatgcttagaacttttgttacattttatctataaatataagtctttaataatcattatctcatcaccataaaaatcgttgttttttaatgcaattgatttcctttttgacaacaacccccctcccctattccacccttggcaatccacaacatatcatttcctacaaccacattactactcataaactggatttatttttttcttaatgtgtggatcagatttggaattcaaactaaaattgtgtcggatagttgatgctagttgtatcgacttcactattttttcataaaagaattcaactgtgtttaataagtgggaacataacatacattttgtgcatttatatgtggcaaagcatccttcgctattaatatttggtgcatttagatgcaacgaaacatcccccgtgattaatgtttcattgtaatctttgaagtatatttgatcattaattgtaacaagtttttcatttatgtgtctcaaacatttaatgtcacatttttttcaccttaattgttaccctaccaagcattcggcacgtgactattaaatgtattgcccgtccttcctcgaccctcaccgtgacctcctacccaactctcaccttatagacacttatcatcaagttgtccatgccactatatcctcaccttcccaaacaaagtgttgctatctccatcacgccgcacccctcgtccagttgtccttgccatcgcctagaccatgagctttgccgcccctgtttggagagaggtaaggtgcggcaaagcatcctccaccattaatgtttcatcataatctcggaggtagatttcatcattgattgtaacaaggtttttcatttatgtgaccgccagccctttctcaaacatttaatatcattcaagtaaaaaatatttaatattattttttacttaatcgttaccctaccaagcattcggcgcatgcctattaactgtaacacacacccttcctcggtcccaccaccgcctccttcctcggtcccaccaccgcctccttcctcggtccccaccaccgtctcctaccccacctaccatcaagttgtccactccatcatatccccaccttcctacacaagtgtagctatctccaccgcgccgcacccctcgtccgacaatctttgccgtcgctttgaccacaagcttcgccgcccccgctcagagagaggtaagatctaggcttcacaaatcctagagggggtgtcgaagcactaatcccgaagaattcaccaatccacaggcgtggttttcacggggaaaacaaaaggtttcttcgatttttctaaatctagtatgcactctttcgcaatctagtatgtgtacctttgttttgcttagaaacatgccatgggtagtacaattttttttcagcagtgcatacttagctagctcttctggcatatgactaaccaaaactggaaatgatcagagaagtatgctcgatctactcatatatttttattcaggagaaaaatagagcagatctgatatgtgtgtgtgtgtgtgtgtgtttggggggggggggggggggtgttgaccatgtcctgttctctgcctgatacaccagcagtcaaccattaaactaataagagagaagaacacatataataaacctggatttaatttttcgaattctttactgagtagacttttttgccaccaccctgttgctctacattaaatcgcctcttcaatcgcttcctcctttttgctagctgctccatttttcctccttcgatgttcatctctgaacatataaacacgttcttggcattattattcctggttcttgatataatcgatccgagctgtttttatgatcattttgcatgctctccatggccaacctctcgtgttcgtccatggtcagataggatctcgtccgcatcatcacacggtatagtttttgagttctttgtgatcagatcatgaagatgagtcgtttctgctctgtggttggcatcgtttgcggctccccgtcgtcttcaggcgatgaagcttttgcttcccatggcgagcagcagcaggcgacgacgacgacgacggcgcagtcttctgggaagagctcgagctcgaggaggaagacggcgccggaggcctccggcgagcacaaggcgggcggtgaagcgccgccaccggcatccaagaagacagcattgctcgacaagggcaaagagaaggtatgatatctataggttactactcatgttcgtcttcatcttcttgtttgaagagcagatgctactctttcttgatgcttgctaattttgtggttaaaaactggatttgatgcagtggttttatgcattgatttgatttctttgggatgaaagtttcagaaatggtggtgttccagggagaagaatatgctagggcatcatcatgcatatgctgggttgagataaaaagaaacatcataaatgtgggatttaggatctacgttttaaacatattcacattttttttttgcggggaagacacattcacagttttttaatttgtggggaagacatattcagctttgtgtgtgtgtgtgtgtgtggaagacatattaatagattttttttttatttgtggggaagacatattcacagtttggttatgtttttgcggatcattcatgaaaatgcaccatttccttttaaaaggaacctatctatttcaatatttgtgatgtggctaatcaagaacaatacatcgtgcatcaattagactaaatctttctttgatcatttaggtatcagaaatggacacttctgtcaggagaaccagcaaaggaatatcaggcaatccatcagaggattccaacgaaccagtggctaaatctccgacactgaagaccgtgatcggcagcataaggaactatattgctaccaaaaagggtagaaaaataaagatcctggcctttgaggtagccaacacaattgccatgggttccaacctgatgaacttcctctccgaggaaaacataaggtacctgaaacgtgttgtgcttcagaaccaaggcgtccaaagtctgatctcagatgatcagagccagttgcttgctcttgttggggatgaaattaggtaattaatgactttttctataaatttcaatgcttttactatttatataaattattacttatatgtgtttttcaagatttcttacattcattgggcttggtttatgcagacaacagttcaaagattttgcggcatctgttgctaggcttgggaacatgtgcagggatcccaaatggcacaatcttgaagggcatttctctgggtaaaattttagctgccaccacattactgttcttgtataattcatggctcaatcatattttattctatctgagtgttcatttgtgtgcctcttgtcactgcgcagattggagtatggtcccataactcaggagtattcccatgaaaaagcagcatccaagatggaggatctgatggaacttgtgactaagacaaaggtgtgttagtcacatattttctaatgtcattaccactgttggttcaacacattttctttttaggaaccactgaaatgatgttgctgttctattttcttctgtgcagatactgtttgaagcattgcgccgattgggagtctccgagaagatgtacagggaagccaagcagacaggtgcttcccaaaaccatttgtgtgatcagcacaactaatcagaaatatgtctatttatgttcttcacatcagttcttaacatttttttatatgtgcaggtatgccacttgagactttccaaaatgcggtgaacattgaaaaagaaatcgtgcaaagcgcaaagaagaaagcactttgggtcaagaagattgaaaaagtacgtaaaaactgtgtgatatgatgattaatgtttatcacatttttcaataacgaatttatgttaaatacacaaatgctgtttctgttgcagattgtggaggaacttgtgtacattgtgcattacttgccttctgagatcaattgtgtcttctacaaggaacatgaagaggatagatctgtgaaggctaatgggagccctcagcaaactttagggtctgctgatctccagctgaattacgcaaggatcgttatcgccatacaagttttggtaagattctttgacagtcattaggccattgttctaggatcttggtcattgatcaagtgtagtcgtgcatgatataaacatatttccggttttcagttgatttggcacactaactgaaatgtcgaaactgattttatttgttcataaagtttcaatcgcaggtatccgtcgcatcatcggttccgcaatgtgctgtagattcattgttccatgcactgccttatagaatcagatcagttttgctacctaggatgagacacggcgattttgacgaccaggtgaccactcttttctgtcaattccgattacctgacaaaaatgtgtatcctgtatatactgttcatcttcatttctttctgaactttgcatcttcttattgcagaggacagaaacgcagatcgccgatgagatgaccaggagacttgaatggctctatccaatggcagaatttacaataaggtactgtaatctcttgccatatacaccaggttcattcaatgaataataacctgatgctcaccttgtacatatctgaacatcaggctgtctcagcacactggaatgatcagagaatgcctggtatcagggtatataactatgactgtcgtgtctattttgtcatgaacaatatgcaaaagcacaattgctgatttcactaataattcctcatgaaattcttgtaggagcctcagtgaccgtgatcaacgtaagatgctcaaggttcagacactgtaccatgctgataagatgaagactgatggctgcatcattgacatggtgatggaccttcatcttctcataaaagccgcgagactgagggctgatgcgccgcaccatagcggtcctcttgatcaaccagtgagtaccagtggatcatcaaccagctcggctagcacaggcatcagtggatcgaccagcttcggtaacattagcaccacttggtcagatattgatgaagatttcatcgccgtgatcgattagattcaaggtgtagattccctgcaaattctgatgtagggagagggatgcctgaaaatagagagggttttagctgagaactgagataatgcagaaatttagtttatagctctttagatactagacaaggttggtttaatgttcgcgcaatatttgagttcatgaatctgtatttgaggagctcacatgtacattttgtgcaaatggttggaagagagaagaaaatgtgctgaacatttttcctccaaataatcagaatttcttctccaatatcatatatactagtgtgatcaataattaaagatcatgcttaagcagggaagcagggatgcttttttgggccacttcaccttaagatcatagtggggatggcagaaaggagcagtcatgcttaaagcaatagctagtgctcttttttttttctaaaaaatgtcaaataaccttgataagatttctgaacttttgtcatggatgttgcacgcgtgcagactatacgattacttgtttgcaggtaccatcattggcaaattatttttgagggtaacaccattggcaaatcgatgagtattttttcctcaaaattgacacttgcatcttgcaggggcttaaattagcatgaacactttctcaattgaatggtgatgaacaacataatgtgtctacaacacatgtgctgatgctttcttgtttactcttctactcaatgagatactagtatatgatttcaccattgtttagcaatgagctgactaaccaaaactgcatcaatgcagtctctgcagactgaacttagtttgtgaagtaaaaatgtgcatcacacattttcaggtaaggaaataaataaatgcattatgcatcacaaacaaagctcccactggtttaagaaatcaggattatatgacagaagtttgttaagcctgcaactaaaagttgtctgtgttcttcggtatagtgtgttactgcaaccaagaaagttattactgaaagactaaaccaagaagaaccaccttttatagagattctagaactccattttttttgtatcaagatcaacactgcagcaactaaactcccctgtgttcttgagtgaatcactttcaacaagggccattattttcagaggagaaggcaaaaacactcttgtgaaaaattcagagaaatgcaaacgctttgtgtgaagcatcatctccatcttgttgtgatcagtgcatgacgtagacgttgtactcgacaatggcgtcgccggtcttgaggtccagggtgtgcgtcctggcctgggcgtagccgcgggcgaagcggaaggcgccggtgccgccgatcaccggcatctcccggacgtcgtcgaaggggcagttgcggccgagcacggtgaccacgctgccgttgtaggtgccgtcggtgaacaccaggttcattgcctggaggaagcccagcttggcctggtctgagcccatgtacagcccctgggcccggcccatgggcttggactcgggctcgggcccctccgtcagcggatcgtccatgacgttgatcatcccaaagaaggaccgcgatgacgggtccaccgggtccaccacccgcactgccgtcggtgatggcttgctcaccttgtcgtggaagtagaagtgcaggtgagtcgtcggtgaggatgctgacccgcggcgggccaagcccggcctggtttcttctgggcgggccgccctcgcaaccgccgcaagtgtgaccacaagggtgatcaccaccactcccttggcctccattgttgagctcaatgtgagcaaccaagctagcttcttgctatcgtgtgagtgagtgtcactacttgatgtgttgttcaggtgaagctcatgagctacttatatagcagtgccaccatggtcttggtgtgatgagctctatggcgtgcaagggaaggcgacacgtggcgggcggcgattggtctcaaaggctggtgattccaggtgaccttgtagtactggaagcaagagaaaagatcacaagtggtagggttgatgagcacagatgcaatgttggctttacctttggaatggcacaaacggaggcatcgattggttgcctgtggttgtggagcaaacactggaaaaagttttgtggttggtcggcttctagattgtgtcaaagaaactgatcaccaagctaagatcattgtggatcatatggattattttactagtagaatttctttgccactaattgcagagggaccagatgatctgggttgaagctactggtgtacgaaatcaaatcaaatcagatagtttgcccttcttgttgacggagacatcttggacatgatgacttggatgttggtttcagatgttggtagaagtagtcgttgaagcttgaaagcagctaagctatactacctccgtaaaaaataaaaaatccaaactgtatgggatgaaatatttttctagtacaacgaacaatcttatgctagaaaatatcccatccaatattagttgttgtttttttttgacggagggaatagactatagggtgatctactactactgctctcctatctctgtcagacgctcttcatgcgctctgaggcgcatactagatcgatcactagatgaatttgttttcacaaaatagatgaaacaaaattgtactccggaccatcttggtttgaagccaagtcataccaaattgttgacccttttaatagtactttgttagtatttgttttgctatcaaaatgtgccaagaacacacattttgataaaaaaaatggtgttggagcaaatccaactagtgtattctagccttttctgttgcgttcctcctcttcaatttggggattatgtacacatttatagtctgtacaagacatgggaaattacattcataaccctacagacctaaacccttcccagtgagcagataggcccacctagggggtaactgagtcatttcctgggagacaaatgcagggatggcgcccattaaggcggcatcttggctcactttggggttcccctgatggcccggctacaggctattacttaggtaatatccctcccccagtccatggcgagctctggtctctgcctcaccagccgcaccagggtgtccgagggtggttggcggctactagtgcgctttaatgaacgcccatccttgctgatgcctcgggctccgtcaaggaagggagatgctccgaagctggtctccctcagagctgttgcgaagccctaatggagcctcacctccggctcggtgacaggggattcccctctggagccagtcagccaggccacaatccttagacttggctccggtggagagcccgaatcctccttttgggtcccctgaggatacctccgaagcggaggcccccctcgacgcattaggaggctctccggaagttgctgaggtcgaagctacttccccaacaatggcactaccaaaacataccacattgccatctttttggcatagtaccaaatcaaacaaaccctccctccgtaacacatgtcaggtattagctttttacacggtttccaacatatactatgactattaatttcaattctactatcatgatacttctatatatattatgcatcatatgaaaatgtatttttaaatacgaatctaatgatacatgcatgtacaacactattagtcaaaatttttaaacatagacattgttgaaaacatgactttttatattttaggatagaacgagttgaacggatcgcaacgaaggctgaggttgaagataaactttgaaggcaaccggattctgaaattctttgtgtacagatgtaactgatgcttttgaagtagtgtctgttactccttcccctatctgacaacaaacaggtcgatcacttgaggcatactctcaaatgatgctccagctacaacatcaagaattcagctctttcaggagtttgtcagtgtgacacaaaacttctctagagaaattcagctagctgcaaaatactccttgttgatatagttagacctagtactgaacttgtatcagctgaattctgaaatgtatcaacattcaacaacagtaatcaggttaaagagagtcgagcatgacgcatgggttacgtcgtgctgacctggttgccgacatatatctggtaaccatggccatatgggcccacacagacagtgacacctcctatctctcaacgccgtatatatctttttaaaagaagagtaaatttatatagccataaatacttagatttaacgtcaaatttattacagaactacagatttaaaacatcgtatcacaaaactatatatttagtgataaagttataaaaaatacatattttagagtttatatccatagtattattgaggttggaaaaaaattgtagtttatgataaaactgatgttttaaatttgtagttctctaatataatactttaaatttatttttttgtgaaaaaataatgtcaaatatgtagttttgtgattcaattcattaacactcatttagataaaaggaattacaaataaattttgaaggatttcgattcttaccaaaatttccctattagcttcttttggaaaaaaaaaccctttcttaccaataacccctttaactcctaagcaatatactcccttcgttccaaaacgtatgacgccacttacttttcacataacgtttgatcattcatcttattaaaaaataaaatattatttattttacatatatttttacatattatactaaattttttggacgaataagctatacgacatttttttctgaggaatcaatatgatattgtgctatttcattaaaatatagaggtaataaagtaaaacccctaagggttaaaagagaaaactatacatggctgagagcggtctatgctagcaaggtaggaggtctctaagcctctttgggcctgtttgagggagcttctagcagcagctgttagaagctcccccaaataatccagctttttatccagattcttagaatctgtagctgtggaatctgaaaaatgaactaacccagcttctccagattctcatcagctgcttctcagaatcttaaagctcccctaaatagactctttgtcctggctacaaccaagctatatgacaagatcttatatataccccatgtttttttccctttgagaagtcggatgtgttctcgtctttcctctctagtatatctcctacaaaacaagttcctctaaaattcatgtgttttatttcctatggaccaaccaaattcgcgatcttttaatgtggtttttggatcatagggactaattttagtcactgtcatatcggatgttgggacactaattaaaagtattaaccgtagactaatgacaaaacccattccataaccctggactaatccgcaagatgaatctattgagcctaattaatccatgattagcctatgtgatgctacagtaaacatgtgttaatcatggattaattaggcttaatagattcgtctcgcattagcctccatctatgtaattagttttgtaattagtctatgttcaatactctaaattagcgtccagtcatccgatgtgacagggattgtccctgtatccaaagtgccactaaattcatatgttttaaaaatcctaaaaaaccccgatgtgtgagatatctttgtatgttttccccttttctgtgtcttacaagccgtatggtgcaaaagaagcactaaagcagagcacaagacgacacaacccggggactggctgataataaccgcttgaagagaccagcggttaaggtatcttcgtcatcaccggtgagtactgtgaatatgtgcgtgagatgaattgaatgaggccatatatcgcacacaacaacggtgtgacatcgcgatcgaatttgttaggagttaggtggcaggaatttggagcaacttggagaaaaaaaaaggtgaaagaggacacaaggatagatatggtggctattggtcagataccccatattgtcttacaattatcgttcaggtattagccggtctacgggtgtcttaaaatgacctgcccatatgtgataaaaaaatcattgtggccagtggcggagcggcctggccccctccaacaaaaatagtttcacatataatcacctatctataattaggtaattaacctaattagtgtattaataattatataattaggtcccctgcaagacttttaggctcatcctatatatagccaaatcctggctttgtcactgattgtggctcatgagttttcgatgctgcccgaagcatagagtgccgccgggcctgggccgcccatgcatatattataattggttggcctacgcatataattgtgtgaattatgctatcactgaaccagaacgtttgccacaattcagatgtgttgagttgttgaaagtatatgcatgtgacaagttatattcatgatatatatgtgtaccactcttcatgattaagagcaatagtaatgcgtcccaaaattttaccgacctcacataccacatagactaagaaccatattagctatatactccacaatgcatgttacttatagtgggtcttacctatctctctcctcacttttatctctccccctctctctcctctcacttttcccaccagtctctctctctctcgggcggaggaagcgaagcggcacctgtggcgagcagggctccacacctccacctctcctcgtcagggccggaggcagcgatgtcatcgtccgagcccaaacctctccactgcctccttcgccgtgggtcaaagctgccggagccggagccattgctcaacctcccgctcctccgtgagtccatctccatccctgccgacgagccggacaccaccaagcacaagcgagcatcggggcactgcccccgcagctctagaagcccaaacaacatcggcagtggccgccgccacggccacaacgatggcagtgtagaggagaggtggtggcatggcccaagcggtgacgacgccgggcggggctccacgtcgggcaggcaaaagatgcggacgacggcgccgccgagttacggatctcgggaggctcttctccctctccgtcgcctcccttgtcggctccgaatcgacctcggcggcgcggcctctctctcttcgtcgactccttcttccaccttctatcttcctcattgctgctgccacgcagtggcagcctcctcgagctcacgctgtggcggcggcgacctccccgagcccacacgtcggatctggccgaagaggcggtctaggcggtggcgtccccaagccctcgcggtggttgcagaaaagttggaggagaggagcggcaacttcggatccattgtacccgcttcccaaggctcatctcccttgctttttttgacaatgttagctgaaaaataagtgcccttatttggacgcgtgggcttcaggtgggtagcgccagagatggatgtggtaccaaatctccaacgtgtcacacataggctgaatgcaaacaagaagctcggtgaatggcctaactactcccgccatcctataatataataaccttatatacattttttttatcaagagcctgacgggtcccatttcttttattagaaataaaacatcgagctacagtagtcttcaaaaagaaacaggaaataaaaacggaaccttccacagagaaatgggggttaagaattcaaaagctagccctattacaaggggttcctgactcttttcagaagttttgcctgaacagatatctaacagcaaaaaagaaggagagggaattacaaaacatcatcacttatatctatctcatccctcaatccttttattgttgattctccatccgaactgcgagttgtagacttcatttgccgccctatcttatgagtctggatcccagtagcagtcttcttcgacttgcctcctccttttgcagtagtgcccaggaatcaactcaatggcaagccaaaaagatcacatcagtggggtcttttggataaactttttcaaaacaagctttatttctagatttccagatggcccaaattatagcagccattcctaccataactaagtctttcatgttcttatcaagtttttccaaccaatctccaaaaatgttttgactatcaagggctgggttcagattcaggacacaaattgcagtgttccacattaatcttgccaggggacggtcaaaaaacaagtgttgcacagtctcctctctatcacagagctgacattttttatccccttttctccagcctctcttgtataaattgtcttttgttaagatcctatttttggtgaagagccacaaaaaaaccttaatcttcaaaggagttctgaacttccaaatttttttctgtgggaaatgcacttgttgtagcttcaaagctttgtagaaagagttcacggttccatccttagttaaattccatcgtagtttgttattgcagttatcttttaattgcacatcaccccaactagtacaaattttgtgccaatctctcaatctccctccactcaggtctctcgtaaacttgatgcaatttatccctttttgtttcagttttgccacagttatatgttttgtcaaagtgatgttgtaaaggttggggaattgttcatttaaaggtttgccccctatccagctgtcctcccagaaaagtgtcttttcaccattgcctatcaccttggagcagaatttcagaaagatgtttttgatctccatgagcccatgccagaaatgggagtctccatttttaaatttcaataaagatatgggtttgcaacccatgtatttactggtcaaaaagctttaccaccaaccttcctcattttccaatctccagatccatttccttaacaaagctttgttcattgtttccaaatctaggatccccaggcccctttgatctttgggtgaacataccaccggccattgtaccagatgataaccttgtatatatgatatgacacattttagtgctatgaatctgggcatgactcgattggtatattttacaaacgaggtagtaaaagcagtaccacatgaaggcaagaaacagcgatgactgttcagatgggcctctcaagctcattcattcaaatccattttctctatgggtttccggaccagtatatttcttccaattgggctcgcagggaaaccactactctcataagagaaaaaaagaaaaaaaagaaggccacagcccacagcaacacatcgtattccttcccccgttacacttacacaggaagaaaattttctgttaggagtaaattgcatcgccggtacacgaacttgttaggtggggcaatctagtgcacgaatttgtaaaacacttgttttggtgcatgaacttatctggtgcgtgcggaggaaggcaaaaaggacattacatggctaatcttattgatttaggggatgattaggatactatgtaaacatatatctgagaaggttactattagatatacacctcttcaataaaaaaaatagaataggatatagtgatagtagaaaaattttaaaaaagcaagcaataatataaatgttagaaatatatgaaattcatcatttccataatgagggataaagtagataccaaatttataaatatggcatgtcttatgcatgcttactacacgtatacacgtcacatcctaatcaacatcaacttcgtaaaattaacatttataagttattttggtccttgtccgcatgaagtagacaagttcatgtaatgaaacgagcgttttacaagtttatgtactaaattgtacccacctaacaagtttgtgtatcaccaatacaatttactctttctgttagtatataaaattaatataagccctccaagtcacaaaagctagcttaatggatacgattttttttcttttctttttgcgaaacatggcaggttatattaaaaagcaaataccttttgttttactaccaggaatgccattgttgagtaagccatattcaattacccgccagcaaaggagagggattgctgaagcgtacagtatcagccaatgaaccaattgggtagtagtatatcaatccatagatacagtagaatatcaaaataagacataggcactgtactcaacaatggcatccctggtgttgaagtccacaaaataggttgtaaaatcaaaggtgtttttgattattattctgtgatgaacaattgggcattggagattattggttttgttatttagaatttattcacgaagtggttttggagatgattggatttcacaggtgaatctataggatactgctgttatttcatgttaccgatcagaccgggcagtgtgtgccggtcagaccggtggtgatcgagcggtcggaccggccagcccgcggtctgaccggccgatgctgtgtcggtttcggtttctggttgtttatttggatatccgtgattatttcatgattatgacttctagatggatactatacgtatgtaatactgttgtttgctactaatgagtcaagttggagatagcttggtctcggaatatggtttctttgtttatttcatgtgtaggtgacttgatgtctcgggagagtatttgcggtgatggaccgggagtcggcttggggataagacgacatccgtggtggtcagagatcatgcgggatacttaggctagagttgatgcacgtggttgatagagattccatatggcatacgatggaggtattgtgtgcgtatgggatgcggagtcgaatttagaaggagtccaaatttggtacgattggttatgtaaagtttctttcttgtactagagggtttcctaaggtgtttaggactcttagtatgagtttggttcgtggctttaggctgcctacctcatgtataaatagagggggagcgtgaggcttcccggtatcgcttttgagagcaattgagttgagttttgagttagggtttcgagtttagttgaaatttttgtaaggagtgttgttggtgcactttgtaaacacagagagaatcaataaagtcatcatctactttaagagttcttcgatttgtgtttcaccgggtttcggcggtctaactggcaactcaccggcggtcagaccggcggcattgcggcggtcagaccggcgggagcacggcggtcagactggcggcggcgacaggcgcagcaggcgatctcggcggtcagaccggagattcaacaccggtcagaccggtggcatccactcggtcagaccggcagaacaacttcggtcaggccgacttccgtcgatttcgagggtaacttttatttccgctaaaagttttcggttttagggtataccaaccattcacccccctctggttggcttagttcttgtgattcgatcctacaagtggtatcagagccttgttttcttctttggatttttatcgatctagagtttttgccatggctactcccgctaggttttcaactaagcctcatgttttcgatggaactgatttttctcattggtgtagtaggatgcaattttatattatggctgaagattatgatatttggagaaaagtttctcatccttatgtgattcctgaagctattaatactgctgctgaaaaaaccgcttttgaacaaaattgcaaagctcgcaatattcttttgagtggtatttctcgttcggattatgatcgtgttgcccatcttcaaactgttcatgagatttggactactttgagtaattttcatcaaggaacaaataatattaaagaacttcgtcgtgatcttttcaaaaaggagtatattaaatttgagatgaaacctggagaagctttggatgactatctttctcagtttaataaaattttgagtaatcttagatccgttgattcttcttgtgatgctaattatccacaatctgagatttctcgccactttttgaatggtcttgacatgtctatttgggagatgaaagttacatctattcaggagtctgttaacatgtctactttgactttgaattcactttatacaaaattgaaaacacatgagatggatgttctttctcgaaaagttgattctaaatcgagtgctttagttttttcttcttcctctttggatgttgatgcttcttcatctaagccttcttttcttgctgtttttaatgccacatccgatgatcaactcgaacagatcgaggaggagaatttggctttggttgctaacagaattgctcgagctatgaataatgccaggaacaggaaaagaggtggtccaaattgttgctttgaatgtggttcaattgatcatctttgttcgcattgtcctaagcttgggagaggcaaaaagaagacaaagatggtgagaagaccaacaacaacaacaagccgaagggttcataccaagggaggaagatggagaatcttaggaaggcttttcaacaagtttgcgccgcgttcgagccactaagtgatgtagatggtgagagtggagatgatgataagggaaagaacatctccgatgtttgcttcatggcgcgtggtgaatctgacacagagtatgaagataatgaggtaagtgcttttgaggaagctattaatattttgagtgaaaaaaaataagaagtgtgagaagatgtatagaaaataggaatttatcattgaatctcttaaatctgaaattgctagattaaaatctcttattcctaatgatgatgattgctcaaattgtgaggttttaatgaatgagatttcaaaaattagagatattaatgctgcacatgatttgaaaaatagatattctcttgcttgtagttttgcgttacacacacgcactttggatgagttgtttttaaccaaaaagttgttgcaaaaatatcgaattgcttttcatgctagtttgatgtttaacatgatttctgctaagaagttaaaacaacctcatgatgttttggattgctcaacatgtaatttgaataagttgaaatcgaaagatgctttaggtcgtgttgagtacatggaagatgttgtgaaaaacaatgaagtgctttcttgccctaaatgtcgtaaaagcaaaggtgtcatggtagattgtgaaaattgtgctaatttggaaaaagaggtttcttatttgaaaaattctttgctaagattttctgatggtaaaaagaacctcaacatgattttggatcaatcaaaggttagcacacataatcgtggttcaggttttaatccttatgctcataattctagacatcctcctgttgtgttatgtgttggtgctagaaggggtgagattttggttaaacctgatactaacaaaactgtttttaaatctgctggtatcatgtctactatgagtgcatcttcttcaaaatccaatgttgtgcatgcaaaatctcatgttgttgcttgtgttgctaaatcttctaattctaccaatgtgtctaatcatcatgaaaaatatacttgttctttttgtggcaaagatggacatattgttggtttttgtttcagattagctcataaacagaaaaaggagagagagattgcttttgcaaaatcaaagtggcaaaaatctggttttccctcgaggaaactggtcagaccgtagtgggtcccgcggtcagaccgacgaccggtcagaccggctgaatagcctcggttagaccaaccaccggtcagaccggcggtgaagcctcagtcagaccggctgcacaccctcggtcagaccggcctcggaggaatttttctgaaaattctaaaattgattttgcatgtggatatatgcctattggatcttctggtcgtgtgtctcagtactggatttctaaaattttattgtcatctaatcccagtactgaggcttcgacttctgcttgtgtgtaggctttggtggcaaggaaggagaacgtgtggatcgtggattctggttgttcgcggcacatgaccggtgataaaaattggttctcctccctaaagaaggcatctaagactgaatcgattatttttggtgatgctgctacgagtgccgttctcgctacaggtatggttaaggtaaatgagaaatttgaattgaagaatgtagctttggttgagtacttaaagtataatttgctttcagtttcacaaaatgttgatgaaaattttgaggttcactttaagaaaactggaagtaaagtttttgattcttgtggtgattctatgttgaatatttctcgctatggaagagtgtttaaagctgattttgaaaatcctgtttcacctgtgataacatgtttggttgctaagtttgataaagatgtgatgttttggcatcgtagacttggacatgttggttttgatcatctcactaggttaagtggtttggatcttgtttgtggtttgcctaaacctaagaaagatcttgatttggtttgtacaccgtgtcgtcatgctaagatggttgcttcttcacatgctcctattgtttctgtgatgacggatgcaccgggacagttattacacatggacactattggtccggctagagtgca

SEQ ID NO: 6948 - DNA, 47582 bp, Oryza sativa
ccgattaagctgtctcctatgtgatcctttggggctttcttggtcagtgaagtcaactgtttaggttaagatccgtcgtagcaagtcggagctgcttatcttattgtaagcttgataaacaatcgataaatcaagcatgttacaacaacaaacgatgtttaacaaacataaatgtgcttatgtatgtcgctcatcatcttctagctacgccttgacgaagagggtgtactcgacgatggtctcgccggacttgaagccggagtcgacggtgcgggcctcggcgtaccccctcgccatgcggaacttgccggagccgccgacgacgctcatctccctcaccggcgacatcacctcgttccgccccatgatcgccaggctgctgccgttgtggtcgccggcggtgaacacgaagttcatgtccatcaggaggccgatcaccctctggtcggcgaacgtgtacgtcccctgcgcgcgccccaccacctcccccgccgccgccgccgccggcgagctcgtcagcgggtcgtcgatggccaccaccgcgccgaagtaggtcgacgacgcgttcgtcgacgccgcctgcgccacccggatcgccgtcgggttcggccccgccaccacgtcgtgccagtacaccttgatctttgtcatcccggcgccgccgccgccgccgtcgtccatcgcccacgccaccgccgccacgcacagtaacagaagcagctggagagccgccttcgccatggctgcagctggagcttgagctgatcgagcaagctgaaggaggagctagtgagaggatgagtgctgctaatatataattaatgtagctactactgctgtactccttccgtcctaaaaaaaacttaacttagaaggagatgtggcacatcttagttatccaaatttgttatattaaaagagatcatattttttcttaggttgagttttcgtgggacagatgaagtatttaagatgaaagggaagcaatggatataatgcgatgggagtggttggtgtaggagatgaagtgatgaagcagcatgcacgtggtagagctttttcccttttctaatggggttggtatgtgaagtagccatctccttgatttaacctatatttagcatctccttaattagcctatagttagcatttctctgtttaattattctgtctttttttctattatatatactcccttcgtttttaatgagacattgtcaacacctaacaattcatcattcatcttatttaaaataaaataagtacaaatatatagaaaatataagtcatatatacttgagccgtgtatttcattcgtcctaaaatagtaacgtttagtcttcaaagtttatttaaaaatataacaacatccttatccatgttctcttcccaactaattacaacactccacaaatcaatttcctcacttatcttcacttgcatccaatcacaatcttccctatttaattctatctgttttgttaataattgtgttcaaccctaaaaatcctaatattttgggatggatgtggtataaaacaagtcgcaacaaaagaaataatgcttatatagttcttttagcaagataaatagtaaaattctatgttcagaaatcgataattaacgtcacacattagaaaacggagaatgtgtatagactaatgaggtgattagtccttaatagtacactagtagtgtcagtagtacaattcatgccactaccaccaagaagttacccttttttagcgtggactcgtcaggttagtaaattgcattacgcgtgcacatctcattagctaattaagcaagctatactttatagtgctgtaatatttatttagtaagcaactattaattattgttagtgacaggctgatagtagcagggaagaatgttaagcatgtgaattgtttgtacctgaaaactgggagtagtcggtgttaaggcagactgactgcgactagctaagattcttcagacattgggggtggttggatggtggtgacactgaagagaacattattcatgcaggatttcagaaaaggagttaacaatatgcagtggtgattggcctgcttaattacattttgatcaactggtttcattattatagatatattgaattaatcatccaagttatagatatgccacctgaagattttaataattgagaaattaaaattaaggtcgtggtgtcaacgtgtcatcactgcattgcagatctgtagtcactgtttgtcgatatgcatcttggttcttctagtgtgttcctatattttatcatcttcaggtttggtgggtataacaacagtaatatgataaggagagaaataattgatctgccttttgcagataaccaacttcaccaacacagattcgttcttcctaattttgtttttttttataatgagagtttttattgaaccagttaattatatcaattttttttctctccttactatttcagagatttgttattacgaaagctcccagatttaagcaaaacgtaaataaattagtccaattactcatgcacggtcctgtacctactcatgcacggtcagagagtgcacatgatggactcttgcttgcagctaaatttacactcgcagaattaaggagttgtaattaacacagtacggagtttttcatattattaatctctgcttgcgtatacattaacacagtactagtaagttagttgcgtcagaattatcaacttcacccgtaggaattaattcctctcttcttacacattggaagaatcagaatgcaattataaggactagtccaaatacaacaggtcagataaagtcactccaaacaagttatatttagagctgtctcagaggacagatgtgtttgtttgtcattggcacattagtgtgtgtgtatgtgtgagagggatgcatatatacttgaattattagtttcctgtgtcaaggaagagaagctaagaacaagacagggagagagagagagattcagaattttcagacatgagagtgactcagtggcacggtgaaagttccctgacagaagtttccaccgattatgctgagttctttagagctcattgagaaaaaaaaagccgagaaagctattagcatataattaattaagtgttttaaaaaaatatctatttaattctttaaagaaacttgtaaacaatttcttttaaaaatattgtttatcagttaaaaaagcatgctagtagaaaacaaagcactggtcagcccaaaaagctcaaaagaactaatcttaacagtgactcgtttgccaaggtgaaagccataggaaagaagttgcctgcagccatgaaaacatgattgacctgtatgactaccaaccaaggctttcagtgctgatctgtctgtcaagctatgtactctacaattgatgatcttgggagtagtttttctggccatgatcatctgtagaggttcggtggtgtgcgtaaaagataatactcccctgactggccgaccctacctaattttgcaggtaaccagcgcgtacctttgtcccaccatgttgccatcgttgtaaagcttttgttctcgatcgattttcaggttccaaatccgatcgaatttgagcaaacagatcgaacaaattcctctgtgataaagagcataacttttctctacccatttctccatctcgttttgttcagcaaagagtttatttgtgatgttcagtggtggtacagaggttgtgatgatgttccagttgagatcagagtttttggagattcttagttggtataattgcgcagtggcacatatactccctccgtttcaaaatgtttgacaccgttgactttttaagtacgtgtttgaccaattgtcttattcaaaaaatttaaataattatttattcttttcatatcatttgatttattattaaatatactttcatgtacacatatagtttacatattttacaaaaaattttgaataagacgaacggtcaaacatgtgctaaaaagtcaacggtgtcaaatattttaaaacggagggagtaagaaacatgcgcaatacgtacgaattttgtttggtttgaaatggcgaaagattagcacaaattaataagctttgcgcagctgtggtgccactgagcctctgaagactgaaggagaaagagagggtcggagaattaaactccgtacgcactgcgtagtgggccgcagcttcacaattcggcaaattgcaccgcgttgggcccgacccacttcacagatgggccttcagattatggctgcttctttactttggaggcctgaagggcgatggtccaaactgcatgcggcccagtcattttgacaagtgctagatagatgaaatactccaatacattaatctttttttttaaaaaaaaatgaacgcaagcatgtccagactccagaaaccagaatgacatgtgcgtatgaacaaagttattggccggtcgattttcatggagcaggagatatggaaaataactgcgtacggatgcttataatttggagcgagattaattcttctacctgatggcgtacgtttatgtgttaattaatttggatctaatttggagttgatcgttcatgttcgaaagggggtaatttttaaaaaaatggattatttgaatttgaccctgaaagacgtggaatgcattgaccagctgccgcatgccgcgtttctacttacccatcacgtggccatgcttacgttttttcacactatactacatccgccatggaagcttcctcttccgggtgcactgctgctgacctttctactacctcatttcaaaacataaacatttttaaagataggctgtgtttgaggaagagaggattgagaagattgggaagatacgtaaaacgaggtgagccattagcatatgattaattaagtattaactattttaaacttcaaaaatagattaatatgattttttaaagcaacttttctatagaagatttttgcaaaaaaaaatgcaccgtttagtagttttaaaagcgtgcgcatggaaaaggagtcgcaatctcccctgtctcctgtgaacgaacgcagcctaagggtgtgtttgagaagaaggggattgaggagattgggaagatacgcaaaacgaggtgagccattagcgtatgattagttgagtattaactattttaaattttaaaaatggattaatatgattttttaaagcaactttcctatagaatttttttgcaaaaagcacaccgtttagtagtttgggaagcgtgcgcgcggaaaacgagatgttttctctctcaatctcccagatcacctgggaacgaacgaagcctaagagcaggtacaatagcaggctattagctagctgtaaacatattttaatgagataaaagatgagagagaagagcagtgggctacagatctgtagccagctgcagcgcggattccaagacgcaatgtgtgcatgacatgtgggaccatatattaatagtatagtaagcaactattgtatgaattggctattagattagttgtagatgaattggagctagtagtgggctatactattaaacttgctctaagggtgagtttgagggataggggattgagaagattgggaagatacgcaaaacgaggtgagccattagcgcattattaattgagtataaactattttaaattttaaaaatagattaatatgattttttaaagcaactttcctatagaaattttttgccaaaaacacaccgtttagtagtttgggaagcgtgtgcgtggactatgatgtattttctcaccctaacttatcagaacgaacgctccctaaggatagaaacggatagaattggtagcatctgttcgaaaaatattatcgattaatctggaattgaccaactatttagtgtcaacaagaagatcgaataaattagaaaaaactaaaatttatatattgttagagtcggaaacggcaacacttgtgtggatacgacgctcggttagtggggaaaattttccatgattattttgagtatatgttatcttgacgggatggtcagtgttaggtgaaccaaggcgtgcacaaaaatcttggaggaatattaccatccatcaaaataaaaaattgtaacaaaggtaagctaatgaagctctcattattctaaaacacattaagaacttataaacaataatcatcctcaagaatacacccctaccaacaacaacaacaacaaaaatcatagctagcgtttttttacagggaaaaaaaaagcatatgacaccacacccagcttatatattctagtaatcaactggtcaacacacagcaaaaaccggcagtaaaatgaactgatcaacacgatcatcatcttcaatatcatcgtctcaagtaatgagaatgaatgaatgaattaatcgaggcggagatggatgttgtactcgacggtggcgtcgccggtggtggcgttgaaccaccacgtcgtcgcctggcagtagccgcgcgcgaaccggaacacgccggtgccgcccaccaccggcatctcccgcacggcgcgctccgccgggttggcgccgaggatcgcgaggctgctgccgttgtacgggccgtcgccggcgaacacgaagttcatcgccatcatcagcgacagcgcgtccttgccggcggcgacgtacatcccctgcgcgcggccgaccagccgcgaggccgtcaggttgggcccgtcggtgagcgggtcgtcgatcaccaccaccgcgccgaaccccgtcgccgaggcgttcgtcgtcggcgcctccgccacctgcgccaccgtggagttgggcccgccgctcaccacgtcgtgccagaacacccgcagcttcgtctccctctgcgcctgcgccgccgtcgccgccgccaggacgaggagcgccgccgcgaacacgaaggaggaggaggaggcagccattgcttggttcggattaagctagctttagctgtgtgatgtgatttgcgacgacgtgtgcatgggtgaatttaaagggggaggtcggggacgtggttggtgtgtgctggattcgaaggttcttcgatcgtcgtctacacggcgaggaaggcgactgcaaaaatggtcggatatatgcaaacagtcaggttagaaatataatggaggataaattagttaacactagtggagaaaggggttttactccctcttcggaacccctgtactcccggttttacaacaggaaggacgaatccaggactaaagataggtatctttagtctcgggtgaaataaccgggcttaaaaatccatctttaaagatggataggggccacatcccaactgttttttttcttttatttattgtttctttttgctgcttgtatctattcccccagccaaatccacacaaatcatcaatcatgcacaataaaaatttccacaaatcaagcacaacaaaaatcatccacaatacatacacatccacaatctacaaatcttgtgagatcatccccaaatcaacaaaaaaaatatccaataaaatatacaaaccattcatcattcactacaaaaattcacaaaataaaaaaaatccagtcgctgttgtcgccgcccggccgtgggctgctggcctccttgcgcccggccaccgcacgggccaccgccaccggccgccgccaaacaatacgtctccaatccagcgagtagatgaaagagcgagccattccttgccatggcggtatgcactactacagaaataatttttctagacaagatcctctttagattgcagacagaccgtaactagtccagtatgtaaaaaatcgtactccattttcgcatacagctccttaataggaccgcacgcaaaaatcgattttcacaagtggtcctcttaaggattcgcacgctaaaataagcttatttttacaggcgaacctctcaaagagacgcccgtttcgcaggcgggcctcttaaatatatttttgtggcgggcgacgcggctgacaacgagcagcgggctgtgtggttgacggcaagcggcgagcggatccgcctccgccggcctcgtaatgggcggcggatggcgtggctgacagcgggcagtgggtggtagcaacggaccacggtggcgggctcccccgcacgttgaaggaggcaacgacagcttccttgcacggaacagtcgggcggcgagcggcagcgatggagcacggcggcaggctccgtcacacgtcgaatgtggcgaaagcggctcccacgcggatccagcgggcggcgggcaccgcccggatctgctggcagagggaggagcccggcggcggtggctagaatttttttgcgatttttaattttttcagatttttatttttaagtgcggacgatataagcacccgcatgcaaaagttgaattttcgtatgcgggtgctccactagcatagaaaaagagagattttttcataactttcctggtagacgggccagagttccgcatgcaaaaatgatcacttttggcccatcttgagatatctaaattatttacacataaaaattttggtatcatggaatatctagtagttgaagatataccaaattttacataaaaaatacgatatctcataataccttctctaaaagatgaaaaaatatattatcttctgacaccttcttaaggttagctctagctgatcgtgtgttcaatttagactttgattaatttacattgcattcttcaataattcttgcatgcttggattaactacatgtagaaattcttatggcattcttgcgtgcatgcatgcaagttggatatgttaatttattttaaattcttttggcgtgtgagagggtaggaatggactgggtcggtgatcggacttttgaagaagctggcaacagatgcagtaggtgaagtgctgactgtgaattggtacgtatgaactactcgcatcgatctctggggttttcttcttcttttcttttttaaggtgaaattagcacgcgtagccgcgtatataggtatttggtgagatgaaggcatgcttggtttaattaatttccaagcttcttcggtatatatgttctagaaatctattgatgtaattaaatatgctccgatcatcacctttggtctttggaacgtctgtacgtgtctatccaaattgtgataacagaattatagcaaagttatgttgcttctgtatgttcaaaaatcaacagatttttttttgaacgcttagaagttcttgctgacaaggcctctagtttaacttcgtttgtgctaggcttattccgggtcaagtcgggtcaacagaaaaacaaatcagtttatagttcagtccaaaaatattttgtctatagtccaagtattggcaattaaatcgtacagaaattgtaactgtacaatacttatttacagctcgttaaagccaatgtctacaacagacaacactctaaagagaaaggcactcctacagaaagctttttctcaaacgatcatatatattcagctttttcaaacagacgccaaacatgtataaaaatactgattgttatgggctggcaccgtaaccacatgcaaaatcttattttcgtaagcggacatgtgaagatgttctcctgcaaaagaattttagccataaaatctccaagataatttatacccctagccaccgtcaaatcgggtaagcttgaaggctagcgtcgtagctgcccaaagcgaggtatgagaagaggcgatgaagctgtcatcattgtcccccacgtcgagctccaccagatccaacgagcctgaagcgtgctgccactacccaaagctcaaccgtgggaagcgagggacggggagaggcgatggaggtcaccattcctgtgccgccgacggtggatccgtcactcctgaggccattggaggtggatcgactgctctcgaggccagcgacattgtccagtcagctcgcggcagcggctcttccctgtcaaagagccgtagccataaacgttattgccgtcacagtcctcacacaagtgcaatggctcgccgccgccacccgtcgccggccacaaagccattgccggcgacctgctcgccgtaaccatattggtggctcggacccggctggtctggataatattagactacaccgccgctgccatagttgttgtcgccgccgacgttgtattgttgtggttggcagtggcgctgtcaccggcgccggcggcggtgtggtctgggttagggccagagcgctcgccggcggcggaggtggagcaggagggctcctccttgatgcacagcttcttgtccttggccctgggggtggccctgatccgggagagcacggtggcggggagcggcggcgaggtgatctcgtactcgtgcatgacccatccggaggaggagctctcgccgcggcggtggaagctcaggttgcgccgcttgtacaccacgtcgagctcgcctccgcctccgccgccgccgcggacgatggtgaggatcgccacctcgcccttctggatccgccacacgccgccgccgttcttgactgcgcgctgcaccttgcgcctgccgccgccgccgccgccgccgacgctctcgtggtcgtggacgaagaaggcgtgcgcgctggtggcgtggccgtgctcccgcatcagcgtccacggctcgcacctcgacacgtcgtcctggataacggcggcgtggccgcggccgtagagcgcgcgcgggaggaggtaggaggcgacgatgtcggcgtcggtggggtcgaacttgaacgcgggaaaccaggagaatctcgagaacccgaacctccacgcctccatgcccgccaccgcaacccgctcctcgtcctctcgcaccgccgccggcgcctctgccgccgatgaggtctgctcatcttcttgcaggctacgcgccgaacgtttcctcgacgtggaagccatcgaattcgttcggagatcgatcgctcgatgggtcggttgcaaatttaccttgcaaattaaatacagagaggtttacttcgattcctactcggattgtgtaagtgtaatcgagcgatgcgttgctccccacgtcggccggcaatcgagtcggcgagcgcgaggatcgccgcccggaaggagattcttcctcgccgcggtgacgagaagcagccggaacgccggcgagcgcgggatctcgatcgtcgccgcggccatggcggtttcgctagccgccgcgcgcaccataggtccacaggtcaagtgtgatgcaggcgatgattccgagacaacgcgaaccgttcagattagatctaacggctggctgtggtcaactttgagtctttgaccatgacggctacttgatgggcctaattggcccacataaaacgtgagacaccatgggctgccttcgttggtgaaaacgggcggtcgttagcacgtaattaattaagcactactagctattttttaaaataaatgaataagtatgattttttaatcaattttcgtatagaattttttttaaaaaagaacgtaatgttttatagtttgaaaaacatacgtgtggaaaatgagagggggagtcagggactgctaaagctgttgacgaaaaaatcgaacacatcggcctgggagatctgcttaactccagtgcaggtccaaagattggtgagatgcgagcgtgccagtcagtttgatcctgcaactgacaagatatgcaaatagtagattaaaacagccgatcggccgacaagccgatggagtagttccagccgatgccgataatagccgatgccgataccagccgatagcgatagggtttaagcaatcgactatatgtccaatgtagataatgatataaaggcaatcggctgacgatgatgtaataaaataacaatgtaatcaagtataaaccaatcagcaaataatgatatgataaataagcatcgatccgaaggtcaaagcacacatcggctggaggtccgatgtcatgaaatccacaagattagcttaaacaatgaagcctttgttgtcatcggctaaatccaacttatatgtatatgcaatccttatgagccgatgcaacgtccagataactcaccggctgaaaccccgatgaaacacttattggcaatcaagaagcaggctagagattatagttctaagcacgacttagtagatcaaacttaactgatgcagcactaagtatgaaaagaaatataatatctagacaatcaagccgttgactgagttttcagggtggtagatgtctaagctaatctaatctagcaacgcgatttagccgataccggcagaaaccctaaaatgagaagcagccgatagaactaaattgatatgctaagactagattaacagagatatatgataaatagataggcaagtatatcatccaaaccagagcaatccaagaggtcgaatgtactgatgcagccttcaacgacgccgacgtaaacgatacaattgcctgggccgatggaatattggacttatcccttcaccggagatcgaagacgatgcagccccgcgtcgggtgccaagttccgccgaaacgtaaaaacaaaagtagaaataaaaagggtggcgatgctccgaattgtattgatcgtggagatagattacatagaccccgggtgtacatatttatacccaggggttgatacaagtccttgtcggacaagaaagaaactaacctaaagataagaaagaaactaacctaaatataaaaggaaaatataaagtccttatcggacactaaacacactttcctaaagataaaaggaaactaacaaactattcctaattaatagataaactgccatgccgtatcctctttaaactcggtcacttagggataagctccctttaatagattgatttccttaaccgaatatagcaggaatccgactattggcgacttgataactcccatcggctgattccgagatgctgcagccgataatgattctaagcggatggcgtctttaccgattatcaaatttcactgttaacagccgcccatatcgcttgacgtatcttatttgaggccagagttttaatcacgatactcaacggtaaagtcaactataatatattttctcattaaataaaatgtcaaaataatatcaagctcgaagtatgactgacgtgacgtctatgttaataaggagtactcattacaacgtaacatattatcttaatttgttttgttaaaatgttgatggttgttttgggttccatgcccgcatgcaacatgtagctaggatacggattttcattcctcgacggaacatccttcgttatttatataccatctaaatatttataaaattttttaaaaaaatttataatatagattaatacaaaatatatcactccacaaacatgcaagaccaaattcaacttctacaagttgtaacaaaaataacaaattaaactaaaaatagttatcgtatattcgcaactatatttgttatttttgttataacttgtagaagttaaattttaacttgcttatgtttgtggagtgatatattttatattaatctatgttgctaattttcttttcatattttttatgactattaggtggtatgcacgaaactagggatatccctcgagagataaaatcattttccccatgtacctaatactattctcatcctaaaataatttcatttttcatccatctcatgtataccaatataaaaccaagaaagctaaattactcttaatttatcaaatcgcaatgtaactatttttcaccttattttaaaataataatttttattataataaattctaatttaataattactctaaaaataaatttattttatgctaaatagaaggtgctaattaaaatgaactttattacgggatggagaggtagtacatgatacagtagtaattgacacacaacgtatcgctacctggctaactaattactccctccgttttaaaatataaacttctatgatcggattagatatttcatacgtcctatccgatattaattaggttcttatattttgacacaaaggaataataatgaatcagttaatcgtggcggatatggatatcgtacgggacggtggcgtcgccggcggcgttgtaccagtacgtggtggcgcggcagtagccgcgggcgaagcggaacgcgccggtgccgccgaccacggggatctcactcaccggcctcgccgggttgggcccgaagatggcaacgctgctgccgttgtacggctcatcggcggcgaacacgaagctcatcgccatcagcagcgacatcgtctccttcccggcgctcacgtacatcccctgcgcatggccgaccagcctcgacggcgccgtcaggctgggcccgtcggtgagcgggtcgtcgatgacgtacacagtgccgaacaccgtcgcggaggccctcgacgtcggcgcctccgccaccttcgccaccgtcgagttcggcccggtcaccacatcgtgccagtacacacgcatccgcatctccttctgctgccccgccgcctccgccgccgccgtcacggcctggaggagtagcgccgccgccgcgagcacgaaggacgacgaggctgccattgcttaattagctagattaatgtcgaaacaagatttcggcaataataaaaggggtggctatcaagctaggaaagtggatgagtttggagacaaggaattttatataggttcaggccttcttattcaacaagtaatatcctactcctgtccggagatgattccgccgagtacgttattgattgtataaattggaaaaaagaatcgcgccccgagaggcacacggaccctccttatataggggaaggagtccgctttacaaaatacagcccatatcctaacggaatatgggattatagataaaatacaatcgtaaccgactaagatctcgggtatttccttgacatacaagtaaaaaactaacccgagtcttcataaagatattctatctatatttggtaccgtatatccgactaaattataactgtcatgtagaaatgggatatccatattctccacagtagcccccgagaccttcgcagttgacaaaacaaccttctcgaaacaaaaaacagcaatccgagtgcttcaattcaacttgctccagtttgccgagtgctaaaatcaaagactgcgaagggcgaaaataaaacatggtgcatcgagtagatgcacctaattaggtatagcccccgactatgtaattagttgaaaaactaaacacgtagtcaagaaccgagtggttttatcaacactccttgaacatatcaaggataaaaaaatatgaaagggccgagtgataaacactcaaaaggtccaaaaatagacatatttgataggaatccgagtaagaaactcttaaaatgattcaccaaacatgataaaaaatcacggtaattaatgagtctaatagcctaggctgtgacccttacaataaccaaaataagcatataacatgctaaaagaataactattagtaaaccagtcatctcaaatcaacccaaacagcttttgcagcctaataaagcttacaaaaatggtataacacctttctgtcgggcaccttttgtttgcatcgtgttaattccaaagaattatcaaaccgcattaaaaagggttttaacagcattggaccacatcattgtgagcacaaattgccaaagcaaaaagtgcctaagtccctaaggatcacaatgggccacgctggaaataaaattgggctgaagtactgtgccggcccaggcctgctagcgctcccgatactctaatatcaccgaagtgaaaaatgtctcttcgtcttccccgccgagactctcaccattttccccatttcctgctacagtacaaactgcgccggccaagctagggttcagcaatccgctccaatccatcctcaaacactccacaaaatttctacccgcatccaccgctccaattccccatccctttccagccgtatctcggaccaaatcaaaccatccagtccacattcatggcggaagagagagaaagcttcgagagccagtgggcgtcctccgatgtgacggaagataatctaaaggagatggtggcgcacggcgttcttccagcaaaggagatcatcggatggcgaccagcattcggcgaagcattcccgacccccgatacacacgaaatcgtggtatttgctcatttcttctatggcggattttctcttccaacctcaaggttcttccggggaattatgaacttctacaggattagcttgcatcatctgaatccaaactctatagtgcatatcgccaattttattcatgcctgcgaagcttttctgggcattaggcctcatttcgccttgttctgccgcatcttcttcctcaagccccagccaaacaaaagcaaaccatgtgttgttgggggtgctggtttccaactccggggaacgctaagccaaaaatacttctccatgcccttcaagacctcaaacaaaggctggcatgcaaattggttttatgttcaaaaccctgagcctgctctccccgagtactcctgtcttcctccagtttatcgggatacttggaactcactgccaatgggagacgaagctgcacaagcagtggaactgatggagcgcatgataaagctgaaagaacaaggccttcagggagaacagatcacacggcactttatcaagtgtcggttagctccaatcaaagagagatctcgcacagccttcgaatttgacggcaagcacgacccaaatcgtgaagatccagattctcttgacttcaaggtcatgaaggaaaggatgtataagatcttctctaatgctatcgttgtcagctattcacacttgctgccagtcgtgccattcaatgcctttaatcctcctccaccggtatgtaaccgaacacttcaacttttcacagaatacggtcttatctgtttgttgaatcagttaacaataaaggatgtcacgcccaggaatttgctctgatgaaatcggatccgccaatcgctcaacgccaatcacctcaccgccaaactggtcagggaagcggaggaccaagaatccggtctgaaactcaaccaagtgctcctgatccagtcggccagccaaattctcgcaagaggaagctggttctaagtgacgacgaaggcgacactgctagaaagcttggagaccgagaggcaaccaataaactgccgaagcaggctactccaaggaagaaaacatccagtcgtcttgtgccaaagatcaggaagtcttctaggtgcaactcatattacgatcttcattgcattgatgcgtacccattgcgataatagtactgacaatcaaacttgcaggaaaccatctgatatagacccatctggaaaagactctgacccgaccaacatggaggcgagttcctcaaaagaaaccgggccgactgcaaaagatctcccgagtgataatctgtaggccagcaacaatgtagaacccagcgacgaacccccgactggaaaccagtcggccgaagccgaagccggagttaatcaggagcccccgactggaaaccagtcggacgcagggccaagccaagagattctagaagttgaaacccaagcagacaaccctcgcggacaagacgccagcaatgactggagatctggatctcctttaagggcatccgaatccactcgtcctcgtccagaaatcattacgggtaaacactttgtctgaaaccatgttgacccaaataactctgatcaattgtctaacctttgtcagtggatacattaggaccaatgattggtgatgaagaagaaattcaccgtggtcaagtggatacactttgccgaagattcgtgctctcccattctggtcaagtggtgggatgacaacttgcaacctcaaggaattgtaataaaccggcaaaaagaagatgaagaagtctgcctactgaagaaggcactcaaccaagcgacttgcattgtaaatgtaagttccttgacacctgacctcagccatcatgtttgccgtctggctcgagcgctgattaaactgctctgcagaggattcatcttagaaacgaggcgaaaaccgcaacccttgagaaactagttcctcatcttggaacccttgaaaccaccaggagtcaactgcacgaggccagagaacttgccagaaagaatgaacacgatctgagggatcggattgctaagctccaggaatccaattttgaactgagtggctcatccaaaggttcgcgcaaactctgcccaactgatttgtgctgttatctctgtaatcttgattaaccgaagttaatgtagtgcaagctgccaagatatctcaactagagaagcagatccaaactctggaaaatgacaaggcagagctggcaagacagtgggattcggctttaaaggaggttgaaggtaccaataatcaatacctcaaaagccattatcttctatatgctgattcattaatgtgaatctgttgatgcagaccgcaagatcaagtctcaagcacagtttgatgtcttagttgacaagatcaacaagcttgaaggagccagggataaagtcgctaatgccgctactccactcatccaggcaatgttcttcaataacgccggttcgagtacacttgatactgccgaaatcttcgacaagctgagagtcgctccagatacttatttcaagaatatcaaagaagctggaagtatgggagcaagtctggcattggcgatgaccaaatccctttatccaagggttgatatggatgccattgatggctttgcagacgggacgagcgaagaagctgctcttgacctcattaacgatgcacagaaagccgctgacaagattgctgctgatgtggttgaaagattccaagaagtcgaccttcggccgactggatctgataagtctgatgatgaaaaaactgatactgattgatataacaatgattttgataattaatgatgatggaggctcaatttgtacaatactgatgaatttatgctatgcttggtgttccatacttagcttttgatttcttaaaagcctttatctagccttattgagcctaaaacccgcaaaagctattaaaaaccttcagtcctcattgactaagtcgaaagaccaaacagggcaatgataaatcaagtaagcaaattgaattgataaaaatcacactcaattattatcatagtagccccccgactgaaaacttcaaggaaaaacttgaggttagcagtcaaagaggaaagatacaaacgtaatgcctaagcataaaattgatgaaggtgttcaatattctaagaattgttgatgggagtaccatcttcgcgcttgagtcgataagaacctggctgtcacgcccggaaattcactagtaatttccgaacttatttgtgcattaaaccctcgtccaggaatcagccgaggtacacaaactgacaatttaatatatagatttatcacattaactaaaacgataaatacttacttaagaggcacttagtcctcaccatgaagaaaactgcagcggaaaaataaaatctagcgaagctccggctccactcccacaggcagctcaactggggtataagccaaacgtcttctccttctggatcctttatcttcaactgaggttgattgattattgcaagaatgagcatatgacatactcaacaagccacacagcaaatatgcaagtgcacaaggattccaaaggatggcataatataggctcatttgcgaaagcagcatttagcaaagagttaagagtagtaaaacagtagagtaattaattaaaaattttaatcaacactgaacagcacacccatgctgcacaggcccaaccatcctgaacaaccatacccggctgtacagatctaactccaaaccaggagctaagcaaattattaccagttatagcatccataattatcgtgagaggtgtgagactaatcacgaaaaacattgctcaacccgcccataaccgcgggcacggctattcgaatagttttactctggccagaggtgtaccactgtacccacaagacacaaccccacatcatgtcaccatgtgcctcaataccaccacggtacctcggaaaggagttgtgacaataccccttgcacaacataacccattacagcgcacctttcctggatcataatcacccccttataaacaaggcatggactccccagcgacccccgtggacttctcgccacttctcagtctggcgcactataatgaatcacgctatacaaaagataaagccgttgcccatgctggcttgtggttggcacggtaaatgtttcacaacagtagctcgcgaaccggtccttaattgtcatgagcacaaccatcaaaaccatatgctcacaacccaccattatcaagttttagttggcaagtaattaattaaccaatcacgattaaccatcgtgaactatcattaagccatccttaaataatagtgagtcataagttatcccaatagtgtgctaatgtttctaagcatggctaagcaatcataactaatatctagctgaaccaatatataaagcccaactagtcaagttataataacccaaggtatcaaggaataaagtaatcaatgtaaattggccataacaaaggaataagttcacaccacccggtgacattcgaaaataaatgcacagttgaaataaatagagaatttaaatataggatcaacatgctcaaaggattgtgtttaggatctgtgtgacttgccttgcaataatcggtcttcaagtaatcttcttgatcacttccgacgcactcacgaaccttcgcaacgacggaaacgacaagctaacacgcaaaacgaagaaaaagactaataaaaaccaaataaacagtacatataaagtaaacaaacatgtagatcatgattttagatgaatttagcaacttgaaccactcaaaaccgagttaccatgatttagttatgaatttccgaagatttaatctattagaaaaacaggaaaaagaaaaacgatgatgacgtcatgatgacatcatcaatggccggaccaagatggcgacctcgccggagatagagcgaccggctgcggatttggaggacatgaacacgtagaggacgacgagacgaacccaacgatactcaccctcgtgccaaacgacgaacgacgacggccggcgactcggcttgcacggtggcgacggctctacgggtcacgggagaggacgggagagggggcaaacgaaagaggaggactagggggtcctatttatagccttggattgaagagatcggactcctcccgcaagaaatcgatccgggaaaatcaaaactcggttttggagataaactcgaaaacgagtttgattcggataaaatacccaacgatttgctccgattcttgggggaaaagatagaggaggatgagaggatcaaaacccctcaaaaatccggaagaaacggggtcggattggagcggatttggaggcggaaggcggcgcaaggtggcggctcgggctcggcctggctgcagccggctgaaggttagggacgacactgtagcagggaggcaaagtagacttttgacgggcttcattttcctcggcccgattgaaggagggaggcaaaacagactttgacagagagagagaggagggggcgggcggcggcagctgggccgattgggccgattcggccgcgcggagagagaaagagttgggccgaaatcggcccaacgacttagggaaggatttaaaaactttttccaattaaaataatcacttaaatgatctttcaattgttaaaaatacttccaatgctcaaataatttcaagaaaaattctgaaaatacttggacactcaaagtacttaaaaaaattataattagaccatttaatgattaatttaatatgtgggtaattactgaaatgctctttgtatgattaaaattaagaattgagctccgaagaatccgagaaaattccagagagtataattaaccatggagaatttaataaaaattaaatccaaccatgctttatatttaggaaattttatttcccacatttaacttcacttgtaaattaatgaacatttaatataaattctattattaatttattaaataatttataaatcctgaaacgaaaatcaggatgtgacactggccgagtaacttcagcaattataaacggtccttcccataagggagataatttatgccgatcctgtgtggtttgaattttcctcagaaccaggtcgccgactaaaaaggctcgcgatcgaacattccgattatgataacggcgcaacccttgcaaataccgagtcgactgaattaaagctgcttcacgggcttcttctaatcgattgatgtcgtctactcggccctcttcataacgctcctcgttgaagttccaaaatcgtagtgattcaaattccacttcacttggcaacattgcttctgcaccataaaccaaaaagaacggcgactggccggtagcccgactgggagtagtgcgtaaagaccaaagtacggacgacagctgattgacccacttgccagcatagggacgtagtcggtcgaaaactcgtgcttttatcccttgaagtatcatgccattagcacgctcgacttgtccgttactcatggtgtgtgccacggtggcatagcaaatttttataccgaagtcttcacaaaagtctttaaatgctccgccagtgaattgagtgccattatcagtgatgatccgattaggtaccccaaaccgatgcacaatgttaatgaaaaaatatctagctttatctgccgtaatcgtgatgaccggtttagcctcaatccatttggagaatttgtcaatagccacaaagagatgcatgtaacccccgactgcccttttaaacgggccgaccatgtcaagcccccagaccgcaaacggccaggacaacgggatggtttgcaactcttgggctggtaggtgaatttgtctggcaaaaaattgacaaccctcgcacgtccgcacaatcttgtcagcatcagatacagctataggccagaaaaaaccttgccggtaagctttgccgacaatagtccgtgcagcggcatggttaccacaaataccagaatgtatatccttcaacaattgtcttcttcttccaaagacacacatcgttgcagtattcctgatggacttttcttgtacagataagtttcatgaataatgtaaagtctgctgcgccgagaaatccgctcggcttcatttttgtcttgaggaagttcttgtttgctcaaaaattttatgaacggttctttccagtcggcttcgatcatgctcacgccttgagtatccatggcttcaattgtctcttttctgggcacggttggttcgtaaagatgttcaacgaacacatctgatctgaaggagctgcttcccgttttgaaccaaaattggccagcctgtcggctgcctcattgttatgtcgaaggacatgggtgagctcgagtccatcgaatttgtcttccaacttgcgtacctcttgtcgataagcggtcatagtatcatctagacaggaccactctttcatgacttgattaacaaccaactgagagtcccctcggacaattaatcggcgaatgcctagagagatggcaatccttaatccatggagtagcgcctcgtattccgccacgttatgggacgcagaaaaatgtatccacaatacgtagctcaatctttctccaatcggggagattaaaacaaccccagctccagtgcctgtaagcctcttcgacccatcaaaatgcatagtccaatattccatcttttcctctggcatgtcttcttggcactcggtccactcggcaaggaaatcagctaaagcttgtgacttggtcgaagttcgtggtttgaacgatatgtccaaagacatcaattctaaggccaacttcgcaatccgtccgtttgcttcgcgattatgaagtatatccccgagtggaaacgatgtgaccaccgtgaccgagtgactttgaaagtagtgagataatttcctgacggtaattaagacaccatataataacttttgaacctgaggataccttgtcttggagtcggctaaaacctcgctgacaaaataaattggtcgttggactttttgaatatggccttcctcttcatgctcaacaaccaggatcgtgctcacaacctgggaggtcgccaacacatataacagtagcggctcttgtggatgcggcgaggccaaaactggtggagtggtgagaagtctcttgaagtctttaaaggctttttgtgcttcgggtccccactgaaaattgtcagtcttcttcagcagcttgaaaaagggcatcccccgctcgccgagtcgtgagacgaaccggctgagtgccgccatgcaaccagtcagcttttggacgtctttttgggagcttggcggtttcatgttaaggatggcgttgattttctccgggttggcctgtatgcctctttgagatatcataaattcgagcaacttccctgacggtactctgaagatgcacttttcagggtttagtttcatcctgaaagcatgaatgcttgtaaaagtttcctctaaatctgtgatcaggtcatccttctgcttggtcttgacgactacatcatcaacataagcttcaacattgcggccgatctgagtcgagaaatatctctgaatcatgcgttgataggttgctcctgcgttcttcaatccaaagggcatggtgatgtagcagtaggccccgaagggtgtaataaacgaggacttcaagcagtcggattctttcagtcgaatctgatgatatcccgagtagcagtccaagaaactgagtaactcgcagcctgccgttgagtcaaccacctagtcaatgcgaggtaacccaaaagggtctttggggcaagacttgttgaggtcggtgtaatcaacacacatgcgccattgccccgtctttttccgaaccaggactgggttagccagccagtctggatgaaggacttccttgatgaagcccgctgctaacagcttggttaattcctccttgatcgcatccttcctgtcctgtgcaaaatggcggagtcgttgcttgatgggtttggcgtcttccttaacatgtaaagagtgctcaatcacctctctaggaataccaggcatatcggatggtttccatgcaaagatatctttattattttgaagaaaggtgatgagcgcgcattcctatttacaatctaactcagcgcctattacagcagtcttatcaggattagagggatctaagggaatctttttcgtcttagcattgctttctccgcttttgagcatcttggttgcgggcacttctccttcgcttgccatggtcgtagccagtcggatctcttctcggtcgagtgtaatctcgcgggtctgggccatctcgcaacgttctttgtcacatgtgacggcttgcttgatgtcgcttcgtagtgatatgactcctcgaggaccaggcatcttcatcatcatgtaggtgtagtgtgggacggccatgagtttggctagggccggtcatccaagtatagcatggtacgctgtctcgaaatcagcgacttcgaaacaaacattttctatgcgaaaattctcccgagtgccgaaagtgaccggaagagtgatctggccgagtggtgtagctgataatcctgggataacaccgtggaaggatgcattactcggctttaattccgtgcgaggaatctgcatatcgtccagggtcttagcgaaaaggatgttgagtgcactgccaccatcgatgagagttcttcggagcttgacattgcgaaccactgggtctagtaccagggggtaccgccccgggtggaccactcggtcgggatgatccgagcggtcaaacttgattgctatttctgaccaccgaaggtattggggcatgttgggctgaatcacattgatctcccgttctgttagcttctgctttctcttagattcataagccagaggtccaccgaagatgtgattgagttctttgcgatgatcttgaaaaccagtcggggcatcgtcttcatcgtctttcttctttgatgtgccttgctctccgtttgaaggcttaagtgcattcttgacgtattgctccgcaaattgtttgtagacgaagcagtctttggccacgtggttggagttaggatgatgcggacattgggagttcattatcttgtcgaatgtgttgacgcggggacgttgtcgggaagatggagaggttgttgccacaagttcttcgggcttacacttgcgatccttgcggttgttacttccactccctcctgcggtcggcgtgtccttctttggcttccaagtggtgcctgactgcttggacgccgtaatagcatcttcggctttggcatactcgttggctttttcaaacatctgcttgaccgtcttgggaggtttgcgtccgaacttgccgactaggtcctcgtggcgaatgcctttagtaaaggcggcaatgatgacgtcgtcggtgatgtcggagatcttgttgcgttgctcggagaagcgccggatgtaatctcgaagggattctccagacttctgaacgacgttgtagagatcaaactgtgtgccggggcgttcaaaggtgccctggaagttggcgatgaagtgatcacgaagttctgcccatgatccgatcatgccacggggtagtccgtggagctaggatcgggcggaatccgctagagccacaggcagatagtttgccatggccttgctatctcctcctgctgcgtggattgcgagaccatagacggtgagccaagactcagggttggtggtgccgtcatatttctcgatttcagtcggcttaaagccggctggccaatccactcgacgcagatcgcttgtgaaggcagcaacgccgtccacatcatcgtcataacgatctggtgaatggtggcctcttgctgcgcggcgctggttgatggtgtcgcgaagatcgatggggcgccttcgatgtggggagtgtggtcgttcaactcgacgctccctatatcgttcgggaggcgaacgaacagaccgttcatcatgtcctctgctcctgcgactagatccggcgccggcaatgctgaggcttggctggtgatagtcttgagatcgaagatgagggacttggctactagtcggggtgcgggtgcttgcagagttggctggaaccgaggcagcgatcatggtcttcgtctggttcaagatgttgacaacatgatcagcttagttgagtgcgtcttccttgaggagggtgtcgaggagagtgattgctgcaaccgcgttctgctgggggatgcgaaagaccgctgttccgtcgacgtcttgttgcccaatgagctatctcgctcgccgcccggattccaaggcgcgttgccgtcgatcttcagcctcctttgcaatcctttcgtgatcttgttgctcacgctgtagtcgttctcgctcctgtcgctgtcgctcttcctccagtcggcgacgttcagcttcttgccgtgcgcgatcttggtccgcttctcgggctcggcgctgttcctccgtttcgttggcagccatgaatacgccgaagaagaggggcgtgtagttatcctcatagctgtcgtcgaagttgtcgaggtcgccgtggtcatagtggtagccgaagtcgtcgtagtcgaggatcttggttggtcaagaactgacgccgggggagctgaggtagccatccatctcttccgtcgagactgtcccaagaggttggagtataacgccaacctccctggatctagactagatcggggccgatgccggagctcgcctagatctccgagtgggagatgttttggctgtgaagacggcagccaagtcatcaggaagtttcatcaagattgaaggataggacccgtcgtcttgatctggtcgcggaggagtagattggatctcgtccgagtggtttgaagccgactcggaagatatgatcttggagtaggcctcggccgagttcggaataccaaacggcacggggacctggtctctccccgactggttcgaatccgagtcaaggagagagatcttgccgaagtcgttggtgatgaagttgaggctgccgaaccagaacgcctgcccgggagggaaggcgaagttgtcgatgccagaaacggaacccatcgcacttagtcggcaaaaacttgacgctgcccctacctggcgcgccaactgtcgaaacaagatttcggcaataataaaagggggtggctatcaagctaggaaagttgatggttttggagacaatgaattttatacaggttcaggccttcatattcatgaagtaataccctactcatgtccggggatgattccgccgagtacgttattgattgtataaattggaaaaaagaatcgcgccccgagagacacacggaccatccttatataggggaaggagtccgctttacaaaatacaactcttatcgtaacggaatatgggattatagataaaatacaattgtaaccgactaagatctcgggtatttccttgacatacaagtaaaaaactaacccgagtcttcataaagatattctatctatatttggtaccgtatatccgattaaattataactgtcatgtagatatggaatatccatattctccacagttaatttatcgatataattaaagctaggtagctatagggtgatctacataaaaaggcaagggggtggtggtggttgtgtttagttcgatgatttcgtcgtcgtcatcgtcgtctctactccctagacaaatctctagacaaagacgaagacgaagacgaagacaactagctctgcaagctagcacatctgcacatgcggcatgcaatacatctagctagcaatggaggattagttaattgattttagctgatcttgtgtgttcatcagtttagtattcactttacattacaattcttttaagggaaaacagcacgagattgtgcctttacattacatgattacactgatcttgcatatgatgggtaatgggttaatttgtaatgaagtaatccatagtccatactagatacttttacggcatacacgctgcaagttgggatatatatggactctgaggaagctgacagaagtagtagatgcagtaggtgaagatcagctggcttggtttagatttcttcaatcttgtttaacacttattttctccatcccaaaatataaaaaggactatgatattcgatgagacacattctgctactatgggtctgtttggggagcttttagcagctgtagcttctcctagaatctccagtacttaccacttgccagaagctcaccaaaacagtccagctttttatccaaattctaagaatttgtggttgtagaatctggaaaatgaactagaagacagaagctgggtttcccagcttctccagattctcactagctagtttctcagttgctgcttctcaaaattttaagctcccccaaacaagccttatgaatctggacaactctctattcatattcatggtattaggatatgttttattcaccaaaatcttctgccttatattttaggatggatggagatacttggtggaaatgcatgctttagttatttaaattttgatgcctcttctacacgtgcctccattgatcggcaggggtataccgctatatatgatatatctgtgggcttgattataacaactcaccttctcatgcatcgtacgtgctgtcgttacttctttttttttgtttttttaaaaagatcaagattttgtttggtttaaaattaagctgccgttgtaatgcttgccaaatagagattattatgtggtgtgtctattccagccaacaactcttgtctcgatcacagatcttcctgtaacagtaatattaagctaggtaaaaaattatctaaattttataaaaccccacttatcatgagccaatttacataaaaccatagattttagcatgtgacacataattatggtccaaaagttttctaaaaccacactattagtgttaactgttaaggataagacatacctcttatatttgggtttgtgctatatgaaagtaccacatacctaataatatacaggaatatatagtcaattaaggtaatacggtgatccgaaaggaaattgttttctagggatagaagatgtcaaagtcatattcagagaaaataaggtcttcttggaccatatctaattcaggttctctgatttctactttgagaaaaagatgatcatccctataaatacagggtcccaataaggggaggatattgaattacaagccataacaagagcaatatcgagatacaattcggaggaagccaaagccctagtcgttgattgtaatctactttttccctgatatacatataaatggaagtagggttattagtcatcttaaggccccgaaccaatataaacacttgtcccttgtctgctagctagatatgatctcaacgtttttcatactctacaaatatcgtaggtgggcaccatagtccatcaacacatggcgttaaccaaatcgacatactcctatatcaaaattcaaaattgtatgtttacatgtatgtaacacttatataaggaataaatagcttataattcaaaatgatcaatagtgtggttttgtaaaacttcatggccataataatcaaggttatgtgttacgtgtcaaaacccacgtggttctgtacaatttagaccataatagtacatggggttagttgaaatttactctaaattaatttgagtcttaattcatgggtaaggtaaagatcaaatataaaacgtacttcctccgtttcacaatgtaagtcattctagcattttttacattcgtattgatgttaatgaatctaaacatatatatatatctatttagattcattaacatcaatatgaatgtaggaaatgctaaaatgacttacattgtgaaacagagagagtaccgatgaaacggcccatatctcgatgggcctatttacggcctcttctgcaccgacgagcaagacagaccgtgcggaagagggccatgctagtgtcggtggctgtggcgctggcggccgccggagatgggggcatgaatacaagaaaaaaaaatccaagcaagcaaacactttaaaatttgtttgcatcttatgatgaactgttttcttgtgagattttcttttgtcgcttcacagtttcttggagacggtcacccgggccaggtggtttccaactgaattaagctcgatagatccatgtgatgtgccgcagtcactgcaaccagctgcaatagatgcttaaattcgtaagtgaactcacaataattcttttcttgagcgaacctttcaaactatatcatgttgccattggattttaattaagttgtaatgttaaggtactgcctccgtttcacagtataagagattttgattttttttaatcatcttttatatgtgcaagttaatttatgtccatcctgctaattttttccccggttagatgtgcaagttaatttatctttctcaagaaaacgagataaattagaacaaacttttgttaagccacttcatcaaagcctcgttgtagaaacgggtacaaaatgcatatgtaaacaattatgaaacctgaatgtgaacaaactgttttttttagaacgataatgccaaccatgccatattacagaagtttttgtgattgtctcgagtagtctgaaaacacaagtttttttttttctacagaggcaacaagtttgttaagggccttatacagcaatttcatggatgtttgttgccaaatgttaactatttcctctgcatactactacacgcaagtataattatattgcttgatttttatagaagaattatctccgtcccataataattgtatttctaccattcaaattttatcttaaaaaattgtatttctggtaagatgggacacaacaacaaatggaatgtgtacccccaaccttcattttaattaagtttacatatcgaatgtgttgctcaactttccttttaatcaagtatagacatatagaatatgcgcatgcagtgtagttattaaatatatatggttattgtgataaattgtgtttgatgttaatctatctctaatttctagaaatgtaattattatgggatggaggtaatactatgtgagaagtgtaacgtagtacattccacataaataatatcttcacaattgtcaatgtttccatttttttacagcatgttttttttgtgcttaatttctttaccattgcttcctgttcatttatactacattgttggcgctgaaaatcttaatgcatcacgcaattcattttttttttctaggatttggttcaaacatatattttttccctctaggagcatatttttgtgcacaactgatattgcaccgtgtggactttgggcattgattgactagctatgatgctgctggttaggaccttgctttcagtctttccttgtacgtataatgtgccaaattaacttaacgcatccttcagtttggagaactaaaaatagccaactagtttggggtattttagtgatagtaacatttttcatatatgtacctcaatactgtccacacatatacacaatttaaatgcaaaacattacaatctcttattctctttcggttgttcactcggtctacaaggacaggtcaatgaaatatccattgctcatgaggagacaatagatatccatgattccctcaatcactgcttcacacttgtcctatcccttgcctccataaataggtcatgagtatatcatccactcaacacaaattaacacaaattcaattctaagatcaaaatggcaagaggattggcggtgatgagtgtactcttatttgtgttggccactactactaaggctgacatggaaggcaggtctaggcccaacgccttaggcaacagtttagtgccgacacacctacacttctacttccatgacaaggtgaccagtccgtcaccgtcagcggtgagggtagtaaacccgccaaacaacacatcgttgaccttcttggggatggtggttgtcatggatgacccattgaccgaacggcccgatcccgcatcaaagctcgtgggccatgcccagggcatgtatgtctcgtctgaccaagcccggataggcttcttgcaggccatgaatatcgtgctcaccgctgggtcgtataatggaagcgtggtcatagtgcttggcagcaaccacatatccgacattatccatgagatgccgattttgggcggaaccggccactttcgcttcgctcgtggctatgcccaagcccgcacctactttctcgacccaaacggacttgatgccattgtcgagtacaacgtttatgtcttccattgatcttcatgctaggttggcttaattgttgatgctattattccctccgttccctcttacttgatataagatactattcatgtataaacttggaccactcatctttatgaaaaaaaaaggtataaatattctattatcaaagtaccagtcccgacattccatatggcttaacagtttaacatgcactgtgttgactagtgcaagccatatggaatgtcgggagtactaaatttctaccacatatgtgccccgtgtaataaggaagacttaattcatgcaaggtttgctttaattactaatcttcaaagtttgaagattggtctacgacaacgttgtccatttcgggccaacgcactgtgacaccgcccatctcgcgtcccacgagaccgtggcgctcttcgtcgactcgtcacgccatcgttatattcgtgcaaagatttagcgatatcaatggtatatttgtgccaaaaaaaattacatcctaatatatttccaaatttaatcatccttctagagcgtatagattaatttggaacaagaattgtacactatagaaaagggaccaaattaatgctagccccgcgacaccgccgcttgtcgtcgcgcgcactgcgataccgcggcgacgaactcaggtgggtttccatcaattaactactctaattgatatctgttctgaaaaaaaaattgatatcattagtaattaattcatttatattagttaccgatgacatcacgccgcacatatggcgtggctagcgccgaccagctcaacacctcttgtttggcgtcgagaacgacccgtgcggcctcgccatagacgcagagctcgggcaccgcccatgcgccttggctcctcgcctcccttcaccaccgtggagcgggtgattgagctccttggctcctcacttccgatgacatcgcaccacgcacatggtgtcaccggtgccaacaggctcaacacctcttgcttggcgtcgaggacccacacggcctcgccgtaggcgctaagctcggctgccacccatgcatgtacaatatcgtcccctgcctccaagaagaccaagaagagaagaggagggaggagagagagaaaaatagaaagaagaggaggatgcactgacatatgggtctcacactgaatcagccggtcaaactaagtcaatgagctacattagcaaaaaaaccgctctcaaaaccatcaagggggtcattttgcatcgattttaataattagaggagcgattgagagataagaattagattaaaactatatatatttgaggaagccaatgtgaacttatgccaaagtggaatatatttgattgggccgcatgcgtagcccaaaatgtgtggcatctgatgtgggttagccatgccggccccaagctgcagcaattgtagtagggagtacctatgcatctttcgaaagatttttataatcatatcacacagatttttaatccttggattaaaatccaatagacacagtaaaatgcaaaaaacaactaagaaacaccataatggacactatatttccatatcttcagaaaaaaaagaccaaatccaatataaatttcaaaacttatatgcgaagattcaaaaattacactgtaaattacaaaagttacagtgtaaatttcataaattacattgtaacttacaagaaaacacactgtaaatttgagtgagaaaatcgagtgagagataagaaaaaatctttcgagtgagagataagaaaaaatctttcgagtgagatatagcaaaatcgattgtagtaagcaagcgaagcaactgtggcatctcttcttatattcttagagcaaggctaatagtatagccaaatactagcttcaaattatctatagccaatttatacaattgttgcttactatactattaatacttagtctcacctgtcatacacacattatgtcttggagtccgcgctgcagctggctacaaatctgtagtccgctgctcttctttcttcgcttttatatctctttaaaatatgtttgtaactggcttatagcctgctattgtacatgttcttaagttagctcacagtaaattgtttccaaggaaacccattaaactacaatatttgatcttgatttcttaagttataattttatatattttttctaaataaggaacatgtgcaatatacttagaaaaagggatttataagattatttggcgaaacttattttctttatggtgctctctatcgatagtaaaacttcatccaaaccgttaatttattttctatatgaaaaggttagatacttttattatactaacacctccattaagtcgttaacggtagcagaaattatcaacggaaaaatcgttttaacaaataacggcatggaggggtaaaatcttttgtcgctctcgttcacaatcacaactcctggggcagctctccgccactcagcaaatcggaggggactcgactgctgtattctctctcttcagccatcggaaaaatatttttcccaacaatagtctatactaggaattttgaaatattggaagctataaggtatttatatgtggctgtgaaaaatgatttttctctaaatatattacaaagttatataaaccttccaaacgaattgaatttttttccaacaatttttttacagcataaatatttttcctacaattgttttatacaacttctgaaaattaaaagataaatcacattttcattggttctcttatagtaacttttagctacacaggggcatatattggtttttgtggacaatatgatggtcaactgacattgaccaccagaatggcaaaagaggatggggcactaatggagtagtggtaaaagagagaaatgcaaaattttgatggcgggacgaaaaatacggtttcaataagtggtagaagaaaaaaattcccaactttaatcgacatgcaagatcttgaggcaaagggactgactatgtaacattcacaagaaaatgcttcctcatttcagtcacttttggatgccctggattgctttaagattcgtactattacagttcttctactttatcatcttctctgtcgttctcctttacacaatgcttcaaatcgcgcctaatctcgacgataatgttgcctccctcgccgattgcgccttccccggccttgccctcatcagaaggcgccaatggtgccagtgaggccatgtcagccatcatgcaccccatctccccctctctccctctccttcccatcatgcggtggtaaggtgccccaccccattgttttccacacctcctaactggtcaggaacccacacccccgctaccaatgttggccaaccacctgctaacgatcccgtggctttagctccacccacatgttctgccacccacggccgtctcgctaagccctgtgaacttcccccgtcccccgtccccccccccccccgtccccttccaccccaacttcgaaccctaaacctaaatcggttgggctgtcgctaatttcttgagtaagaggagaagaccccggcatgaatcttgtggcgaatgggacagcagagaatctgcaaagattcctctaaaaaatctatcgaattaagtctaacaaatattttttaaaagggttaattggatccatgtgattacgagtttgccgtattaaatagggttaattgatatgcttaactatcgtgtaggagtatttcttagctcagcttcagctccaatatttgaaatattcacgagcatccagtattcactattcagatcgtatcgtgtgttttgtgaaatcggatgattggcgttcgttataccatatccccatcgattctccaaaagaaaacattaatagagcattcagaattctttaaaaaaacagagcattcacaagcaaaggatccccttaattaattctttcagatataaaaacaaccagcaacattcattgggtcatcagagtagaggagggtttggttttttttcaagttctagatttgaatgatagacgatgacagcgatgcgtctacgacgacttcatcaacctcaagatataccagtcaaatctctcagaggtccttcaagggatagagtgtgtatgtgcctttataaggctaagtgtgtgtatgtgagcgcctaatgtgtttttagaaaacaattatttgaagagggaattgatacaatttgtttcagtgtcttcgaaaattgatgccatccttcctctttcaccgaatcatcttttatatatttggttcccttccttcgtgtgcaacttaattatttgttttcctgtttagaggtgcaagttagttagtccatctttctcatgaaaacaagatgaattagaacaaattggttgagttgctgaaagatatccactccaagctggctgagctgcttcagaaatgctggcaaagagatcgattgagaggcattggagatccttcaagactcctcaaatgtgccatttcttttttcttttaacacaatatatatgtaggtgcttataacacgcacatactctcatttcaataaatgcacatgcacatattctatctctgtaagcacatttaaagactgggttagtatatcttaaaatcgataaagtcatatgacatatgtctcactgtcgatggtatgttttaatgcatgtgtatcttaatttgttattactccctctagtcatttttacttcatgttgggagagttaagcttagctttccccgcatcaaattaaagtgataggagggagtatctaattatggcaaatatcatcaagattgtcaagagcttcattttttttacagtatgatatttttgcgcttagctccttacctttgcttgctcttgagtatattatgctccagaaatcagaaatgtacattctgttctagcgtccgatgctggcgcttaaaagcttaattcatcacgcaattcgaaatttttttctaggacttcgtttactctctccgggttgataatattagtcgttttggacaagaataaagtcaaactttaaaatctttgactacaaataatttctaaaatatttatcttaaaaatataaaaaccatatgtgtagattagtcttaaaaagtacttcaataaaaccatatatttatattataatagaaaatagttgtcaaagttactttttagagaccgtgtccttgttcaaaacgacaagtattatcaaatcggagggagtaatttagttttctctaggagcacattgttgtgcacaagtgatattgcaccgtggactttgggcgtggttgggcccttgctttcagcaaactacaaggcatcgtccttcggtttggagaactaaaaattaattaaccaactagtttggagattcggggtactttactgaaagtaacacatatatttcttatatgtgcctcaatgttaaccacacttaatcatacacaatctaaatgcaaattaagtaagcattacaatcttttattctagtctttcggttcagtcgatctacaaggacatgtcaactaaaatgtacttccaattggtcatgagcaacaattaatagatagccataattcctccaatcgctgctcgccacgtgtccctcctccaactcatatatagagccctagagctcccatgcctctataaataggatgcgagtgttattcactcaacacaaactctaagatcaaaaaatggcaaaggaaatagtagtgatgagtgtgctcctttttgtgctggccgccactactaaggccgacacgcaaagcgggtatgggcatgggtgtagctccttatgcaatagttcagcgccgacacacatacacttctacttccatgacaagattaccggcccctcgccatccgctgtgcaggtggtcagcccaccgaacaaaacatcaccaacctctttcgggacggtgtatgtcatggatgacccattgaccgaggggcctgacccaaggtccaagcccgtgggtcgagcccagggcatgtacctctcatcagaccaagtccggataggcttcctacaggctatgaacatcgtgctcactgctgggccgtacaatggcagcgtgataaccgtgctcggcagcaaccacatatccgacagtatccgtgagatgccggttgtcggtggcaccagtgctttccgcttcgctcgtggctatgcccaagcccgcacctactttcttgactcaaatggacttgacgccatcgtggagtacaacgtctatgtcttccattgatcttgatgcacgcttaagtttgtcttagttaattactgatggtgtcaagagagaagctttatttaattctaccacatatcttgtgtaataagggagaattcatgcaaggttggatttaattgctattctccaaggtttgatgtgtatagtaggatatacatttggttccttttctatggactggtacaacttttgtttcaaattgaaccacatatatggtacagaagtactactagactagcttctatctcaatagttaggttataagtgggtcaactcgtgaatccacttataggctaaataagtagtaaccctggatttagtctataagtgagtttacaggttgaccctgttacaatcttaggtctcagtctttgacagatcgacagtatagggtgtctgatgtaatacccttgtgtttgtttctttttcatgttcaaatatatatgcaaagaaaaaccattaatgaaacaaaatctgagaaaaaatagatattatgaggaatttataagtggccatagccactagcaacttgccaatagataaagactctgaattaatgcttgcggtcaaatctccaaattttaattcacggtaaataaaataattccttcttgtaattgcttaaatatttcttttatagtatatgattttcttaatagtactgggacaattgctagctttatcttgtgcatcaatcttgtgttctaactaatacatgcatgtatgatgtatgcaagttcttttatactctctgagactctctgtggctcagcgtgcatttaactttgggtgtggttaacagctcattagcaacttgcttagaggctttccatgtccatgtaatatttgacgaggaaaacaaatactccctgttttcaatgtttgacgtcgcttattttttaacttacttttgactacctaatcgtcttatttaaaaaattttgtacaaatataaaaatataaaagtataagtcatacctaaagtacaataacaataaaataaaccgtaacaaaataagattaattatatttttttaataggtcgagtctccaaatatatgtataaaagtcaatagtgttaactattaaaagccagacggcatactattactcctatacttaagtaaccaaaccaagtgtatcggagtattttacctatagtcaacactgtatggatcgatgtgcctcaatactgtccacatgtatatacaatctaattgtaggtttatatttaaatatcactcgatcgatctacaatagttacaagtcaactagaaaacttccatctatcatcgtccaaccctctagctcttagagctccccatgcctctataaatagctcatggtcgagttatatcactcagcacaaccactctaagatcaaaaatggcaaagagattagcactaatgcttatgatcttccttgtgctgggagccagttgtaagggccacacacatggtgggcctgggcctagcccctcaggccatggctccgagccgacacacctacacttctacttctacgagaaggtcagctgcccttccccatcggcggtcacgatggtgaacccgccggacaacacgtcaaataccttgttcgggatggttgtggtcctcgacgacctactaactgtggggcccaattcgagatccaagcccgtgggccgagcccagggcatgtacgtctcgtcagaccaaacctggatcgggctcctgatggcaacgaacatcatgctcaccacctgtcacaccccgaagttctcctcccaagccaaaaatttaatttataagcgaccctaagaaaataccagtgcaaagtaagagtaaacccttttaaatcaatgcaaataataatcggaattggcatgtggaatttttcttgagttctacatgtcgaaattcactaacaggatttttagtggaattttcagagccctagaaataattttaaccaattaaaattgagcaagcaatattttaattccaggaaatccttttctcctttttctttttatttttccctccctttttcgaatgggccactggcccattctctccttttctctccctcctccctgctgggccggccgcaggccgaggcccagccaagccgcccctccctctctccccgggacgccgataggtgggccccacctgtcggacccgtcaccttcctccagccggcgctgccgcgcccgcaaccgccgccgcgcccacgcctccgccttctccgggccacgtcagccacgtccgcgcgtgcgctgcatctcccgcgcccactcccctctctctcccgcccgcgcccgcgcccgagatggccgggattcgattttcgaatcccgcctctctcttctcccccactccccacgttggccggcgaaatccctcccctaccggccacgtccggggctcccctcccctatttaggcttccccgtcgccccctctcgctttttccccatttcgccgaactctcccgagctccccatcgctcccgcgccgtgcaaccacccaccgccgccgtttccactactccggccgccgctagccgccgctagggtcgccgccgcaccgcgccgtcgccgccgtcgggttcgcgaggctaagctccaccccggccgccccttccccgtcgagtttcgtcgccggaattcgcatcccctcgcgctccggtgagttcaaccgctaccgccgctttcggccatgaataccggtcgccgtggttcatctccctctctctaatctctctctcttccttccttagggcaccccgaagcctgtccgccggttgccgtcgccggtaacgcgttcgcgtgtgcgcgtgccatcgccgtcgccgcggccggtcggtcggccttgagccaagccgagccgggtcgccgccgccccttcctccccccctgagccgctgaccggtgggccccgtgtgccggcgccccttcctccctctcccgagccgctgaccggtgggccccgcatgtcggcgccgccccccccccccctccgtgccgacgacagccctgggatttattgcacaataaatgatttaaggtttttcttttatagtaataaacacagtgaatcttctaaaactcataactaattcatccgagttccgtttaagcccattcaagtctcagtaaatcatgaaaaatgtgtagaatccattaaaaatggttttgttccctgtttcagtagtcttatagcctgtttgcaatgtttgctttgtatgtcgctagattccggttcctccgacgctccggtgtatttcgaaatagtcgccgaggttcctccagcagcagagcaaggcaagtcatgcttgtcacttgaacatgttgatcctatattgcaaatgctctattgttttctttcaaatattgcattgttttataatgtttctatggggtgtttacctgttgtcatagccatgctattgttgtaccatgtttctttgtcagcttggggttataacatgactagagattggactagggattgcttagccatgcttagttcaactagtgcacaatggggagaatccttttaatgtttagactgttggttctaatggtcttgttggattagtgccaccgctttggtgttggttaattaaaataaatcacatggtgggctgtggatgaatggttttgctggtcgcacccatggcagttaaggaccggttcgcgggatgccctggaagaacttatcgtacttaccacaagccagcgtgggcaacggctgggcttgtagtgtagctttcctctagtcaacgcatctaggcaagggtgggcgtgatggagcggggcaggccctgcgacggcctctgtcgcttccggattcacctaggcacgagaggggactgcccactgccttgcgcggagtgggggtgaaacctgaggtgtggtgtgcttggttagagggggttatgcgaagggtcctgtcacggcctctttccggtatgtcgtggtgacatgtcggcgcactgtaacgtgtcgtggggctgtgtcttgtgggtacagttgtacacctctgatcagagtaaaactattcgaatagccgtgcccacggttatgggcggtcaaccagattcaccgtgattagtctcaccctagtgtaatcttttgattttggatagtttaggtggatggttgggcctgttgcaacgtgggatagcgttggacagtggatagttaatgttaattaattattacaactgtttaaatctttcaacttctgtttttaaatactcgctttatgcaaagaaccactttagctcttctttgataattccctgcatcatgcctctattccggtatgacttgctgagtacagtgggtagtactcagtcttgctctattttccccaaccccagagtacgagtatgtgtcagatgaaggtttctccgaggagtaggctttgtccgtgccgtcgaggatgcctgtggagtggtgttcccgctgcagatctagtcaaggcttagctcctgttgtctttcgtttttccgctgcatttatgtaagacttttaagatgtttgtaagacgtggatctgaatgtcaacattgtcgtttgtgtaccccggccggtcctggacggggattttaatgcacattctgcttggaattctattcgggaatttctgggcctaacaccaccgggccgtacaacggcagcgtgattaccgtgctcggcagcaaccacatagtggacgatgtccgtgagatgccgatcgtcgaaggcaccggcgcctttcgctttgctcgaggatatgtgcaggcacacacctatgtaggatcaaatcacaagaactaagccaacaagagagggggtgaatggttggtataccctaaaaccgaaaacttttagcagaaataaaagttaccctcgaaatcgacggaagtcggtctgaccgaagatgttctgccggtctgaccgagttgaatctccggtctgaccaccgagatcgcttgctgcgcctgtcaccgccgccggtctgaccgccgtgctcccgccggtctgaccgccgcaatgccaccggtctgaccgccggtgacttaccggttaaaccgccgaaacccggtgaaacacaaatcgaagaactcttaaagtagatgactttattgattatctctatgtttacaaagtgcaccaacagcactccttacaaaaattttgactaaacgcgaaatcctaactcaaaactcaactcaattgctctcaaaagcgataccgggaagcctcacgctccccctctatttatacatgaggtaggtagcctaaaaccacgaacaaaactcatactaagagtcctaaacacattaggaaaccctatagtataagaaagaaactttacataaccaatcgtatcaaatttggactccttccaaattcgactctgcatcccatacgcacacaatacctccatcgtatgccatatggaatccctatcaaccacgtgcatcaactctagcctaagtatcccgcatgatctctgaccaccacggacgttgtcttatccccaagtcgactcccggtccatcaccgcaaatactctctcgagacatcgagtcacctacacatgaaataaacaaagaaaccatattccaagaccaagctatctctaacttgactcattagtagcaaacaacagtattacatacgtatagtatccatctagaagtcataaccatgaaataatcacggatatccaaataaacaacctgaaactgaaaccgacacagcgtcggccggtcagaccgcgggccggccggtccgaccgctcgatcaccgccggtctgaccggcacacactgcccggtctgaccggtaagatgaaataacataagtatcctgtagattcacctgtgaaatccaatcatctccaaaaccacttcgtgaataaattccaaataacaaaaccaataatctccaatgcccaattgttcatcacagaataataatcaaaaacacctttgatcttacaatctcccccttgatgaacatattggcaaactcataaaaaatgttttggtgtttggaaaaataaaaaacaaaagtggtaaaaagcacacttcgtacaaatgtacacatcgtgcttgaaaatccaaaagaaaacttctccccctttttaaaagaaagaaattcccaattgaaccaaaaacatgctcttctcaacaactcttcaaaaattttccttgcttctccaaaaatccaaaaatccaaaaaaaaatttcacattacttcttccccttatgacaatgatttcatcaagcataggaattatgttcattaatgtataagagcttagcatacatatagcatatcaagtcatgtgttgcaattaaaagaagatgaacccatctataatagaacaagcatgcattaaagtataaccatgaaccaaagattttacaattaagcttaaatcaacaatcaaaattcatgatttcatacaatttataatgcaacatcttaacaagcacataggttgaaaaataaacactaaacacatatacctattgcatttatcactctttctcaaataacctttagcacaaaataaccaagagaatttttgaattttttcttttcttgagcctttttgctcatatttttctcttttattccaggtacatccctgtcgtcaagactgtttccagggattcagcacccattattttgctcacatcgaatacgtccttgtcgtcaagactgtttccaaggattcggtattcatttttttcatatttttattctcttttcacaatgagcaattaaagctatttgaggaataacaattcaataaagcatatatatatatatatatatatatatatatatatatagcatttacaaatcaaaccatatgctagcatcaacattgcatatttgcttaattcaagtatagaatttaagtgtcatgcatcatctcctttaaaagcgaaatctaaatctcatgaaaagactagaatacatacaagctatgctatagacaaataaacctttaaattattgctagcatgcacaagaaaataccatatgcataaacaaagctctcttttatcaatttttctcattgtcatattattgcttgataaaaccacgaggtacaaactccccctcaaaccatgccaaaaggatgaattatgcccaattcaccacgaagaaaagcaaagcgattagaatccaaaggtttagtaaaaatatcagcaagttgtaactttgtgtccaaaaactgcaattcaacatctcccttctcaacatgatccctcaaaaagtgaaaacgaatatcaatatgctttgtgcgtgagtattgaacaggattcttagcaatattgatagcactagtattatcaaaaaagagaggtactttctcaaaagtaagaccataatctttcaaagtagataaaagtcaaagaatctgtgaacaacaactagcagcagcaacatattcagattcagcacttgattgagcaacactagattgtttcctagaagaccatgcaatcaatgatgtaccaagaaaatgacatgttccactagtacttttcctatcaattctacaaccaccaaaatcagcatctgaatatccacttaagcatatataagatgaagtagaataccaaatttcaaactcaagtgtatgattcaaatacctcattattcgcttgaccgcttgacgatgtgaagcacgaggagaagcttgaaagcgtgcacacaaacacacagcaaattgtatgtctggcctagaagcagttagatacaacaaagatccaatcatacttctatactctttttgatcaacagcttcaccatcttcatcaggacccaacacagctgtagaaccaattggtgttgaaattggtttgcaattctccatcttgaaccgtctcaaaagatccttcgtatacttcgtttgatgcacaaaagtacct

SEQ ID NO: 6949 - DNA, 8992 bp, Oryza sativa
ccgtcgccgcgcggctccgccccacgctctacttcctccgcgcgctcggcgtgccggacctgccgcgccgcgccgacctgctctccttctccgtcgaggacaagctcctcccgcggatcgagttcctcgagtcgctcggcctcccctcccgcgccgcgcgctccatggcgcgccgcttcccggcgctcttctactacggcatcgacggcaacatgcggcccaaggcggagtacctcctcggcgacatggcccgggacgccgacgacctcttcgagttcccggagtacttctcctacgcgctcgccacgcgcatcgcgccgcgccacgaggcctgcgccgcgcggggcgtcaggatgccgctgccggccatgctccggccgggcgacgacaagttcagggccaccctcgccggctgcgtcggctccacgccgccgcggaggcggtcgccgctatggcacgcctactgggtggacgacgccggcgaggtggaggagatcggggcggcgtcgcagccgtgacacgcgacgcgacgcgagcgcggcatgtgcattatttagtagtaagtagcgggcgttcgttgcctgtgtaagctgtgcataacccacattgtcatcatctcagtaagtaacataaatcatccggttgatttctcctgttaatcaatcatcaatggaagttcttatagttcacactgatataccttcagctaatggcaatgggtccccattacactctttaaggagctccctctatttacttttgatagtcatattttatattggcacacagactaaggataagtaattctacttatcatccatttaaacatgctactagtcattcctcgtaaacaagcaattcattaatatttacatttctcaatacccatgtagccaatcatgtgtggaagaatggagagtcacgcattaaatccgagaaagtcattaagatgatttcagatttgaaaatatgactatcaaaaataaatttttcagatttaaaaatatgactatcaaaaatagatgaagggagtagtatactagatagatttcttagatcaaaatggaacaagttagtcgcagttctgaacaacctacatatatagctctcaatctctcatcaatttgagtcattccaatttttataggctcaatacttcaaatccgttttggtagtcatttcagttacactggcagctcaaaattttcgcttttgcatcagtcagacttgtttgatccaactccagactccagtgcaatgtttatttcaccttgagaagtcgtgtatcttcttcagaacttccctatgaatgctggatccttcagctcgtcctacctcaagcctgccttgatttaataatttctttctttcttataaactcagaacgtgtgaagccacaagaagagccgtttatctctctcatactgcatcttttactgtttacttaatctttttaaaaagtaaagtgtactttggactaccttttgttacctcaattttacatcgaaccatcatttacttaatctttttttactgtggatttttttttcatttagaccatcaaaactctttttgtgagcacatcggtaccctatgtcggcacatcggcattttggactaggttagatatgggtacacagacgcattagggtggtccgacgacgattttgataatttggtccttttaccaaacttattttacaactagatcttgataaaaactaaaacaaaaatattcctttacctcagcatcataacccttggcgttgagactcaatatctcagcaccaaatccatttagtgatgacacctctaacgtaaaacttaaaatggtactacacgcaactagataagcaagtgaatgtggtgcattggtaagtggtcttgttttgtcattaagatcatagtttgaatcgccactgtcgcatgattattatttttttttgacaagaggctgggagctattccgaagtgataaaaccaaactgagaaagtcatggcagtgaaaccgaagaggtggcgccaagatgttgggtgtcagtacccaggtccataaaactaaggtagaggttcgattttggttatagttttatcaagatctatttataaaaataagttttatcaaaacgtcaaagtgtcaaacttttcgatggtccgaagtataacaaagataaacatataccagtcaaaagtaaaagaatgagataaatctagtctaaaagaaaactaacgttaaaaaatctcgaattataattcattttttatttatagtattaaagaatgttgcagtttatggcgactaaattaagatcagacagtccactcataaaaaaagagtcatgttcatcttgagccgtaaacttgaccaagttcattgcacctttgtgtagcagaaacggaaattaagatcagacagttcactcataacaaaaggagtcatgttcgtcttgagccggaaactcgtccaagttcaatgtacctttgtggagcagtggagcagaaacgggaatatcatacggagtacaaaacagtgaatatagatgaagatttgtttagcaggtgaaaatatgtcccagtctctaatgtatacacggtaagacgatggagccaaaatgtcacggtatcttgttgcgacacaggaatttgcgtaatggatcgaacaacccagataatgcactttctttttttcccccttagaaacacgctacaaacgctgagctcacaacaatgcatgctcactccatgaatacgcacaagcactctacccctgtaaacacttttaaaagattagactattacatcttaatattaatattaacgaagtcatcacatatttctagctatttaatggatgtaacatctacttctcaaagcatagtaattagtcgtaaatgccaacactgtaggtcaagtctaaaacttaaatctagataggctggttctactctaaaaaatcttagggcacgctcattttgatgtcattttaaatcatatcattattcggtaaaattaacaaatacgtataagtttattattagatactggtaatacttaggaagttttggtaacatcacatttagcctatcctaccaaaatttagcaatattattaaactaaaattttggtattactaaattttgaaaagagttcattttgatactaattgtaacaacataaacgatttttgtgtacgagaccttacaatttttataaacgggcaacaatttgccgcatttagaaaaattaagtagtattttcacatacggctacttaagacgctcatatgaaaaaaatcgatttttccatacgggctcttaactggtccgcatacaaaaataagctgtactattcgataatatttgattcctatttcatatccggatttctgattccaaaaaaaaaatataaaaaatatgatagagctagattccacccgtgattcgttttcatcctagcaaacctcgcaaaaccgtcattcgcgaaacgtcatgttgttgtgtacttattatccgtttggagggcagggccggagggcccgttggcacatactggtcctgtgggcttttaagcggcgtcgccggtggccacgcacgcacccaactctcacctactctgcttctgctgccctcctgcatcgactcactcctccactcccgtgtcgtcgtcgtcgtcgtcgtctgcttcgtcggccgccgcgcgccgcccgcgatggcgtcgtcgggggacagcagcggcaagcagcggagcgacgaggagtggcgcgccgtcctctccccggagcagttccgcatcctccgcctcaagggcaccgagtcagtatccatctcctccccttcttccccctcctcccgtcgcagctgccagccacggcaatcttctctagttattagtcgccatgttcgcccatccatcatccatgtgttatccatggggaaagattcgattccccatcgaggaaaaatcgccgcgcttattagccgcacccgcagttttgtgaatcgatgatccgtgcgatgctgtcgttcccttcctgcctgcctcatctcctcaatgggctcgtgatggatggattgctgccgtggggatttgtcgattgagattggattggatggagctagatgttcatcaaatgttctcgatttgttgtgttattgggtgtttttttttcttttttgccacaccacgagtgattctggccctctaaagtgccattgactttgttggtctacttaactatgcttcatgccaatgcttattggagcctcctataaactactgcaagttggcctctcctcatataattagtatataagccaacatgtccaagttgacttacgatagataccaaggaatctggagggcataggggatgtacggtcagtggctgagtgccacttgttaaatctatattttagttataagtctgttcatgcctgatgggattcacaaaccaatataacagagccattttctgaaaccatgatataatgagagtgtgtgcagaaagaatgacagagctgatttgagtgttagacttcccaaaattacagattcatggaattagtttcattgcaagttctacaaaattctaaattggattctggaaggtgactagagcgctatcctaatctaacaaagggatgtatttgtttgtatcactattgttttccactatggggatgcaatctaggctctttatatgtccactcctttatacaggcactggttcctggtggaaaatatacaggcgctggaaacgggttagtacatgtttataaatgatttcaagtgtgtgacacttggaaatggaatggttgccctctcatagagtttagttgaataggaaattaaaagttagtgctaccttcaacattccttcatgtgtacataattagacatccatgtgtagtgttaattgaacagttgttatggaccaaaacctgtttgacatggcattacgagctttagacattcaaggtgcaaaactgcatatttttggaagcttatgctgctccatagcctgtgtctcgtagaagaacagaacattgaattatgtggaactatggatttactggtgcaagtccattctcaattactaggttgattgaactctgaatgtgttatggttatagggaccagggcagcagcatcccagcccttagttatttaaattagaagtatggttaaattggaaagggttagtttgggccttaagccattaggaactggaataagtaagagttccaattgttagggccacttgcacaaatataagttaactagaaaagtacccgtgcgttgcaacgggaagaaaagacaagaaaattgagagaaatagagtgtggttggcagatggcctagtgagatgggttgggattccaatttctagcaatggatagaaaagatatatacctttctttatgataaaacttaggttgtcgattttattttaaattctctctgatggttgcaaattagtcctaaaatcttgtagtcgcagttgcatggcatttaattttctcccgcttgtcatcttttgtcttcattgattttactgcttttgtgtgagctaagatctttttttctattgagccaatatatttttcatcctcatctgtaagagagaaattctcggtgtcatctaactccggcatatcaaacttgaactataatcaaattaaccatctctatgcccattgcccatataaaatttgatttcattgttcaaatcatctgtctcctaacccatgcattgatgcacacgttaccatatgccatggaaaagtaatcggtcaacccagtaaacaatatctagtcaaatcttgaacagtaacgggcctaaatcaaactagcccaaaatttcccttttcttttcgttctatttttttcttctggccagatggctcctcgccacctcaaatgaatacgtagtatttttattatgctgaaattgctaggccgttaggctgaatcggattgctcgatccagcaatctcacgacataggaaaaccgatgtgcactgtgacaatgtaaaaaagaaaacagaaacgattcgttagcgcgcaagtcacgctaaactgacacagacgggccgaacatgcggacgatgtacacaggactcggaaacaatgaatgaggattaggacactgcctcggaggatcggactaattgacggacgaaccaaaaaattgtttgaagcagattttagaatatctcaagttctccctcgccttgttgtccctgacttcctgcacgcgacgtccttgttgccacggttctcttccactggctgccgggaacaacacctccattgaaacaatcactactagcccataacaaaatgaacggtcaattgctaggtggattgagctctgattgaatggtcaggctgtttagattttcctcaattatcgtcacttgagaggtaagctgtttactgacggatatatgttggaacactgcatatggcatgttgtcgggtaaaatagcgtagttattaagaccatgaccgctttgtttgttacttgatgtgaaatgatttctagaaatgttgctactatgctgaagcagatgtcctttcaaagatattactaaactctagtttccatccaggttacctggaacaggtgagtacaacaagttctatggtgatggggtctacaactgtgctggctgtggaacacccctgtacaaatccacaaccaagtttgattctggttgtggctggccagcattttttgagggacttcctggagccataaaccgaacagtacgcttgcataaccatttactaaatccttaaaaagttctttttttctcgtaaggaatactgaattttgtattgcgtttttgtagccggatcctgatggaaggagggtagaaatcacgtgtgcagcttgcggtgggcatttgggtcacgtgttcaaaggagaaggcttcaagacgcctactgatgagcgtcactgtgtgaacagtgtttcgatcaagttcaccccggcctcctaaatcctttcccaggtcattattattggaggtgaattccccagggctaaagctgtggaaagcactacaaaataatgaataaaatcacagagacatatcctgtttgtccatatatgaattcatctcctgttaatttagctgtaaacttgtaacttaacattgctgggaatggtaaatgaatgaataaatgaatctggttcattagttactgctctgtatttcacgttgctttgttcaattattatattatattcaaaccatatggttaactggttaagtacaaatgtgggtgtggccaacaatttcttcaggtaataataacttaacttagcaaagtactccatgctcattcaaatcatccttcgtactatatcctagtggggttgtttctcagatgtattgcacttgcagcacaatatcagtttgtctttggttcgccaaaatgtactattctgaaacaacttgaagtacaattgattatattttggccaaacaggtagtggcagaaactagcttccaggcataccaagattttctgcttaattattgctcagataaactgtgtactccacccggatttagtatccgtacagtagaggatgcggtgctgatggcgacggccaacgtgtgcatatggtcccagtgttcgtaatcgatcggagaggagcagttagatgagcatgcatcatcaacttttcacttcgtcagtgagggaagggccctcatgtttaggaaattgaccaggattattcagctaaatgaacagtcctgacaatatctcccttcaattacttccagattgcagctttgcaagcgcttggccttcaaaagaaattttgaactttgtttccttttcaccccgattacatgaacagcaggcactgcgccatcatattcaccacaaaagcccacgatcttagcttcattaacccaagagaaacttcaaactttctattgctacacgtataagaaagggatctcctatggaacatttggcaaaaaatccctttgatctcaactattttttgattgtatgattgcatcaatagtatattatccttccggagaagacaaggagcttccggagacagaggaagagtccgagtacgattcttgacacggctctgataatccaaaattcgatagaaaacccatcaaattcctgtcaatgattgcatcgcaaaaccaattataaaagttaccaaatgaagacattacttgctgtatcaattataacaataatcctgctttaagtaactatccgtgctgaagcatatccgtgtttctgggatgcaggaaaatcctgccaaaaatgcgactctgtgacagctttgattgcctgataccgaccgtgtaccgtggctgtgtgagtgttacacaaaccactggaaccagtacgtattttaaccaatcaaacggctaaaaattgcacttatatatgcacatgtacacactacggataccaaacgactctttaattacgtcattacgctactacgacgaggaccatctaaaccgacgcacaaagtactcactcatccctctaccacgtatagagagcgagagctacgtcgtcgaacactctaggcgcgtgtaacgcgtgttcaccgcggcggcgtcgccgtcgtcgacgtccatggcgtccacggtgaggcgcgcgttccggtgcctcctcgacggcctccgctccctgccgccgcgccgcccccgcgcgggcgccggcggcggggccgcgcggaggtcatccaaggcggcgccccgcgtcgtcgtcatccgccggttcagcggcaagctggatcgccgtcgggccagcgcgtcgggagggccgccgaccccgcctgcggcggcggcggcggcgcccgtcaccatccgcgtggcgacgttcaacgccgccatgttctccatggcgcccgccgtgccgtcgccgccggatcacgacgactacgacggcgacggcgaagggtgctccacgtggcgcgccccggcct

SEQ ID NO: 6950 - DNA, 14430 bp, Oryza sativa
cgcgcgcctcgtgacgaggccggcggcggcgaccagcgggagcggcaggtggaggtcggtgttcggggcggtgtgggagcaccagaaccattaccagcagcgacggcagaagcagaagcagaagcaggagcgggagcaggcgacggcgaggcaccggagcagcagcggcgcggcgcggcggcggagcgtggcggaggcgctgcgggaggcgggcgcggacatggtggcgctgcagaacgtgcgcgcggaggaagggcgcgggatgcggccgctgtcggagctcgccgaggggctcgggatgcggtacgtgttcgccgagagctgggcgccggagtacggcaacgccgtgctctcccgctggcccatcaagcgctggaacgcgcgccgcctcgccgaccacttcgacttccggtacgtacgtcacacccgcgacacacgtcagatcgtcatcaccacgcacgccatggccgccaccatgcgtgcctacatttgctgccttactagcttcgaatcacgcatatctttttcacgaacacgtaaaaggattgcacggcggtatattagaagaaagcaataccgaatcatgcatatcatttgcattgcagtaattacatcgtctcatatcttaattacattacattacacgtgcgcacttacatacatgccatccaaagttccaaacaattatgaaattttgacatttgggaaaaaaattaatgactatagattatgctgttattaaggctagtaaaatcaaatcaaatccagctgagcatagttttacactatttacgaccaaattagcgtttctccctcctccatatgtggttcaagtttagttttgcatctgtgttagatgacaaattgccccttgactatcaataacgaagctttatactatttgatgatatgcacgaaacgaggacacgttgctatcaaagtctatcccttcagtaagtagaaaaccaccaatataatactatttgtatttctgcatacataggagagcaagtcaaaacttttgacagaaacaacaaaaagtagctgatttttcttactttctccatattcttaagttaagtggcaattatcatatacgacaatgggacgatgacaatttagatgagaagggcatacgtatgtatgcactttggcaagtacaatcacaaaagattagtcatggagtaagtgtagctgaaatgttgccttttttcccccacttaatataacagtagttgatgaaatgcttagcagttcagctgctgagatgcttacccaatggactcagcctgatctaagctagtaactgagctaaaaggagaattaggttagctgcttcataagcatcgagaggccaacatctagcaatcagcaaaggttgctgcagtgtcgatcgatgggtcacaattattatccgcgacaggattagtagcgtgacattatcaaattattaatgctttggttcttcattaaactagctgccacagtaggccacacgggcacctcgatcgcacttaataggtcccgccggtgtacccaacgtgagtatacatacgcacattctagctcggagacaacaaacaacaaaaaatgcgttcatttgaatcaaacatgcattataggggctcatttaagactctaatcgaattaataatggttattttattcagcaggtgagaagcgtgactcatccatccactgcacaaattaagacaaaatgtccccaaaatcctaaattaattccaagctagtagcattcagaacataaatagttggagagagtagcagcgtatgtgtatgattaggcctgaatttggtatggttaaaatcctagataagttaatgatcaagaacaaggaacacagtaagtaagagagtaacaaacatattaataaggcattaatggtgcaggaacgtgatgagagccaccattgaggtgccgggagccggggaggtgaacctgtactgcacccatctggaccacctcgacgagggcctcaggatgaagcaggtcgactccatcctccgcttcgccgacggccaccaccacatcctcgccggcggcctcaacgccctcgacgcctccgactactccgccgaccgctgggccgccatcgccaaggtacataccacacaccaatcaatctattaagttgcatgcaccagccagttgcaactaaaagcctaagctgatagggaaagatggacaattcactttatacattccaacacaatcaatcaatcgattttgtccaagaaaccatcctgatccatcctgatcatgggcaatttccggccggcggcggcgtgcgtgcagtaccacgaggagatcggcaagccgccgccgaagtcggaggtgatgaggcacctcaaggcgaagcgctacgtcgacgccaaggacttcgccggagggcgtgacgccggcctggtggtggttcccaatggccaaggttagattactgacaaatcttatcgcttgcagaattattccggcgatctgaagctgctgctaattaacatcgctgagatcttcttcttcttcttcttccatggtggtacggtgcagatgtgcaggggacgtgcaagtacggcacgagggtggactacatcctggcgtcgcccaactcgccgtacaacttcgtgccggggtcgtacgccgtcgtcccgtccatgggcacctcggatcaccacatcgtcatggtggacgtcgccgtcgccgcccacgatggcggcggcggcggcggcgcggcgaggcggcggcggaggcggagggtggtgaaggtgacgaacaagagttcggcgagagggatattcgccgattagactagatggattattattgggcttctggtttcttcttccttttgagtgaactgtatatgtgtctcagtttacggcccaaacacttttttttggtggggatacggcccaaataattatctggccgaataagcccattagtaatatgaaccgaatggtagcgagcgatccaatcttggggtttgggttccaggaaggcccgtcaacattttcgtacgcacacagaacattgtcgtatggaattattcatccgatgccccttaacttgtcaacgaatctgattttcgtccttcaaccagaaaaccagatacaacgggtccctcaagtgttaaaaccggtgtaatatataggtcccatggcggttttagtagacgtggcgctgatgtggctaatttcactcggtcttcatctgacgtggcattgacgtggtatatatgaaataaaatttaaaaataaaacaaaatatatggtcccacacgtcagtcaaaataataaaattaaaaatagtgagacccacatatcagtgtccccattcatccacctcatcctttttctctgtctgctctcctcctcctccctctcttctctatcacctcatcatcttcttgttagatatcatgtgtatatctggatgtgtccggctggttgatcctatcctttagctgttgagatagcgttgtaatccaggttagttggagatatatcagccggactattctcgtcttgtaaaccacgatgcaggttgtttgcatcatatattaatacatgcgacgcacccaagaggaggtgacgatcgcttcctgtcctctgactttcttcttggtatcagagccttctcctctttcaatccaatctactcatggcgagctcgtcccaatctccggccgttggctctcttggagggatcacggtcacggagaaactaggcaaggggaactacctgatctggaaggttcaggtccttgcggtgattcgaggagcacggcttgacggctacctcaccggcgccataagagcgccatcgccgaccaccatcatcaagaagagtgacaaagatgttgaggtccccaatccagcgttcgacgaatggatcgcgaacgaccagcaggtactaggatatctgctaaccactatgagtagagatgttctctccaaggtggcgacgtgcggatctgctgccgcgctttggagcgtggtcgaagggatgttctcctcagcgacaagggcacgctccatcaacaccaagattacactgacgaacacaaagaagggcgacctcagcgttgccgaatacgtcggcaagatacgggcgctagctgatgagctagcgacctccgacaagctcgtcgacgaagaagacctaatctcgtttatcattgtgggattggatgaagattttgaacccatcatttcctctttggtgtcaaaatctgaacatgtgagcctaggggaggcttactcccagttgctcagctttgagcagcgcatgaaactccgtcaggagcactcggcgaaccttgctcacagagggcggggtcgtggacaacaacaacaaggcagaggttgcggcaatcaaggtaatcagcagcagcaacaatgcggtcgcggcggaaaaaattgcgggagagggcgcggcaacacctcctaccagcgacaaggtggaaacaacaccgacaaccgtcccaagtgccaactgtgctacaaaagggggcacactgtgattgattgctggtacaggtatgatgaagactttgtacctgacgaaaaatatgcaggaacagctgcgtcctatggtgtggactccaattggtatgtggacacgggtgctacagaccatattactggagaacttgagaagctaaccattcgggacaagtacaagggccaagatcaggtgcaagctgcgaatggtgcaggtatggtaatcactcacataggtcgttcaattgttaacaccccatctcggcctctgtacttgaataacatcttatatgttccaaatgccaacaaaaatttgatttcagcatatcggcttatggttgataactcagcttttcttgaattgtatcctaaacatttttctctcaaagatcaggccatgaaggagatacttcttagaggacgctgtcgtggccggctgttcccgcttccatcttcatccccttcagctcatcaagacaaggaagccctagctgccactacaccgtccctcgagcggtggcattgccgccttggtcatccttcctatgctatcgcagaaaaagtagttcgtaatcatgatctaccagtgtcagctgagtccaataaaatgttggtgtgtgatgcttgtcaaaaagggaaaagtcatcagttgccatttcccaagtcttctagtgtctttagttttcccttagaattgatttattcagatgtttggggtcccgctcctgttgccgggggtggaaagaaatattatgtcagttttattgatgctttcagtcgctttacatggatttattttcttaagcacaagtctgaagtttttcaaaagttttatgagttctaaagtcttgttgaacgtatgttcgataggaaaattatagctatgcaaaccgactggagaggcgagtatcaaaagttgaatacttttttcagcaaaataggcattacacatcatgtgtcctgtccacacacacatcaacagaatggctcagctgaatgaaaacatcgacacattgttgaagttggtctctctcttttagcacatgcttccttgcctttaaaattttgggatgaggcatatcaatctgctgtatatttaattaatcacacacccactaaagttcttggtttttcctctccacttgaatatctgtttaaacaaacccctgactatcaagcccttagaaccttcgggtgtgcgtgttggcctaatcttaggccttacaacaatcacaaaatgcattttcgctctaagcgctgcaccttccttggatacatccccattcacaaaggctttaggtgtttggattcatctactggccgcatttacatttcccgtgatgttgtatttgatgagtccgtttttcccttaaccgaactaaatcctaatgctggaaccaatctccgtaaggagatcaaccttttgccgactgacatgattagttttggggttgttcagttggatgatcatgtgagttattatcctgcaattcctgctaatctgtctcctgcagaaaatttggagcaaaacgcaacagcaaatacagaaaatgatgcagcagaagatgcagccgattctggtgcagccgaacaccaagcagctgacaatatctctgatgctgcacaagaggacagtagtcctctgtccgccgcgcatcattctgcacacgaggatgctgccgatgaatcatctgcagctccgtcgccggctgaccagtcttgtcaaccacaggcgcaaggttcctctgcgccagggggagagccacagcgtccagctactcgaccagtcacccggcttcaaaaaggtatcagaaaagaaaaaatatataccgatgatactgttaagtatggttttctcaccactaccggagaacctagagatttagctgaggctttacatgatacaaactggaagcatgctatggatgcggaatttacagctttattacacaataaaacttggcacttagttcctccacaaaaaggaaaaaatgtcatggattgtaaatgggtttataagattaaaagaaaacaagacggcagtctagacaggtacaaagttagactagttgctaaaggtattaaacagagatatggtatagattatgaggacacctttagccctgttgttaaagctgctactatcagacttgttctgtctattgctgtgtctagaggctggactctaaggcaattagatgtacataatgcttttcttcatggaatacttgaagaagaagtctacatgaaacaacctcctgggtatgaagacaaagcaaatccaggttgtatttgcaaacttgataaggctttgtatggtttgaaacaggcgcctagagcatggtatgctaggttgagtcagaaattgcagcaacttggatttcagggatccaaggcagatacctcattattcttttacaacaaacaaggtcttacaatctttgtacttatttatgttgatgatataattgttgctagttcgaggcaggatgcagttctaactctgttgcaagatcttcagaaagaatttgccttaaaggatctgggagacttgcattacttcctgggtatagaggtaaataagataagtaatggcattattcttactcaagaaaaatatgctaatgacttactgaagcgagttggcatgattgattgtaaacctgtaagtgcatcgttatcgactagtgagaagctcactttgcatgaaggagatttgttgggtctcaatgatgcctctaattatagaagtgtagttggagcacttcagtatttaactctgactaggccagatattgcttttccagtgaacaaggtatgtcagtttttgcatgctcctactacgattcattgggctactgtgaaaaggatactaagatatttaaaacagtgtactaaacttggtttaaagattagtaagtcaaagtctatgcttgtaagtggatattcagatacagattgggcaggaaatgtagatgatagaagatctacaagaggttttgcagtgtttctaggagataatttggtttcttggaacgcaagaaaacaggccacagtttctaggtctagcactgaatcagaatacaaggtattggccaacgctacagcagaaatcatgtggatacagaccttattggcagaactgggtgtttctagtcctctaatggccaggttatggtgtgataatcttggtgctaaatatttgtcatctaatcctgtttttcatgctaggactaaacatattgaggttgattatcattttgtacgagaaagagtacaacgcaggttgcttgaagtggattttgttcctacaggagatcaagtagctgatggattcacaaaggctttatcggtaaggcaattagagaattttaagtacaatctcaatctaggtagattgtgattgagggggagtgttagatatcatgtgtatatctgaatatgttcagctggttgatcctatcctttagctgttgagatagcgttgtaatccaggttagttggagatatatcagccggactattctcgtcttgtaaaccacgatgcaggttgtttgcatcatatattaatacatgcgacgcacccaagaggaggtgacgatcgcttcctgtcctctgactttcttcttctcccttctcctcgccaacgcctgcacgccgcccacgctgccagagaccgggagggtggtggaggttgagggccagatcaccaggtttcatgcgccttcttttccatcttgccgcgcacaggccacgacgctgtcctgctcggccgctggccacgctaccatcctccgctgccgtgggccacgccggctcctctcccccgcggcgccacctagagttgctgcggttgtcgcaaccgttgcaagaagctgcagccgccaccaccaccgaaagctcctgcaggcgttgtcatcaggcgttgtcatcgccgtcgccatggtagggcgtggttgatgtaaaagtttactataggctacgcctattgattatactaaattatactacaggcttggctgatgtaaaagttttctatataaattaaagttattttaaaaatcaaacaaatcaatcttttaagtttataaaaaattatactcgattaattatatactgataacttgtatcattctatgtgctatcagaatctccctgtactcactactcacacagtatgaaaatggaactgaaaattcccacgcgcgtggaggattcatagtttcatatataccacacgtaccgacgtacgacggttgaaggcatcacatccccaggagaagtcgcgatgaacttcaatttttcagacccaaattttccaattcactagtgaaaaatctaaacattacaccagagttctgaaaatgtgaagcatgagccgggctggttccaatgtattcagctgacttaccaattaattggagaccggtgatcatgtgcatacaggcatatcatgtcttgtcaggtcaaacaatatgtttctggccggtccactaatagctactcccttcaccccactttaagcgcagccaggatttcgtgtccaactttaatggttcgttttatttattcttttttaaaaaataaaaaacataaaccacacataaagtaccgttcatgttttatcatctaataacaataaaaatactaatcataaaaaaattaaaataagatggacgatcaaagttagacacagaaactcatggctgcatttaaaataggatagatggagtagtataggtaacacagtagattgatcacatgagcgagatcattttttctaggcaaaatttgctacggaacacttacaaaatatgtatttagctgtgaaacaccacaaagacgtgaatttgtccgagaacacttcaaaaatgtaatatcctcctagttgatgagagagaaccatataaaataacattttttcccttgttcttcctccaagtcttcttctggctcacttggagcgagctccaccgacttacccatggcggacagccactcgtctcaacatcacaactcaacaccctaaataaaaaaaaagggcatcggcataataaacaagaaggcgacaaaaaaagaaagatttttttaacactgactatgagctagtgatgaatgagtgtgagcgataatgactacacgcactgattaattgcttccatccatggcgatggcgcctgccggcacacgccacatgatgttgcacccagtgttggggtcctcgtagcattgctgctgttggtagtacggctgccggttgccgtagtaccatccctggtggtcgtacgacgccgtcactgaggccactccgtagtacccactggtcaccggcttgttgccgccagcgcacgagccgcagcggcacgcgccgccgcagccgtagccttagccgtcgccgtaatatgaggactagttgtacaccgggttgtcgggttatagttgtagcatgacaggaagccagtgggcaccggctagatggacggcacggcgacgccttgcgcagtcggctcgggcggcaccatcatcatcggcggcgcgatcggctagccgtgtggcggctcgaggctggcgtgctgtctgccatgggcaaaccaatggaacttgctaggagtgagcatcggaagaagacagagagaagggagaaggagataataagggtaaaattatcattttgtgtggtttctttttcatcaataggatagatattatattttaatgcgtccagtatcctacggtaaattattgcacttttagagtgtctaaattcacgtctttacggtgtcctacaactaattacacattttttgagggtcctatagcaaattttgccttttttatatctatcgatctgagtgacgcttgttctggttataacacatattctaaattaaaagtaatgtgtgaataatttttagcgacttaaaaaccaatggcgaaaaataaaaataaaaatcaactgaaaaattaaattttaaattttaaaagtcagttatacgttagagagtaaacgaggatctgacatatttcaatatttgacctctgtggtagcatgaggaatgcatgcatgcctgaaatttttacattttggtcctttttaaaatttattttataaatagacccttgaaaaaacttaaaccggaaatgatcctttttgggacgccagagtggctggcgccgtaccccaacatggcggcgccatccacactggcgccgtgcccgtgccaccgtggcactagggctgtcgtggaggtgctgactaggccgaagggggcgccagccaaagtggcgccgcccctcataccatgtgcccctcctctacgggccccaccaactttctcccccccccaaaaattttcgccctgttctgcctccgggcaacagctggcgcctccccccgaccgcggcaccagggtggctggcgctcccctcctccccccatcgaagcccttccgcctccgggcctcggctggcgccgccctcatggatcacggcgccagggtagctggcgccgccctcccccagcccaaaacccttctgcctcgcggcactggctggcgccgccctccccaaccgcggcaccagggtggttggcgccgccctctgcctccctgcaaattgaagatccatattgcacaaatgtaccaattcacagttcgcaattcaaatcacaattcacagattcgtacagactaaaacaggttctaattgcacaaatcacaatgccaaaagtccatcacatagtcctcacatagtccatcacatattccacacatcaaacaatgcaaaaaatccatcacatatcccacacatcaaacaatgccaaaagtccatcctatattccacacatgaaacaatgtcaaaagtccatcacatagtcctcacatagtccatcacattttatatcacatagtgcaccacatatgtcatactaccaaccaatagattaacttcatacaaattacttcttccgttggcgccgaattgcttgcgagcccggagtgtacctacatttgaaaatccaatgtttaaaacattttaaaaacaaaataagggaaatcaaataacatttgagaatggtaagctcattttacctctttttcgctgcctgagtggatcgcaagttgtattgcgtgggttacgtcccctgaggcgcgtcgggaagctgtgacatgtctatctcctcggcatctggtgcgacgtagtcctcatcctcctcgtcctcgtcgtcatcgtcgtcgctaggtggagccggcgccttcccctttcccctcccttgcttaatgcgtgacgacgacgagccaccaactccttcacgctcttctatcctgatggagtgtcgagcgatacttggacgcgcggattgaggtagtggtggtggtagtctccccggttggtacacgtcgtccaatccaaccgacctgcaacctaatcttgctgcaagtttccggcacctttgacgaactttctgcatttaaaaaaaaaagaagtttgttaggcataactcaagtaatgcaaagtgctaaataaattttacctctaaaacattgcggagtgtgttctccgtgtcctcaccacccctcggagcttggagggcatgccccatttcattcacactcctgaggagctctctcgactgaaagcgtgagaagatatatgttagggtctagggtgcaaatggaaataactttgacaaatgcaagaaaacttacgactctgtctctaagtggggcgtgctccatttgatatccaactctagtccggacatcatagggattccgcccctcatcggagtcgcggtcatcctctatgtcggcttccgtccaagtagggcggaggaacagtctatatgtcctatgcagccaacgaaagtactctgagaaaagatgattttggtgtatagtctcgatgtacctgtcgttccttccggctgtcctccattcatcaatgtatctattatgctctagcccccagtctttcaccttctttgttctcaccctgtcatacctagacaagtagaaggtgatgaaacaatagtgagcatcgacaagggttaaatggtacaaaattgaacattgacaatgaaagcaaacaaagataagaaatatttacttgtgtaattcaactccagttgagatgtcctcaaccggccaatcttgtttcttcccgaactgtcgcatgacacggtgcggaaggtggtactcaactgcccagaaacaaatcaatgggcactggtacatgaaatagtcagagtctcgattgcacatcgagttcagggtcaggcttgaagcctcatttgtgtggtatggtaaccactcaatctgcaaaagttgaagagatgtcgttggttagtatctcaattaaagaagtaaatgtctaactagaagtgatattggaagtacttacatgttgaggctgtaagcagtccatctcattgacataatgcttgtatgccacatcccggtgagcatgtgcagtggcagtactctcaaaaaggtagaccactgtcttctccatgtctggctcattgtagggccaaggagtgaagctttgcctccacttaggccttccaaccggtagtcttaaccacatccacatctgaatcaatagcacacaaccactcatgttggatgatggtgcctaacgacaacaggcctcacagagctgtctatatgtccacgtcaacactgctgagccgcaactgaaacggcccagatcaccaaggtcggcccacagaggaggggcgcgccagccatgctggcgccgtggtatgaggggcggcgccagtgtggctggcgcccccattctgcccagtcagcacctccacgacagccctagtgccacggtgggcacgggcacggcgccagtatggctggcgccgccatgttggggtacggcgccagccactctggcgccccaaaaaggaccatttccggtttaagttttcccaggagtctatttgtaaaataagttttcaaaaaggaccaaattgtaaaaatttcaggcatgcatgctatacaacagaggaacccgttcctattttgcatgctaatttcataaagtagaatattgatatatgcagttcttaaattcttaattttaaatttactcatgcacgccatgtactaggtagctaggtacagtttttaaatttattcattatttttttaggaataattaactactatttgccactcttacgtgtggttctaaagaatttatgtcatagacagcgagtggcaaatccttaattgccacatcttaaaagtgacaaataattaaatgcccttttttttacctgtagcgaccaatctaaactgtcttaaaaaatgttatctaaaagagtttcaaggtttttaccatcttcgttctaaaatattgctatctaggtcccatcttaccatatctaactgtacacaatgcactagtgtcctagtcgctagtgccatgcactatttgacatttgcggagccatcgtttcaccttattcgtggaaacttatatatatatatatatatatatatatatatatatatatatatatatatatatatatatattcttagcgaactaaaagcaaaggctaaaaaataaactttaatgaaaaacctcaaaatcaattctaaatttacggttaaaaattcaaatattggctgataagtataagtataagcgaaaagataaggcccttgatgtagcatattgttgcgctagaggaaccatcgttcatattttaccatcgacaggtatatatatatatatatatatatatatatatatatatatatatatatatatatatatatatatatatatatatatatatatatatatatatatatatatatatatatatatatatatatatatatatatatgtatatatacatatatatgtatatatacatatac

SEQ ID NO: 6951 - DNA, 55604 bp, Oryza sativa
  unsure (1)..(55604): unsure at all n locations
tatatatatatatatatatatatatatatatatatatatatatatatatatatatatatatatatatatatatatatatatatatatatatatatatatatatatatatatatatatatatatatgtatatactccctccgtatttaaatgtatgacaccattgactttttaactaacgtttaaccattcgttctattcaaaatttttgtgcaaatatgaaaatatttatgtcatgcttaaagaacatttgatgatgaatcaaggtacagtaaaataatgataattacataaattttttgaataaatttgatgatgaatcaaggtacagtaaaataaatgataattacataatttttttgaataagacgaatggtcaaacgttggataaaaattcaacggctatggaggtagtagtatttctttttgcaagttgccaagttggtaagccggtcgatgtcaccatgccataaccgtggagcgtgtccatgtcaccgcatgctataagggcacccgcaatggttacctataggctatctacaagagattcatgtcagcatatattttcctacttggaagaaattaaatgaaaagagagagagcaaagctatctactaaactggagatagtctatagagaaaagcgagacaatggatttagagagttatagatacccatgtagatgtactattaaggtggtttactattaatctagtctattactgatatgtacattgtcggtgatatgggaccgggggtatcgtgaccagaggcttgaggcagacacaatcgcccatgcggcctggcaccttcggggacgtcgggcccgagggtgaggtgtccgccctcctcctgatttcccccgagggggggtcgggttactccggtcccggccccgagggccgaggcaccccgaccccttgaggaagtttgcgccacatatatgggataggtgaacacggcagtgctcacctaaccgcatttattgtaagactggtcaagcgtgtcacgctgcatgcagcgcagtgcagcgcgttcctttatccggtctgtgaccggtcacagaccggtcagatcacgggttaggtggcgactggcggtctgacgcacgccttgccccatcccgtcaagacgaaagcctctaggcactcgtctcaagccggagctagcgtgtaatctcttagagatggcacgttagccctggttagatttataccaggcttcatcccaaccattacagcctatatgttgtatgaagaagggcgaacatgcagattgttgaactgacgcgtggaggacaagaatgaccagtctgacactggtcatgtcgtcggcagacagccacgttcccacgacgcgcctgccttcggcagaagtggaggtaggtgtgtgccgtcccgtcagaaggatgatcggaggacaaccgtgcaaatctccgtccatttatgaagagaagaaaagtccagtttggaaagagaggggtgcatgtggtatccccttgaagtataaaaggaggaccttgcccatagggaaagggggatgatcttttccagatttggaacttagaacaagtaagaggttggctcacattttgtagctccctcatacacagatccaccaaaacacaggagtagggtattacgcttctcagcggcccgaacctgtatacatcgcccgtgtctcgcgtttcttcctagctggcgatctttccacataccgagagagcttgagatttcaccctaagcccccggccgaaccggcaaaggggggcctgcgcggtctcccggtgaggagccacgagctccgtcatctggcgcgccaggtagggggctcagcgtgtgttttctgagctctcgtactcctccgtgtgcgccaagtttttcttgttcagcctaatggccgagcaagcaaaggtgcacgacctctctccgagtgtgagcggcgacgacggggagccaaacccacgccgtcgagctcgtactcccccacctcctccacaccaaaatcctaagcagggggaggcgctcgatgcgtacgtgcggaaccaatggccgagaacgggtacgtgtgtttcgatctgtaattttctttccccaactcgcggcatgtcggcatgtagtgtaattctcctgcactgacagaatcatgggcaaattaaacatatcaaaatcacaacatctgggaacagccgcacacgcttcacactcgcacgagaatattaaaatcacaacaatagctatatatataggcctctacagctaagctacctcgtcaattaattaattgttttatcgtggaagatgggctcacgtttcagctctataaatacaactcttcagatcagagctaggcacaccacttcacttgtgtagctgtgttctctctccataacttcacttcacgtacttcaactcaaacacagtagagttcgtcgcctccttgtcatcactgaacacacacacgctgctgacatggccgcgagcaaggctgcagcagcgaaccagccgctggagatggacgctgtcgtcaatggcggcgccggctttgaccttagtagcgattcatacaagttaaatcttctaatcaatggtgggccaataatgaattttttttgcatatgtattaagacgcttggcctgatttcgaaattgtccagagttttttatgtagttttcattgcaaaatgatggatctccttccgtaactttccaattacgagtacgagaattgaaagacatgaaaattctcaattctctacggcgtctaggagatagatagaatattttcaggaacaagaaaaccagaagaatctttctctctattcactaccatttcgcgtcttcgacttctattagtttcttttcttctttaatgcaatagctatagtttgatatagaatccatttctcaaagtaatggaaacctttctcttataggaaatggttcgaaaatcgctattccaccttttaggtatcgtgaaaagtgatacctgtgaagatcgtgcatttcagtcacattcagatccgttttttgagtccatgatataaccaaattggatggatcttccacccgtttagctaagaaagaatagatgcagaggtggataatagatcgatataaagatcatgagctgccccataatgaaaccaccaggagtcgcgaatatctccttcttccctaatccaagattggagaaagaagatccaagagggacccatggagaatgtggtcagaaacctataatagagtccgaccgcaacgacctcatcgagaaacttagactactaagtagaaaagatttgaaaatcatggcatgggtctcctttttttctttctttagagttttctatatgcacaatttctcgatgtttcgatgagaatttcttgactttccatatatagaaagagatagactataaatgacatctcttatgtcaataagaccaaagggatggatattaaatgataggaagtgctagaaagtgaaatagaatgaaatagagccactctgggcttacctatgaaatgaggcatggaacggagccactacgaagaaattccgggagttacgaaagaagcttcggactcatattgttcatgggttgagagcgggagttgaactctaggaggtcgaatcccccttgttcctcagnnnnnnnnnnnnnnnnnnnnnnnnnnnnnnnnnnnnnnnnnnnnnnnnnnnnnnnacttggggagatttgattcattctttaatgtaagaataaagaattgaattaaagggctttctttgacccttaggagtaggtaacccgttcgctatccttgtttctattgcattttatctcatcgtatcacattctgttctacgattccacttcgacaaaaggaaagagcatacccaagttcaatagctttacgtccgctatcccgatcatggttttcctaccctcagggggaaagtaaaggcccttcccctttggaaggctgtgggcgaggagggattcgaacccccgacaccgtggttcgtagccacgtgctctaatcctctgagctacaggcccaccccgtctccactggatctcttcccggggtaccctcaaaaggaacctccctctcctcagccatttcatttcgggttaagaagatgggaaaacccctttctctctataagaatagtgcgttccgaggtgtgaagtgggagagaggggatgtgatgattgaggttttgaataagaagacctttgcattttggatttggatctttttcgtatttcaaaatagtgaaaaagtcaaataagaggtgttaagctttttatcattctggcatcgagctattttgccgcaggacctcccctacagtatcgtcaccgcagtagagtttaaccaccaaattcgggatggattggtgtggttcctctacgcctaggacaccagaatatcgaaccatgaacgaggaaaggcatgagagaaatattggctagtaattgtgaagccccaattcttgactggaagggacaccaaaggcctctgccctccctctctatctatccaagagatggaagggcagagcttttttttggttttttcatcttttcatcaaagagttgaacaatgaagataaatggcaagtgcctgatcgatttgatcaggtcgtgtaggaacaaggttcaaatcgttcgttcgttaggatgcctcagctgcatacatcactgcacttccacttgacacctatttaaacggctcgtctcgccgctaccttatcctatttccatgcttctgtcgctccatccccgtatgggtggagaacccgtcacctacgcccctcccctctcgcaggcacgggcgtgatatcgatccagtggctcacatgatttctgtcaaatttcagacaaaatttgatcaattttcgcctgttttaaacgatcatatatatattaattgatgcaggttgtgaggagcggatgagggcgcgggcggagcggctcgccggggaggtgcgccgcaggatgttcgccgccggcggcggcaacggcgacggcgagggcggagttacgatgagcgtggccgaagcggcgacgctggtggacacgctcgaacgcctcggactagatgggcacttccggcacgagattggtgtgctgctggggcgtctccgccgcgaggaggcggattttgcaggcagcgacgacgacctgtatactgttgcccttcggtttcgtctgcttaggcagcatggggtctgggtatctgcaggtacgtaactgttagtcttggattaattaatactatgatgattcatagaggaaaatacaagaaaattggttttgcataaacgatttaagaacgaatggcaatacatatagttaacggatttgctagaaaacttctataagttttttgttcccaaaacttttaggattgtaaccatcggatcgccttgagatttgtgcatgaagaaaaaaattgctaaaagaatgtttcacacgtgtcacgcgtaagatttcagtactaactaaccaaaccatagttgaatgcaagttttatataagttatatcgtagttacaatatagtacaatataattacacttcaattatattatagttacatctgaaagttttatactcaaaaaacttgtgacaatttttagatatagatactacctatagttaattaattaatttggcattatgttgtgtttgcgtacgtatgcagatgtgttcgcgacaagttcagagatggtacatgtagtttcagctcaagcctacgtgatgacccgaggggcttgctgagcctgtacaacgcagctcacatggcagcacctgtagagatcgccctagacgacatcatcgccttcgcgaggtgccacctcgaggccctgtccatggaaggcgagctcaaatcgccattggctgagcaggtctcccgcgccccggacatcccactcccacggttcccaaggcggctcgagaccatgagctacctcgtcgagtatgagcaagaggacgaacacgacgacatgctgctggagctcgcgaggctagaattcgagctcacgaggtgtcttcaccttgaggagctcaaggctctctccttgtgagtgatcgtttcttatcgtctcattgctgctgccactgtcttcttcgtcttcgctataagtgtaagaggttgatgatcttgcaggtggtggagagagctttacgagagcgtgaagctgagctatgctcgagatcgcctagtggagtcctacttctggacatgcggcgtgttccatgaggaggaatactctcgtgcccggatcatgtttgccaaggtatttggattgctgtccctgatggatgatacctatgacgtccatgctaccttggaggagtgctataagctcaatgaagctatacagaggtctgaattaattaatctctcatgatgttgcattgttgattgatccttatgctggtgattcagctcacatgtatacatgtcgatgtgcagatgggacgagggcgcgatttctattctgccagaatatttgcgcatgttttacatcaagctgctgagcaactttgacgagttggaggctagcttagaaccacacgagaagttccgcgtgtcctacgccaaaaatgcggtaaatattcatagtaaaaatcacatttcagtctatgaaacatgctaatatgtagagtaaaatcagtagaatctcacgtgaaattctccctttcctgtccatgtacagtttaagctgtcgtctgaatactacctccgtgaggccaaatggtcgaacaccaagtacacgccgagcttcgccgagcacctggaggtgtccgtcatgtcgtcgggcttcccgatgctggcgccggtggtgctgatgggcgtgcacgacgacgccgccgtggcgaccgcggcggcgttcgagtgggccaccgccgccggcgtccccgacgtggtcatcgccgccagcggcgaggtggcgcgcttcctcaacgacatcgcgtcccaccgcgtggggaagaacgagaaggacgtgccgagctcggtggagagctacatggcggagcacggcgtcggcgaggaggccgccctcgcggcggtggcggcgatggcggagcacgggtggaggacgatcaaccgggcgttgatggagatggaccccgggctgctgccggcggcgcggctcatcgtgaacctgacgaggacgctggaggtgatctaccttggtggcagggacggttacaccttcggcggcgacatcaagggcctcgtcgtcagcctcttccttgatccggtcgccgttatacgtatttgagctgaatttgaatgttctcgatcgatcctgtataagttgtgtacccgtgtattccaggcttctagctaggtgtgtgaaagctaggccagtaaggtatagtaccgttggaaaaatatgggtgatttatagtagtagttgtttctaagagataaattacacaaactattgatgcaaaataaattttgagacagaactcgaaaatatatccaaaattttgaagaataaaaagttctattaaaattggttctaatgctgttgaaaagaaggtgtcacatttaggggtgaaaacgaatcaaatatggtcggaaactagctctaccatatccgttttcatatttcttttcacggaattggaatcagaaacccggatacgaaaacagaatcgaatattatcgaatatagatacggagtgaatacgaatcgaaacgaataaggtaacgaataattatcgaaatatcaagacccctcaaagtaagcttcttaaatcgaggaagaggtgtagccattagttttcaaaaacaaaacatcaacatgttcaaattttatctctatttgtaagtgcaagggggagatagaaaatgttgtgtttactttcatacaaatttatgttatcatgaaacaaataaattaatgtgtatcacttaaattttcacaggcacattaaaagttttgaaaattggttgagtattttaaattttgggttgaacatttcaattggagttgagagtttcgaaattgaattaaacgttctagaatttaagttgaattttttaaatctgagttgagagttttgaattcgaactgaatatgtggagaaaggaggaggaagaataagatggctgagaatgacatgtggggcccacgtggaccccaccatttttaattaattcttttagtgtaactgacaatggggtcattgtttttattaattctcacatcaaattgctacgtcaatgccacgtcagaagaagaacgggtcaatttagctatgtaggcgccacgtaagctaaaaccaccatctaaatcaccatgggatctatattgcaccggttgtaatagttaagagacccgttatatctggttttctagttgaaggatgaaaatcggattcgttgacaaataagggaccgcatatgaacttattcctttactatttgacaattttcatattgcatgggctacacacatgaaattttatggatttggcccgttattgaatttgatatgttttcatgtgtttgtagcactgggcacatgggcccaatatatagcccacatgtaggctaattattattttttaatttgtttcaaatttatatgtacgaaagttatacgtacaatgtttatatgcatatgcggagaaagtagggccagggcttcctaatgcacgcgctgctctgtgggggcaagtcgtgcacccccaacaagcgacccctatattacttagcgcacccccgacccgcttagtgttaatctggttcaataacattttgtaatataaattaacgaaaaagtgttaagttgaaagtttctatcagtgttatggataatgcatactcaatagttttgagttaaactcggtggggcccaccatatattaagtcctacacagaatcttgcctcgtatgcggaaggtggttcaagttgaagtttaaaattcgagctgaaagtatcgaattccaagtcaaaagtaaatttgatatgaaagttttgaaacttgagttgaaagttccaaaagttgaattgaaagttttagaatttaagttgattgcttcaatttgagttaaagttttaaatttcagttggaagtttttgaaatttgagatgaatggtttgaaaattgagttgaaagtttcggaatttaagtagagtttcaaatttgattcaaaagtttcaaattttaaatatagttttcagattttagaaaaagaacaataaacactagtttgaggaaaaaaaaccgcatagagggttaccaaatttacgtttaatcagattgtacaaaatgactaattagcgcatgtgaagaacccttgcgccgcgagcctcatgagttaaacaagttgtgcatatgcacggaatagatttttcacacaaagtatcaatgtatttggtttttatgcttatttattttgaaaaaaaaatctgaattaccccttgaactattgaggtagtacaatttacctctaaactagttgttttgcaccccttactctttaagcgccgccgctcaccgaccttgggttcttggccttttcccgagagagggagaggggtgagagatgtcatgtgagcccacttggatatttattttgacgttttgttgctgattggagtgtcaggttcgtgccacgtgtgcaatcctatgccaaaaccacttcaaaccatgctcacgggtaatccatcaggtttaaagagttagggggtgctaaatgtctggctttgtgatttaagagattaaatcatattacctcaatagttcaggggttaattttgacttttttcttttctttttctatgagtaaactttctttctgggctagggttaacacgaagaattcatttccaaattcatacgcatgaattttatatatacaaaatttctacgcaaagtatctatgtataaagttttacgtataattttttaatttatgaagtgtatgtgtataactttttttactggacagcatactgtttgttggctcaaagtccaaccagaataaaaaacaagcatgcgctgtggcgggttgaatgcccagggaagagaggaaacttgtggtcgtatgcacactgttttgtcattttttgccgcgcactcgtgatgtgcgcgattgcttgctcatcagactgatctctatttatgttcttgaggtgataccatataactgaagagaggtgcgagggtaagtttatattttcacgttagatggatggatatgctgtacggatgaaagaggccggtgttctcagtttcttacgcaagcgcgctcacgtaataactcatgcaaacataccaagggtttgacggctcgtgcaaagtcaccttccaaatgaataggtatagtatgcagacgacgagttgtgctgaggctgtgtttagttcagcgtaaaatttagattttggttgaaattggagatgatgtgactgaaaagtcgtgtgtgtatggtaagttgatgtgatagaaaaggactgaagtttggatccaaattttagatctaaacacagcctgagtactccagtagttaggccggccgttatatgtgccaatcagtactggaagtctgaaaatatcggtcgatcagcagtacacgtattcacgatgggagtgtatgtatgtgaggcatgtgccagtcagtgcttgctgcatgcatcatgcatgctgggccacagcctacagccctacagggagaacagtacagggtgcacatgcaaaatgaggccctcgtacgacaattcgatcgtctattcttctttttgctgaaatcgtcgtccctgtgcggcaagcggtccatgatggaccattcatgcattgtcttcgttggtcaatctcgtcactacgcgcaagcggtgacactacttgtactgtggtgtctaataaatgtacaggttctttgaaaacaaaggaaaaaaacaattgttgcactagtcgcgcataaatcatcctacgtataaacctggaccttacttttcatgtatgatatatctccattataccaacctgtagatcgtgatatatcctgcgtagacgaacgacgctgttgatcctgttaatgatattttatcagctattacactggttgaaagatctttctcaaacaacccacacccacgcgacttcacggtccaccgagagataaggcactcatgtgtcccacgcccgcacgtacggtgacagctcctcgtgcttccgctgcttaatttccctataccgcgctccgtctcctcttcttcacggaccacggccacacaaaacctatgtttaaatgtgccactttcactgagaaaactgctgcgccctgctagaaaacttgcaacctcctctgccttggagctccgtcgctgcctttcccaaagcgcccgatgccgcagctctctgcggaagtcatcgcctccactcacctgagccgacccgtcgagctttttccctgtaccgtagtctactacactaaaaagctcgcgtgccccgtagcttgctcgacaccaccaatctgctccgatttccgatcaactaccacaaccaaagccgatgaatcaccatactatatatatttctagccactaaacaacctgagtgtcaaatcttattatcatctctctatggtatgcatcttactgaagacccgtgcctcactgaaattctatggatagcttaaacacatgtgcttagtatttgtaggcatcacgatttaagttctctactgggtagaatgatggcttaaacacatgtgcttagtatttgtagacatcacgatgtgagttctttactgggtagaatgatgtacccgtgaggccgtgactccgcttaaaagcacctagttattgaggcagacgagaagaactgaacaagcaagaaccatcatatgctaggaaaaggacgatttttgtttttgtttttgtttttgtttttggagtcgtgacaaaatgccctgggtcgttttctctttatttttttttatcacaaccgactcaatccatcggcaaatacaaagacaaagcactacacacaagaggtatagagctcctggtggattaatcttatttgtaaccagggcaagtgtgtgagatgtacaactgtattggccccttaaaattatatattttgatataccaatgtgttctaatatatttagaatctttttacttcttttttaaaattttctttgtgcttcaattgaattttcctagaacgagattttttttctctgacaattgtttgataatcatagataccttgtagaactatattcatgacggtagtgaacgtgtgttctaaataataacaatatcatttgtccacttaattaataaaaaaatgaacttggtgcagcgattcttcttctgcctagctaggtcgtcatagacggcagggacagatctacagtagaagggccggtgttaggcgacaccgacgattttcagcaaaaactatagcgaaactgcttatccatatgttatgacacaatgatgtaagtataattagcacacgatgacaccgatagacacgttctgacactaacgaatcgattttctagatccgccactgatagacaggtgagtttctttagcatacattggctatcgccaatacgtataagaccttattttatattttgaatagggccacaataatttaggatggccctgtttgtaacatacgcatgcataccctagtatttattatgtgggcgtatagtgtatatgtttttagataatggataaaatctaacatttacttcaacagaagctatagccacttattacatagttattggctgaaaaacaagtataacaatttgtaacaaagaataaagagacgacacaataataaatgtcaccatcataggaaagagaaacaatttactcaaagaataatcttattattaaaattccatccaaatttagcgaaaatttaaacggcggttgcttataaattccaacatgtagcatgaatagtcaccatgtcctcttcacacatttgtagttggacatagaaccgaagccagtatgctctgaagaaaaccggcatatatgatttagttggtgttttataaaaaaccatgttaattctattcaactatagagtctaacatagaacagacaccctaactaaaataaaatatatatgtaggatcgaagttacgcacacgatttggacgaacacgtcggcacgttgctgtgtgcatgcctaatacacgggaaggggatcaagaaagaggttggagacgagacccttgaggtcgccaccgacggtgtacccgtccctgccgccgaggtagatcacctccaccgtcctcgccaggttcaccatcagccgcgccgccggcagcagggcggcatccatcgtcccgacggcggcgcactccccgttgatcgtcctccacgcgcgctccgccagcgcggccaccgccgccacggcctcccccccgcccacgccgcgctccgccatgtagcactccaccgtgctcgccatgtccccgccgctcttcccgatcctgtaggaggcggtgtcgttgaggaagcgggcgagctccccgccggcgcggaccagggcggggacggggacgctggtcgcccactcgaacgcctccttggttgtcgccgccgcaccgccgctgtcgcgcacgccgagcagcagcaccggtgccatcgccgggaagccggacgacatgagagagatatccaggtgctcgacgaagctgggcatgtacttgtcgcttgaccattgggcctcacggaggtagtattccgacatctgcttgaactgtgtacatgtgtgcatgtgcaggaaaattaatcaaaatgtgtggacgagggcacgaatatcactttagtatgcctttttttttttttttggagaacaagattttaccgtagttttcgcgtaagacatgctgtacttctcatccggctccaagctgtcctccatctcatcaaagtcattgagcaactttatgtaaaagatacgcaaatattctggtagaatagaaaccgcacttttgtcccatctgtatagatatatatatatatatcgaggatatatttatattagctagatcattgattagtaatgctcgttggcaaattgacaacctactaggccatcattaactagcaaatttctacctctgcatagcttcgttaagcttgtaacactcctccagggtggcgtggatgtcgtaagtgtcatccatcagagtcatcagttaaaacaccttggtgaatatgatccgcgagcgagagtacttctccccgtggaatatggcacaggaccagaagtaagactctactagacgatctcgagcgtagctcagctttacgctgtcataaagttgtctccaccacctgtcaatcatattcacgcacgcacatatttactagaccacgtaattgtatttatgctaactgtgcagtgaagtgaagtagagtaattttatgatagtttttactgacagtaatatatattccactatcataatctgctgatgagtaaaagcagggctattgcttataacacagttgcgtgaagcagagaacgacaaggacagtgaagcaagaaatgattgtggaagaaaaaaataatatgcataagagaaacttaaatgattacaaggagagggtcttgagctccttgaggtaaagaggtctgataagctcgaagtccagcctcgcgagctccagcaccacgccgtcgtgcgcctcctcccgctcgtactcggtgatgtagcgcatcgtctccagcagcttgggcgcccgtgcgagagggatgtcgagggcgcgggagacctgctcggccatcggcgatcccagcttaccttgcaaggacttgacgctccgtctcgagaacgcgatggcgtcgtcgagcgccgcttcttcgccggggcatggcgaggtgcgctgcgttgtagaggcttagcaggccccttgcgtccgtgctcaggttttctctgaaacaacccgtgctatctttgaacttgtcgaatacatctgcatgaacaaatttctagctgtaagggtgtacacactagtactatatatgctccagggattatatttatccaaatgaatcagagatgggagagatgtgtgttcaaataacaagctttagatcgaaccttgtttgatctttgtcgtattttagaattcatttagtgtttttttcaccgtattttttttcaacctcagtttttggactgttatatactgaatttatttccattcttttgattttgtgtcccaatttatacgctcctagctatcaatgaaaatgtcttctaactgattcggcaattatattcattctatatcaatatgtacatatatataacaaaatattctcctacaaaactgcagagagattgaattatactccgagttacctgcagataccaagaaaccatgctggcgaagtagacgaaacctaagggattcaaggtggagcaagtcagcagcagcaacgctgtcggcgtgctccttatggtgcaataataatacatgctgtaacgctacggtgatctcgtcgcggaagtggtcgtctatgtggaggcgttcgagcacgtccactagcatcaccgtgtaggccatactcgtggccttcgacagcttgcagcgcacctgcctctttagctgatccacatgttccctcatccacttctctgacatctgaaaacatatgcacgagcaattaaatccaagagagccatagttaaaggggaattacatccatgcgtaaagtctcatattcaaattcatattatacagagacaaaaaaacaaaattatatactctcaaaactatcataatttttatcatgtttgttatggctaaaatataatgaatttgaggttaagactttacacatatgtgccatattattggaagtacttgtataattttattttagattttttcgggtgaaatttgttaattagagtatacggtgtgtatacgagaagagacttgtgtgtacatgatatgttccctagttaaagtatccatgtattgtcaaactactaattaagctatctagaatattgtatatgatcaattaacaacatgccattgaaatttcacgcaatctcttgctcctgaacttttataagatctctcacacatccatttcattagttgatcattagttaattgttagttttatattttttaaagaaatggccatatttcccttggcatattattactaaaagtttgacaatttaccgaatatgtagttttgggtttaaaaaagttagggcaaaattacataatatggaagtaatttcattgaaatttcaaaaacttgtgaaactctgcatcaaatcaaatttgaaatgtattttttaatgaacaatattcagtttgaaaattgtcaattttgtcatagccatgtactctctctgttttaattaattgacatgtcgttctaaaaaaatctaacaataaattagtagttggcaaattacattgctaccctcgttaattatttcctaatcatctttctatatatatatatatatacatatatatatatatatatatatatatatatatatatatatatatatatatatatatatatatatattgatgaaggatagtagggaatatagatctctagaaatgttttcaagtgtgatcagaacgacaaaaacgttttgacacgaattagaacgaagagagtattcgtcactgtcatttcatgcaatttttttcaaaaattatttaatatttgaaattttgtttttcttatcaagtgaaaaattttgaaattttcaaatgtattttaggcactatataaaaaaaatgaaaattgttcttttaattagaacactcaacattatgtaatacataaattagggtaatatggtcattttaggaaaaaaatgatcaactaaaggaaaggaggtgtagaaatcaacatagaagctctgcatataaaagggattcgacaaaactcaaacatataaacgaattagctaaatatttagatacaaaatgataattttctctataatgtactccctccgtcttatataagtcgttttgaatttagtcaaagtcaaactactttaaatttgactatgtttatagaaaaatatagtacaatatcaaattagtttcatcaaatcaatgatcgaatatattttcataataaatttgccttgggttaaaaatgttactttttttttacaaatttggtcaaacttgaagcagtttaactttaaccaaaattaaaacggcttataacctgaaatagagggagtatatttcttgtgtgtgcacatatatattatgttcagtaatactagtattaatttgcatgcctgtggggctgggaggggtgtaggtgacgaagaagtcgccccacacggagggagcacaagttcggccggtggcagctgcggcatcagctagctgcgtggtgccacctttaactgcaagcacctccgtatcgagaacactaatcaccttactcccagacatgagattagctacttttggtcggtgtgctctagtcagttacagaggtcgtgaaactcttgctgcttttggatggtttgaatcgattggtcctactatctctcctctcatctcatggtctctatttatagacaaatatccttcccggtgatgattattaatggaccatctaacctaatttttctgttacaacaaggtgaccttttttaagattttataacattcccttctttctcacatacttatctcattgtttccatgtactattctaactttgatctctaataaccttcaataacaaatgaaacttttttaaggatacaatatactttaatgttacaaaaactttctaaagtatttataaacgcttttgaatagtaaaaagacgagtgatcaatctgagaaccatgcaattaatggagtatccgagggtggtccggtggtcctcggaccagaaaaaaaatcgccaagccaaagcccatttatggtttaaaaaaagagataaaaacaactcctatgtgtgaataaaagtgttggtcaatcggttcagctccagatatatagtagtccctcactcgtctgtgttgtttcctctcccacacgtgtgcgccgtgcggctgctggctaaagatcctagtgagtggcaacggtggagttgcggacagcaagggtgttagggctcccgagtctgcacccgacaggtcaggtccgtcaggagattaactggttgtttaggaatctttttcacccttctcacctcaccatgaatgtaatgtgtattagagattaagtatgaaaaaagatggaaataatatcgcatctctttttccgaaacatgaagcaaataagatgaagattgcttctcaatcacctccttcctaggttgtggcagaagagcacactaaaatcaatcttcttcaaacatctgtagccgagtaagcttctttaagtcaaattttatgaatcatgatgaactttcaataattatatgggtaaattctagatgtaccgtatttaataattttatataagttggactacccatgcctaaaattctagatacgtcactagaaccatataagtattttataccaaccttttttaagaacagctcgtttagagttctttaaattcaaccttactgtagttgccggaaaaaaaggaatcgacctagcaaaggtcggtcaacggtggaaaaaaaggaattaatgtagttgccggaagaagctcgccaaagagaggtctttgttgtcatcatcgctgaagggagtctacttgtctacacatttccttttctccatcggaggaaactcgctggagggaggtgaagcaagcttgccacccgctatcatcatcgcccattgggagagaaaggtggataaactgtgtgtgtgtgagagagagagagagaggtggagagagataaagaaatgggttgggctgctgggctgtcgagagtattcgcaaggcactaacgctcacccaacatacccacccgtgggccattagttcctgttaacaaatggaaaaaaaatatccacttttgttcatagccgggtttagaggctcttgtaactattaaaacggtaataccaggtcaattctcacctcactagaagaaaactgtaaaactgggtcaattcacctcacttggtagcctacacgaaggtttcatcatcctagcacctacatggcacgttgacctagtcttcatccaatgtgaagcctacgtgatgcaaacattgcattaaaaatgtaaataaaaaataaaaaaataattaaaaactagtgaacccatagctctcataaaaaaacagtgggaccccataagacccgtacgtactacctctaacacatccattagtcacgatgatggctttcttaaaattaagggaggatgttgagcccatggcttatcaagttatttcttttaagtatgttgaaaattgttacaaggtaacaaataaagatgatggctttcttaaaataaggggaggatgatgagcccatggcttatcaagttatttcttttaagcttgtaacaattaactattctatgcagtttggttcattttttttgatttaaaggaaaacaagatgaaggtaggaggagccttggctacttctgctactatgccatgcatgttttttttttagaattacacagtacaacgcaaacactcacaacgcacgcacactcacccctataaactcatgcacgtaaaccctacccttatgagcatcttccaagactgggccggcaaatcttgtagattgacgaagtcaccacagacgcctcactgtcgacgggtacgtcgcctaccagtgaaagcataatgccgttaaatcccggaaaattcgtttcccatggggagtcgaacttaggatctaaggtgctactaaggctcttataaccactggctacatgctcttttgctatgccatgcatgttgataattcatggctctaatttatataagaataaagaagaggagaccaagacaaagaagaaaatagtagatcgaggatgtgttttgtatttaagttggttccaatcacataccaacgaatcagctatggtcctagagttattgagtacaaataatgtgattagctatgctgtcgcaattttttattggtaatcattgttcaagtcattaggcaattaaccaatcattgtttggtccaattatattttcgttcatcgttgtcatcatccgctatatttcagagttctaatctatacctaatttaaaaatgcgtaaaacttttgagatgatttttcgtccatcattgtcatcatctgctacacgattttttttttcaagtgaaacagactgaactctagtgttcgctagttttcgagttcgatacgaagcggatttgctcagatttttgggaaaatggaaggagaaggagatgaggatagaaacccctcaattaattttagatttatgtccaaggatgctgttggattttacaaaggaggcggcttcaagcggcatcgggcagctgagggagtttgaacggagacaggggataacactgtagcgatgggcccacgtgagatgagaggaggagcaggaggacgcctattagactttcggttgcttgttgggccggacgtatgcttgtgggctgaggtaggggggggggaagggaggaaaacaggccagctaggctgcgggctgagaaaggaaatgggctgaaaatagcccagagagaaaggaaggttttatttagatatttatttaaataaatactgaaatgatgtttgtactactaaaattagcaactaacctttgaaaattccaagaaaatttcagatagtgtaattaatcatggataatttaagaaaaaataaatccagccatgtaattttatgtatcacacttactttactttacttgtaaattaatttaattctacacctacctacttagaaatacctaagtattccgaaaattttgtttttaattaattacataatgtaaatatttctcatatttctcgtcttttcttcccgttgcaatacacatgtaatttttcttgtttgtgtaagaataaagaagagaaggagaccaagacagaagcaaagtgtacaggatgtgttttctattttagttggtcccatccatataccgacgaatcggccaggtccatttttattggtaatcatcgttgaagtgtatctctctctcttcctctcctccaagcgggagcgggagctggtgccgccgccgccgccgctaatgacgatgaggaggtggccgggagcggctccatcgatccccatcaccgcccggcgctgcaacacttttgcgctcagccccctccacttcacagcacatctcatatacctccttcttgctatagtgacactcgaataaaaaaaatccctaaatccttcttccctctcaatttttctccttacaggtatagaaaatagagctccaattagcaattgccattggtctgcgctccacgatgaccttatccttgcaccacatgcacttgatcattggtaccttgttccggcgactgcaagatgagaacgagcatggagaatccatggggatgccgagcatgcaagccacactacgccgcctcccgccgctacttgggccgcaccgtgccacggctatcctcgtcgcactgcgacaccttctgctataatctcgctgcctaggcgaccatagctgctacctcgcaactcccgtcactaaacttgcaatcgaaaccttagccgatttgaggatatttggggggattcgggtcggaatgcactggtcaggacaagttatgtaagaaggtatatgcagagggggcggagcgtaaaagggttgcctatgtggcgcgccatgttagcggttaaacgcagtcaaaggatgattggactataaggatggtacattaaaccaagttcatggatctaaacgtgtaattttcaagtttactgatctaagtaacatcaccacataagtttaggaatttaccatatatttcacttaataccaaatattggtgtctctatgaaacatgtccatcttttcacttatacatatgcttaccaagcaaattctactacaccgttttaaattagtagtcgctttgactttttttttcttgtaacgtttgaccattcgtcttatttgaaaaattagtgcaaatataaaaacggagaagtcatacttaaaatacttttgataataaagcaaatcacaaaaaaataagtaataattctatattttttgaataagacgaaagatcaaaattacaaacaacaactcaaagcgttctgggacggaggtaatataaaataaatcacgataaaaaaaaacaaaatcaatttaaaaataaataatgataaaaacccataaaattaacttcaaatttaaatttaaacctacaaagataaatataagacaaactgtatgataaggttaaaatgtctcaacgtcgtgcgattaatttcgcagctgtcgtgctaggcgtacgtgtgcaactccgtatgattaatactccctctgtttttaatatcttttaagatatgtttgaatatttatcttatttagaaaatttatataattataattaattttatggcctttctttattgtcaaatgttctttaagcatgtcttaaaagtttttatatttacacgaaaattttaaataacatgaatggttaaaacgtttatcaaaaaattaaatcaacagcgacgtgtattgaaaacggaggtaatagtacgtaagaagaaataagtataaccatatatagtactccctccgtcctaaaatatttgacgccgttgactttttaaaaaatatttgactgtacgtcttatttaaaaaatttaagtaattattaattcttttcctatcatttgatttattgttaaatatatttttatgtatacatatagttttacatattttataaaagtttttgaataagatgagcggttaaacatgtttaaaaaagtcaacggcgtcaaatatttacggaaggagggagtacttgctaatataaatgattagacaagaacttcagtactgaggttagctttagatattttctttacgaacaagaaaacgaatgaagtgactagtaataagtacttgtgtgggccttgcggctgcttagcgagcccggtcatagttcaagcatgcatgacattaacatagacgcatactccctccgtccaaagcaaacctgggttttcgtgtttaattttgactgtccattttatataaattttttttataattcgtatttttattgttgttggatgataaaatatgattaatattttatgcgcgacttatctttttaattttttttaatttttttaaataagacagatggtcaaatattgggcacggaaaccagggtttgtcttttttttttggactgagggagtatataggacgtgattactgctgtacgtgcttgttcagttcacgtctaagtcaaaatttgtacatacagctttcttcttttcatttcgcttttaacttcagactatgcttgcacggctgcttgtttttgttcttcctgctattaaatacttcatccgtcccaaaataattttatttttcatcaacttacttgtctcaaaataaaatcaatcctaaaacaaccattgtattaaagtttatagaagtgaaggacaaatacattatgatgtgttaattaaagtgaagaaaaagtacatcaggatttgtagttaaagtggatgacattttaatccttttgcttttgtgttgtattggtattgtttgtgatgagtgaaaatgaaattattttgagctaaaaagtagtactactatcagccaactttgactggcctttcgggtaaaagataaaaaaaaaagacaaatacggacaaaggtccatcagagtgagtcttggcgcaacatcctggtagcacaacacatgcatgcatcatttcattttcatggctgcgatgatacccaattgcagttaccgtacgacataacggaagaaaagatcgagaaaaactaaagaaccatcaatgtcgggagtacacgatagctatagctagcaaggccaacctgcaactttagcgtgctaactactccttaaagaggtacgtgccttctaatattcaaaacaaattaactttaaaactgtaaactgcatgattatataaactaggaaggttctacgcggctactttatttatttaatgttggttgaatttttattacaaatatttatgtggttgatttttcctcttgaaatattaattcattaactctattctaaacatgttttcacccataatttgtttggggctaatttgtatgttggttatttcatcaataatttgtttggggttaatttgtatgttggttatgaatttcctgtagttacttttgcaaaaaaaaatttctaaattaaattattgtgtcacaacaattgagttggttactacttcctccgtcccagaatataagcatttttagcatagtaacaagttaaacattttttactttggccattaataacaaaaaaaatcaatcatgtaaaatcgatgttattagatttatcattacaaactattataatatgcaactctttttatttaaaacatcttatttttatagatattgttggttaaagtagcatctcggatactatgtaaggaactaaaaaatacttatattttgagacggagggagtataaaactatcatttgtgcttatgtgtatatctttttttgaatatttagcatatcttaattctagagtttctgacttagtaacatttttttttgtctttatggactttaggagatattaattgaagataatttctgttgaaaaattttataaataggaaaatttcatctaattaaaaacaaacttctatttacttatattctctcctttttatatgctttcttattttctttgaaaaaaatgaatttaaacagaaataagaccaaagtttaagtgtagatatatcacttcaaaatgtttcatcttcatagactacagtacacgtttgttagggatcgattattattatagtattattttattgcatgaattctcatatataaatacaatatgatttgtgttccctaattaagcaaacttagtgtggaatactacatatcttgcctatttaatagaaatcatggaggaacaaacatgacgtgtactccctatgttcttttacttattatttagtacattaatatcagtttggtatgctttgtgttccctaattaaccaagcttagtatgaaatactcacgtaccatgcatatttaatagaaaccaaagagggaaaaacatgatgtgtacttgccctttgttcttttatttattatttaacacattaatatagcctccaaaatatagaacttatacatggtgttaaatagtaatggtactttaggttaaccccgtatgggccgagtagactggaccctactgttgatgtgaaaacacgtggcctgagagatctgcttaactccagtataggtccaaaacttgtctttgggtatgctagcgtgccagttgatttgattctacaatcaacaagaaacaaagacaaagaaaccgcggttaaatccataaacgatagccaatcggctagatgccgatgacatatcatttatctttgagccgatatcatatatgcatcgatcgacaatcgttgataagtaagaaagaactaaatctactcgatcggctgtagatattaacgatatatagtccgtatatcgatatatacttaaatcaagtgattgggatagatcggtcgccatgccgagacaatataaatcatttagatcgaaatatatattaataatgagactatatatatttatagcatagccgatcagatagatctagcatgtatcggctaatacttcgataccactctatattgagatattgaaacaagtagaatatatcaaacaagggcctaatatacttaagtgcaacaagatcttaacataaagggcagatttaacatgtcaatcgagcatataagataaatgtagttaaattagataagatcggctgaaaccccgatactaccctaatcagcaaccaagaagcaggctagagattgagattctaatcaggactcataagatcaaactcaactgatgcagctataagtatgaaaagaaaaacaatatctagacaatcaagtcgttgtaagtatcatagagtggtggatatcctatataatctaggtcaacatcgatgtttaacctaatcggttgccctctactggcagatgttagccgattgtgggttagacaacgatattgccggagattatataagatatatgataactcaacgaattacataaacaagattagagtatcataaagatggaagcactaatcccgagaacgcaagccaccgtaacaagttttacctcttgttgaagatcgaaaccgatgcagttcaacccaaaagcaagaactcgtcgaaacaaaacgaaagtaaaagggtggcgatgcgccgagattgtattgaacgtgtgttagtttgactacatggggctcggggtctatttatacccgacaattacagaatatgtccatatcggacacgattcttatctctaacaaactctaagataccataagtctttgaggcagacttttgcctaaacatttttctaagaaaattacataaaatatcctaattaatagatacaattgccttctcaggattctatccatgcgtggcaatcatcatgaaacacatcaaactaaaccgacaacatatgccgcttcatattgtcggattcggctcaatcggctaacctcgtccaactcgaactctgccgatcttagtcgtagccgattcggacttcagccgatccttactctgtttctgggacgattccatctcgaattccatctcggtttcttcttcaccttcgatacttagattaccaaatttggttgttaacacctacatggtaagcatacttatatgatgatataatccatattcctagttttttcatgatttttcataattctcgtataccatgcaaagtgtcaagctaagataggacatgttacttgttcacattataaatctaatttggttttctttaaaaaaaattctaatttagtcgtgcatatttgtgaatttataatgtgtatatagcgatatactatatattatcatctttttcataattttgacgtctgtttggattgcatgaaaaaaaataggacctaaaatagtaatatagtcgtgaatatttgtgagctaataaaaaacttttgaaaaaaaatgtactacttgtatagttttggaacccattaatttagtatagctatgattaagaagtcgtcactagattgaacccacatcatctctcttttctttgacatcgatgatgcttttgctatttagattatcacgtgatctttctagcctacgtgagtcttctaattaaggttcaactaaaataactccaaacaagttgtactaataaaacttatactcatatccctatataagtgatacgctatggccgggcctcctttgtttgagattatgatagcttataaaaaaaggggcgaggtcaaaacaaatagatttgtttttttatgaaaatcgatgcacaatggcgacacgaatttaacgtgaaaaacccttgcgataaaaaagccacgggcaccgatcgggaaattatcaatataggggagttggatacaaacgcatggaatatattgggctatcacaccctccctgtacggcttacaagggatatatataggagaaagtaggagtcccaatagagtaataggaaactaatcctataataaaaagttctattagaaaactaatccgaatatattgtgggcccaaaattcggataacatatttaacaatctccaccttgatacgaatttcccttatatcataaaaatcttcaatctccaaacaacctcgtgatgataaaatcaatgtgcgccaaatagtcacttggactataattcataacacccttgatccagatgaggtagaccatgcttcaaactcgccattggaaatatataactcctgaatctgttggtataagcctgtgtgcaccaaacatatacgcgaaaactgatgcacaaccaaactcgtcatgggcataaaatcctgaatctgctgcatgaatttatgtaatcctagcagaaatgcgaaactcttgcgctcaaaatgaaatacttagatctccttattaaccttctggtacactgggcaaacggaagtagcaattccgccggaaattttaccacacacacgtgatctggacatgaaccttctggttccctctcgacgacttcgcttgtatgtcctgaaactgatagactggtgtacgatggtattagtttctcctcctcgcggtaaataccccactttaaaacatcacttgccataattagaatattgcatctcaattcacgagcgatagatcaaacctcaaactcgccttgggaataaaatcctgaatccgttggtataatttgtggaaccttagcagaaacgcgaaacactctgggtgtataaaacgaattatttaatctccatagaaaacctcctggtaaactggcgtgtgagcgtagcaaaaactgaacttgaatttattcccctgaacagaaccgaagtaatgcagatgaattgatccctgtatgaaggacgtatgcacgcagcgaaaaaccaacgtgaattttaattcacgtgaacagggagtcaggtccctcacttgccccctactttttctcgatatgcgtgcactaagatgatcatcgatggcttcaaccctgatgatgccctgcttttttttcacatcgagacccgtgtgcagcttttcctctccctgacgcatgcgctagctgctgcagagatgagaacgacgtgatgcaacttcgcgcgacgaacgcgatggcagccggacagcaaatgatctcaccgaacaggtcgaaattgaattgtcgaggacgatgaacagatcggccgacggctgcgtgaacagatcgcatctccaatgtttttgatatgacttgttatatagtaaaattgatgtacaatatagacacgtatttaacatgaaaaatccttacggaaaaaaattacggacgctgaccggcaatgatcaatataaagaagttggatagaaatgcaggagacactttgggttgtcgcaccctcctgtatgcggtgtacagggatatatataggagaaaactacagtagaagtcctgatagaaaaaactcgaagtcctaataagaaactaatcctataatacaaagtcgtattagaaaactaatctgaatcaattttgctatatatttatcaacaaattttctcccaaaaatttgacagatgtaattacagtacaatagtagtgtaattacactgtaacttatatataaatttcaaaaatctacctgtaacatgttatttcggtaaaatgaaggtcatgggaacaaatcctctcacatatatatgtgtgtgctgtgattttttatcttcctcaccagaacaaatcttgtaatagatctaacgattcaaaattatgtgaaacttacatacaagttacacagtatttacatgtaggttacaatgtaattaaactacgattgtactataattacatctgtcaaatttttagaagaaaatttgttgacaaatgtataggtgatctcaatccgaatatatcgtgggcctaaaattcggatcacatatttaacaattttttatttgccttttattttttaaatcataaactactcttgtgctatcaagttaaagactaggtttaagtaattttttaaagcttttgtggattagagttgagactttatgtttaaacttgaggacacccgcttatctctactattataaaaataaaatatgtttttactagtattttagtacgtcattcttgtttgcggttttaagtttgttcgcttttggaaatacatatccgtgtttgaatcagattttaaattcatttgcttttggaaatacgaaaggagttgtataagaaatcttttttaaaaaaacttgcataactaatttgagttgaaaatcggactcataattgcagctcatgattattaaaaaaaatatccaagcgaattcccataatgaatttcacaatagctaaaccgtatagcaataataagattgaaatagcattaattcacccgttgcaatgcacgggtatcttttctattaaaccataaaaatcaaaaaatcaacttaaaactctatgccaatataatgatctaaacccaaacaaaaatagccaactaattaatttttttaatgaaaagaaaaggagcgtctttatagtccagcacatagtaccgctcggtaccggtacgcatcgagccgttcattccggcatgggtaggatcgggagagaaaaatgtgctcggtatcgttccacagccgcgcgtgcgtggtgcgcccccaatccttcatcccccgacgcgtgcgccctgtccggcatggactccgcctccgccgtttagatcgaagtctcggcgctagaggaagaacatggcaacggcggcagaggaaaacggtagcggcgtaagtgggacatggcggcggtggcagaggaaaacggcgacggcggcagcagcggaagaggaacacgacggcagcggcagaggaagaggaacacggcagcggcggcggcggcggtagaggaaaacgaacacagcggcggcgaaaagcaaccagcgctggtgcaaccaaaattctagggttcgagctagctaaccatcaactcttcccgatccatccctccagaaccatccatcgcacgcaaagttactcttttacccttctaactctcttctctctgcggtgctgtctcagggacaattttgatacctcgtggtaccacgcaataccagctgttggatctgaccagatccaacggctagcatttggtaccgcacggtacagctggaccgtaaaaaaactcaaagaaaaattaaatccgccacatgcatgcatgtatgaggttcgatcgtatgctaggtgacccgtaggccatagctacacgggtcctagaggggtgctcgtctataaatagagaagatgggagaggtactgaccatatccaattagtagcaagctactctaattgacaacttctgtaaactagcggtcgcgaacgagctcgatcaaccaacgataacatgtctgggagcagtgttctcgcgacggaggtgcttgctgttaatggaggctcctcgccgttggctgccgctgccgtcgtcaccacaggcccattgttgcaaggttttgcgccgtccgtgtggggcgacttcttcatcacctacgccccttccaactcacaggcatgcagattaaacagtactgtgcatatatatatatacttaggtcttatttaaggagcttctagcatctgcagtttgtatcataatcttcaactctcttaaatattctcgtcctactttatagaatccagaaaataaggtacaaaccaaaaccagggtttacctggaaaaccatttttacggttcctcgtaagctaactattacacagatcgaccagctgcttatcagaaatgggcagccttagacacaaatagtgaaatagaaccatacacacacatgcataccgtatttatttacgtgtgtgtgctttgcttaattgtacagggcaggggcttaaattaattatctgtgtactctcgatcatgtgcgtgtggtgcagaggtcagaggagtgcaggagagaacgagcggaagctctaaaggggcaagtgcgccgcaagctgttgaaggccacgagccgcatcagcagcgtggccgagacggtggtgctagtcgacacgctggaacgcctcggcatagacaaccacttccgccacgagatcgcggcgatgctacaccgtgtgcacagcgaggagcacggcggcggcggcggtgctgccggctccgatgtcgccgacgacgaccttcacgttacttccctccgattccggctgcttcgccagcacggcttggggatatctgcaggtacagttaggctgtgttctttcccctgttttcccaacccatcactcccgttttacgcgtgcacgttttttaaactgctaaacggcgtgatttatgcaaaaactttctatatgaaagttgcttaaaaaattatattaatccatttttttaaaaaaataattaatacttaattaatcatgcaataaaataaactttgttttgcgtgtcagggacaacccctcctccgaacacagccttagggtggtaatggacccaacattttgacctacaaaatgtgaggtcaaaatgagtctaaaatgagttgggctaaaatttagtagttttttatgctaaaaatatttaagagttgagatgggttgtgaaaaaacccacgagtcttgaccccacccctaggtaatcatatctgcgtatcttcataattgaaaactgattaattaaacatttcaaggcaactcccacgtaaaaacattgattaggtggataatgtaggtgggaatttaaatttagtttttttcccaaaattgattggtagtttttgttaatatatttcgaaaaaattgaaatacatttttttaaatacgtttactaattatattttggaaaactaaagctggctcttagtttttatatatttgtaaatatataaaaaaataacatgatccccaccaaaatactttgaataataacatgatccccaccaaaatactttgaataacatgatccccacttcaaaatttatttaacactctattaatatttaatgctaaaatttaaaatttagtaattagctagttatgagactaaattttgtaagagttggaattttattaatttaattctaaattttaagattaatactagtagttagacagagagttactttttttttgcaattcaaaaaactacccgtgtattcaacatattattgaacttatactacctaaaattatatcgataataatacagctaccgcaaagcacaggttaacgactagctggtatatatctaatttgaactctgaatatataaatatacacacacatacattttactggtctgctcacaacaaaatatgtacattttactgatagaaaatattaattcatgcattgcaaaagatgtgttcgacaagttcagagacaacgggggcagtttcagagcaagcctaagcagtgacacgaggggtcttctaagtctgtacaacgcggctcacctggccatgcccggcgaggaggtgctcgacgacgccatcgcgttctcgaggcgccacctacggtccatgaaaaccgcaggcaagctgaggtcgccgatggccgagcaggtctcccgcgccctcgacatccctctcccgcggacgcccaggcggctggaggcgatgcgctacatccacgagtacggcgatgagccgggttttgacggcgtggtgctggagctcgcgaggctggactttgagctcgtgaagtctcttcacctaagggagctcaaggccctcaccctgtaagttttcacgttttcgcttcctgtgatctcagctgcttacttaaatatccctgctaaagaagtacaactatttttttcttcatatagctagcaagctgttgtttgtgttttccgttaattgactgacagcctactctcaaatatatatgtacccctctctgttgtgaactccattttgtctaaattaatatttgactgcacctttgccccgtctagctagctaaaaacaattaaattttcagcttttctgtttatcagccatggttttcttttcttatttatctgtcacctggagtagcttgcaaattgcttatcctaaacttgcagaattcacaagttacaacttgaagtatgtcgcattagaccaacttaagctagtttcgtttcgttcgtatatttttttttggattactctagatatgtttttatgctttattttgccttctcttgtattggcatgtgtcaacatcaatgtataacttccaattccatgatagagcatagcttgctttgccactattgaaaaaatagctagcgatactgttgttagatgttgttctaatgaatgagaaaaaaaatcaaccattttggcaaataagtgtcccaaacttttccagtataaacaaatggattcaagcatggtcaattgattggtacatacaggtggtggaaagacttttacgacaatgtaaagctgagctacacccgagaccgtatagcagaggtcttcttctgggttagcggagtgtactacgaggagaaatactctcgcgcacgtattatgcttgctaaggttttcggattgataaccctaatggatgacacttatgatgtccaagacaccttggacgagtgttgtaggttcaatgaaacaatacagaggtagaaattagtaatgacctatttgtttattttgtcaaaatgaactatctgagctgagctaactactcaatccttataaatatgcagatgggacaacggagcagtttctattctaccagaatatatgcatgcatattacataaagttgctaagcaactttgacgagatggagaatagcttagaaccaaatgagaaacaccgtgtgtcttacgccataactatggtaaaatctttttacatatactgacgtatttttagcttgcctgtaaaaggaaaggggtgtccatgaaaatattttttatagtgatccagagtcaagatacttaaatatagaactagtcaattattaagagaagaagatacaccctagataatatagagagtatcgatcgatctattatgagaggagcaccgaatcatatataacttctaattataaatttagaatgaaactggttagatacttaaatagagagtcaagatatatagatataccttagtgtatactgactttataaatttattatttgtcaagaaaagtaaaaataacactgctaattatgttgacaaaatttctgaattttaacattttttggctgtcaagcaataatcacaataatcaacaaaactattagggccagagtggtattcaatcggttggagaaaatatttttaggccatgaatatgacttgataattattaatttcatttcaaaaatttaaaattattagactataaaagcctatagttgcgactccatattcattctaactttgtatttgacaattccgaattttagaattaacttgtcaataacaaggaaaaattatgtacgtctccatgataagtagagctttgtgttcgttgttgtaaacctcaaaagtatcgaaaaatatactcccttgttgtttgttagtttagttaatgttttggatattaatgttggcgtagtcacacatgtttcatcacaatttttatccaactacggagtatatattataaaattaataaaactatagctgcatgaaagaaattttcaaataattttgacatattaatgtcattttatatatgttaagttgtaatgttttgtatgtactaaggatttaacatattgacatttgaatgcatcgtgttatatacagaacgttatattatgagacatgagccaaaaatagttgtcttatatttagaaatagagagagagtatctatttgacgaaaacatatatagttcgtagtctaaaatttgaaatataaaagtatatatacactttaccctgacgtacgttcacgtcaggtgtaattttccccaaggacacacgatcagtcaattttatttttcctcaacaagctagttactatgacgcgacattattttccttgataaataaaatatactgcagtaaaaaaaatattctattcacaataaacagagttcaaataacttatattatcttcatatgcctgcatacatgtacagtacaagcagttgtctgaatactacctccaggaggcccgatggtcgagccacaggtacctgccgagcttcgcggagcacctgtacgtgtccagcatctcgtcgggcatcccggcgctggcaccggcggtgctgatgggcgtgcacgacggtgacggcgtggcgaccaaggaggcgttggagtgggcgtgcgccatcccggacctgctcctcgccagcggcgaggtgggccgcctcctcaacgacatcgccgcctggaaggtggggaagaacaggaaggacgtgcgagcctcgtggagacctacatgacggagcacggcgcgggcggggacgcggccgtggcggcggtggcggctgcgtcggagcgcgcgtggaggcggatcaaccgcgcgtgcgtggaggcggtagaacccgcgctgctgccggccgcgcagctgctggtgaacctgacgagcaccatggaggtggtgtacctcggcggcaaggacggctacacctccggctccgggctcaagggggtcatcaccgatctcttactcggcccagtccatgacgattaggcacaacgtaatatataccctctccatttaaaaaaaaaccaatatagtacactaaaggtgataattcataataaaacaaatctaaacagaaggttatttagatttgttgtgttagaaaatatcacatctaataaattttttttttgggatagagggagtagttatttacgtgatcgacaacttgctacacgtatgtactacctagctacttcttgtgtctttaaaaaatatccaattctctttgagagagagagagagactagctcttacatagtacaaatggatgtgtacttacatactatgcgataaaacctagttaaatcgctagcatatgcttatgatagggatagtatacttgtcttccataagaaattgtcatacatggttgtgcattatgcatgccgtatatgtgtgttggcagaatccagcaagttagctctcagtctacctgtgtgtgtagtatgtgcgtgttttttttttcaaaactcggtgaactttatttgataggaaggttattacatgagtgatggaaacatctcccaaggggagattagacaggtagcctaacgtgggacaactgctagctagtatgccactatatatgaagatggattctaatctctcaggtggacgtccacccgtttcttacatgtcaactaaatgattaagaaaaaattacaagatagattaatatataatatatcacttcataaacatgtaagtttaaattcgacttctacaagttgtaataaaaatatcaaattaaactctaactagtatacgtatatgaagatggattttaatctatcgggacacaaattttggtatatctagataatagtattttgagatacctcaacagaaaacctagacaacagtatctcattggaacgggataccttttatgagatagtacctgatacctgttgtggtaccagctgtatggtacccgatacctgtgatacctgttactcggtacctgtgatacttaggacctgatacatgtcatactcatgcaagagaatagttaatatgccttatcccgttgcaacgggatcccgttctgtagcatccctcatacctcaaatactttctcaaagtacggtaaatttctcgtttctaacataagcatacataaaacaactgattacatgtacgtacatatatagtatataacatatatatgctggacaggaacgcgtacgtctatgattgctgtgcctgattaaacgcgaagggggtcgaggaagagggcggtgacgagacccttgaggtcggcgccgacggtgtagccgtccctgccgccgaagtagatgacctccggtgtcgtcgcaaggttcaccaacagccgcgccgccggcagcaggttgggatccatctcgacgcacgccctgttgatcgtcctccacgcgctctccaccagcgcggccaccgccgccacggcctcctccccgcccacgccgcgctccgccatgtagcactcgatcgtgctcgccgcgtccttgccgctcttcccggtcttgtaggaggcgatgtcgttgaggaagcgggtgacctcgccgccggcgcggaccaagctgggcgcccactcggatgcctccatggacgccgccgcaccgtcgccgtcgcgtgcgcacaatagcaccaccacagccattgttgggtagccaattgacatgaaagacacgtccagatgctcggcgaagctgggcatgtgcttgtcgctcgaccattgggcctcacggaggtagtattctgactgctgcttgaactgtacatacatatattcgtgtgtaggaaaatcaatcaaaatgtgtgggtgaacgcatgaatatatcacttttactcttttagtatgtctatgttttttgccgagaaagattttaccgaagatttcacgtaagacatgcggtgcttctcatctggctccaagctgtcctccatctcatcaaagtcattgagaatccttatgtaaaagttgcgcaggtattctggtagaatagaaaccgcactcttgtcccatctacatgtgtagaaggatatattaattagactaatcagacgaggtagctacgctcgttggcaaattgataacttattactacttcagtttgacgttttaagatgttttggattttaaatatatttatacatagatctatgtacgtgcttaatatatgtgtttaaatttatatagatattaataaacctacataagagatgaatagaacaaaacgtcttataatataaagagatggaatagttaatttctacctctgtacagcttcgttaaacttataacactcctccaaggtggcgtggatatcatagatgtcatccgtcatggtcataagttgaaacaccttagcaaatatgattcgcgcacgagagtagtcctccccgtggaacatggcacaggtccaaaagtaagactctactaggcaatctcgagcgtagcttagctgcacgctgtcataaagttgtctccaccacctgccaatcatattcgcatgcatatgtagattagaaatagatcactcatgtagctagttatattaaccgtgaagttgagttgagtaattttacgatgtcctttttttaaaaatcactagcagtaatatttctactatatatcataatcttaactgtaggtgaagcagagagagcagtaaagggcagtgaggcaagaaataattttaggttctggggaataaaaagtaataggataacttaattgattacaaggagagggccttgagctccttgaggtaaagagatctgacgagctcgaagtccagcctcgcgagctctagcaccatgccgtcgtgcgccgcctcctgctcatactcggtgatgtagtgcatcgtctccagcagcttgggcgcccgcgggagagggatgtcgagggcgcgggagacctgcttggccatgggtgacctcagtgcaccttgcagggactggaggctccgtctcgagaacgcgatggcgtcatcgagtgccgcttcaccgggcatggcgaggtgcgctgcattgtataggcttagcaggccccttgcatccgtgcttaggctctctctaaaacaacccgtgctatctttgaacttgtcgaatacatctgcatgcacaaatttctagctgtaagggtgtacatactactatatatgctccagggatttatccaattaaatgaaaggtaatgttatcaccattgaaaatgtattgggaccttcaagtagtaagtataccacaaattttaatgtgtaatttaattacctcaaggtattttttcaaaaaccataaaatttctctcaaatgaatcagagaggtggagagatgtatgtgctcaaataacatttattggttttttttcagcgtattctatttttcaacagctttttgggctgctagcaacccgactaccatgaaaatgccttctaactaattcggcaattatattcattttagatcaacatctacataacaaaatatccttctagaaaacaaagatcagaatataatttaggctacctgcagatacccagaaaccgtgctggcgaagtagacgaaatctaagggattcgaggtagagctggtcaccatcgtcaaagccagcggcagctttctgctgttcatcgtggtgaaatacatgctgtaacgctgtggcaatctcgtcacggaagtggttgtctatatggaggcgttcgagcacgtccactagcatcaccgtgtagggcacatttatggtcttcaaaattttgcagcccacctgcatctttagccgatccacccgttctctcatccactcctccgacctctaaattaaacccatgagagctatagttaaagtatcaatgtattgtcaaactactaattaagctagcaagtactatgttatatatagtcaattggttacatgtctgtgagatttcacgcatccctcctacatctctaagatttgtttgatcccttatgtgccgttgagttattctaatcccttactcgtccactccattagttacatgttagtgtgtgttttttacgaaacgaccttatttccattggcatattactaaaaaatcagtaatgttctatgtaggaattatttgcattgtgaaaaaaagtaagggataaattaccgaatatgtagtttccaaattcaaaaatttgtaaagtaatttcattcagatttcaaaaaaaaatgagtaaaatacacggccggtccttaaagttgagcgcgggtgtcacttaggtccataatcttgtaaattgcacatttaggtccaccatcttgtttaagtgactcattcaggtccaaaggacctctgaccggattgactgacttacgtggcggtccagcgtggcaacatatttacattttgtcccccatttttcttcctgtcttcctaaatctctctctctctctctctgatgcaggttggcaagtgcgcacggcgaggcgtcggtggcgaccggcgaattgctacgcggaggggcgggcggcgcatggggacggccccgctgccctcccacgcggcgtcgccgactctgcccttccgctccgagcctccgagactccatcgctgccatcgcgcccgagctcgtcattgtcgtcttcaacctgggtgtgcagaggatggcgttggcagcacgagagaggaggcgtcggtgggggacgggagaggaggcatcgttggcgagcggcgagagaggaggcgtcggtggcaggcggcgagagaggaggcgtcggtggcagggagatccggtggccgccgtcggcgccggcgacgtgcgccgggtgctgcgcctctccgccatgcctgcctcgccgacgcttccgcctctccgccatggccaccgccgtgcgcgccgactgccggcccgcccccgcacttgcccaccgccgcccgcggccgtggtgcacgaagaggaagggggtggccggtggtgagcgtgtgtggagaaggagggggtggccagtggcgaacgcgtgcggagagggaggaggcggagaggcgttttgctcggcctagtcgtttcccgtgcaccaccgctgctgccactcgcacgtgtgtcatgctagtatgccgcttgctactggcgctcgcgacgccgtcggtagcggcggcggcgcggcatgactatggcgaaggatttggggatatttgtgctgtccatggcgctactgttgcggaggggtttgtttgcaaaattgatgcttgcgtggcgtgccacgtcgacggtcagagttggtcaagtggggtttggacctcaacgagtcacttaaacaagatggtggatctagatttgcaatttacaagattattgacctaagtgacacccgcgctcaactttaaggaccggccatgtattttactcaaaatgagtttatgaaactttgcatcgaatttgaaatgtaattttgtgaatgaatatgcagtttgaaaattgtcgattttctcataaccatgtactgtctcggtttcaatttacctatcattccagcaaatctcatactaaactaggaggtgtgctaaattacattgctatccattaattagtacatcttgatcatcttttccaaagcaaggagaaaatatttttatggacagtcccagctccaccttccatctcagcaagtttctatggaattaaaaatgctatcatgtaagaaaaaaataacttgacaagagagttaatgaagataaaaaaaaaatgaaaaacacgttgctcaaggaagaaaccagctctacgtagaaattaagaacgaagacaagaggatatggagatgatcgaaaggagatagaaaagacgtgactggatgagaatttattttccacccactcggtatatagtttttatatttagtgtctatatattatgattatgattatgattatgattatgattatagtgtggatgggaactatctaatagttttgattaggatttccggcaatgagaagtactagtattagtacgaacgtattgatgaagggtaagaaggatacgcatctctaagaatgctttggaatatgagaacaagaagtatatattttgacgtaaatttaagctggtattcacctaattctgtcattattatcacttcatgattttttttaaaacttgtttaatatttaatttcttgtttttcttataaagtgcacaatttgaaaatttttaattgtattttagccattcatatcttttttcaaaaactgaaaattgttttttacttagagcggttttcgtcctgtaatacataaattagggcaatatgattattttaggaaaaaaataatgatcaactgaaaaaatgaacgtgtagggattgatatatagaaactctatggtatcttatatgtctataaaattcatttctactaagtgtagtataagtgtatagtataagtgtagtgtatgttatttttataagcaattttacagtcattgaggaggtactatgagataccaaattttatactaattttttgtacctcatagtaactaagtaccgatcaactgaaaaaatgaacgtgtagggattgatatatagaaactctatggtatcttatatgtctataaaattcatttctactaagtgtagtataagtgtagtgtatgttatttttatgaacaattttacggtcattgagtaagtaacaagagttaccaaatttataatagaaaaagtggtacctcatggtaccttctcaaggactataaaatttttatcctctcattaagtcacattatctcaattatttctagcccttggataattgatcaatggtctaaacctccttttcttttcttataaagtcatatcactttagttttgtctttggataattaatccatattatctctcttctttttcttctcttactgagccgcatcacatttgttttgcgtttaaatgatcaatctatatatgatttaaattagtacaaatcacatcatcttaattgtttatatatagcttcgataaaagatgaaaattatataaagtatataaagttatgttatctagctatatatcttcatctcaactgtttatagtctttcattcaaatagtcgatcaaagatgaaaattatataaagttatatcattaaaatatcttgcatgttattatacaaaacttccgtatcaaccgcgcggggtttcatctagtatattataaaagggatgagccaaaactcaaaagacatcgaaggggtaactaaatatttttttggtgcattcagagaatatctgatctctatatcatatacatatatgtgtgtaacaatatactagtatattgtttaataataataattaattaatttgcatgcctgtggtttgggaggaatgtaagtgacgaagaagtcgccccacacggacggcgaacaagctcggccggtggtggcagcggcagccggctgcgtcatggtgccacctttaacagcgagcaccttcgtatcgagaacactaatcaccttgctcccagacatgtcccggtctaagctacctagtaattaagttacagaggaggctgtgaccttgctacttgggtagtggatggtctatctctcatggtctctatttataaacaaccaccctccccggatgacgattattgggtcacctcacctaacctaatttttctattaaaagaaggtgacctttctgtttgattaattttgtagtactatctccccatttaatacttacctcattgttttgatgcgctattctagcttatctttgacccctaataactttaaaatgcaatggctagactataacgaacggaaccttgtttaggatgcaatattctttaatattattataacatctttttaaagcatttatatagcgtttttgaaaagaaaaaaaaagagacgagtggtcaatttgagaaccaagggagttttacagaaactttaattttttgttgtagtggtcgtacaggaagcaactgacaaagtatcgtaaatacacatattataaccattgcaaatttaaacttatcacatatttatatatacacatttatttatttaattttcttataactatttaattaggtgacatgaaatgaaaggacatttcattggagaagaaaaattaaggagccatcttcaaacactacgtctgtatcgatcgggccacgcggcacacacccatgacccatcagaaccgtcagggatgtatgtgtcactctgtccatgctaaaattagatgtttggttgaaattagaacgatgtgatggaaaaattaaaagtttatgtgagtagaaaattttgatataatgaaaaaagttaaaagttttaaaaaaaatttaggatctaaacacaaacacggtgtcacttgatttctcgtaatatctcctcactcagcgctagcgtcgaggcctatgtatcatacatcagcctatttacgagccttcgttattacatgcatccgccgttccaccgtcagctactgactacccggcggcggcggccgccggcggctagtgaaaaatatttttgattgttttttttttgctactgtagcgtttaatcacgtgcattcaaaacttagatccaacggatataaaatgcccaacggcatggtactgtagctcaactggaacggcggaggatgcgaagcccagaagatcttccaaatatgtcttaagactgtccgagagggaaggaaaagagaagattgaaagtaaggtaagctattaatacgtgattaattaagtattaattattttaaacttaaaaataaattaatatgattttttaaaacaactttctaatatattgtttttttagattgtttttttcaaaaaaaaacataccgtttaatgatttgagaagcttgcacatgaaaaaggaaatattttctcactatccgttccttccttagaatgcagcctaagttaggaattattaaataccctgagttttgaattaatgggtttaagtaaatattagaacaaacacgtaaaagtttaatttttaaaccgttgtttgaatatgcgatcaataactgtggatacgtagagctcgccgagtagtgcaaaatagactataatttataatttatagtaattgtagtccgaatgaattcctgcggattgaatcgacgtggactgattgatctcctttctaatctcttatatatacctacagacaaaaaaaaatggaaaaaaaaaagaaagatcgagagcctctcaagccctagccgccatcaccccaatcgttgctgcgccaccatcacgctgctgccctcgttgctgcctctgttgccggtcgccatcgctggtactccttcctgtcagcctgctcctacgtaccctggtggtggctgattggagcagcaggtttgattttgttttctcgattggacttttgctgttgtgtgttggactccaattcctgctgctgctaaggctgctgttgcccctgtgctggtgttccttgctgctgctggtctgccgaacatagaggagggttagaaggcagagaagaaggaagcagggagagaaggagaaattagatagaagaagggaaatttggggaatttggttgatattttcaaattcattgttttttttacaaattagtactgctaggtacttcgttttagcccctagttgtttctaatttatatataagaggatctgttttcggtagctcgaatttaatttatcggccgctaggctgaaaccatattttcaaatatggtattaaaccatcgggattcagattgattgtcctaaataaagtttgtattcatcgtcgatatctttccaacggcgctggtttcactcaattccgataaacggtttgggagaaacagcaaaaacaatactgctgaccaggtctagaaatcaagacagcaattcgttttacttaagctaggatttacagaggcataatctgatttttggcccaacatgaaagttgtagattattttctgtaaatgcttgaagtgctattatttactagattccgttagatggtttgcgagttacgtataaaacagtaatggaactgctataggttatttaatacaaatcggtaaaagtttatatgttattggtttcgattttagtaaatatcctttgtaactattattagttgaatatagtggtttatttatagttttgctccatgggtgtggagagatctggtgtggagggtggttcatcgcattaccgtcaaggttaaaggcaagtgcatgacgaactaagtgtataattcatggattgtttgttctatctatttatttccgatatatttctatgtgataagtgactgtttatgttcagattgttgttcacactatttagatttcgagttcatcttatatttacgatgttattcttgtttcaatatttcggattctggttctggttaaataattcaagttccatgcttgatatggatgtgcaatatgtttttaatttggttctttgttttcgacttcaattattcatgttccatgcgagcatggatgtgctatctggttttctattcatgttcctgtggataagcgttgatcacgcttactcggctttgccgacaaatgctagaatatgttcactattgtctgggatgaaaactattatttcaattcatacctgcccgagatgggaactactatcttttttgacttggtgtttgaaaatgtctttcttatcaaaaaaaaagaaagctttctgtttatgctttattatcaatgatgtgtatatgtgttttctagttccatattatacttgctgaatattttcgtactcactcttgtatttattcggttttaggtacacattaaggtcgggtatgcatgagcgggaagtagcacccttgtatacatacctatgtgcacactatcaaactataatgtttaggtccataataatacttagaccatatcttggtttggttttctaataatccagatacctattagtttctttccatgggttatatggatgaatcacattgtggaaatgatattattattagttcaatttataattgtttgtcgtggatatctatatttataaaggagaatctgccgaaatttctaataattttgggagttagtgattttaagtgtattttggtgtgacactctatgtacttgattttaagtgtattttgatgtgacactctaggtacgtggttatttggggtgttacaaattaagaaggatttaaaagtaagcagtatcgtctaacactgcaggagataattggatcggagggctgaacaatttcgtcttgtataagcagagttcagcatcatggaatgccaaaataattcgtgggagatagaaaaaagacaaaatttactacatgaaacccaaagtttacgttttttttttcggagaacacaagaacgcatttctgctagttgaatcagaaaacaataataattagttggtggacacctattgtattattttattatatctgaaaaaaaaacagataaacattagttaaataaaaatttacccataggctcgagctcacttgcgaatcccacatgtcctccctatctctcttcgtcttcttcctcatggtgctgcctttctcgtgcgtgctagacccgttaaacgatcgtcttcgtcctagcttgtcctccgctggcgtacgtgtgcaactctgtatgattaatactatcttcgttataaaatataataggagtaacttttagctataaatctgaatagacagttgttcagatttataaccaaaaatgcttatattttggaattgagggagtagtatgtaataagaaattattagataagaacttcagtactgaggttagctttagatatatattttttacgaacaagaaaacgacttcagtgactaataagtagaattaggtaagcctaattgttccagcggacgtgacgtccaggcgaaaaaaggacgacctactttgtgtgggccttgtggccttgtctactttccttcaaattttcaatttttccatcacatcacatgtttagacatatgcatggagtattaaatgtgaacgaaaaaaaccaattgcacagtttgcatgtaaattgcgagacgaatcttttaagcctaattacaccatgatttgacaatgtggtgctacagtaaatatttgctaatgacggattaattaggcttaatagatttgtctcgcactttacaggcagaatctgtaatttgttttattattagtctacatttaatacttgaaatgtgtgtatatatacgttaaaatgtttttatcaaaacaactaaacatggccataatccaaacatgcatgacattaacatagacaccggtcctaggacgagattgctgctgtacgtagtcgatcaggtgacgtgcaagtcaaaatttgtattgtactcagtataagaagtttccagagttgaacataatttatctatctatctattatatactaaaagtctattaaactcttttaaaatactcttaaaccgccatgtgacatctcaaaacgttctcaagctaccacatatcattttaataaaataaaaaaaatcctaaaaaatttgattaaaaagaaaaatatctagccctctgttttcatttaaattgttggtccattatctcagaccattagattagatatactgatctctttgtgaaaaaaaaatctggattggaaggggtaatagatgaagttctagctttgtgggcaagactgtcagcatgcttatttgcttgtgttggtaatcatctgatggtgggccgcttcgttgtgccggccggcgtctgtccccttgcgccgtcgagtaggccgaatttcttctctcggcctatgaaccaaagaccatcttccctcctcccattctagccggccgtggaataagtccacgtgtgcccttggccccacttgtcagtgacacgcaaagaatatacttttcaagaaaatcaataaatcatttctcattgtttcaaaaaaaatcaattaatcttagaaaatccatctcttgttttgtagcttcaattgactttgttccacttccagtagttagtctaaatatgatcattttcatgcgttggtttttgtttgtttgtcatgctttgtcgaaaattagttaagctcaagatcccgaggaacgcaagtcgcctttgaaatctattgggggtcgtttggcaaacgtggacacttacgggccgtttggaatctattaggggatctcgagtagcggcgggagaggaggccggcggacaaggggtatctttggggaggtttctaggggctcagggagggtgggggcgagagagatcgacgggagaacggccgatggcggcaccgtgaggcgcgcaatggcggcggaagggagtacgtggaacggagagaggacggcatccttggcactgctttggggagggaaggggaggtctcgagggaggcggtggtgaggggattcgccgagaacgaggccaacggtcacgcacgaccgggcgcggcgttcggcgaaaaccggagcagcggcgagggaacgtgctcaggagctatccttgagcctccagagggcatagacctagggatatgggaatggggtgctcactggcgacaaggagcggcttcggagcgggtggcccggtggaagaaggncggccaggtttcagggatgaagattccgggtccggcatcgcgtcaaaaagcgcggcgcgcgcgatgcgtggacagcagagcccggtggcatctacgcgaatcagcggctatagagcagtcgctacggcagggcaggctggcgcggtgacgccgggctcccttccgatcagccatgacgggagcgcgcccgggaacggcaagcggcacggccaaaatagaatggcgatgacggcgcggccaaaatcgaatgacgacgaaggcgccttcctccccgtacatgcgtggcgcgtgggaggcggggttggacaggatcgagggagtggaggcggcccaggcggtagggggttgggttgggttcagagaaaaggaagggaggtgatgtaaaatgattttaatctttttttaggaattcttttaggaattttgaggagcatttgatgtgggatttgaattaaaattttatatttgaactcagagaattagagaggagtcaaggaaaataaatatggtgtgagtttgatattttcgggataagtttgtatttgaaccttcggaaagtttgagggggatttaaggggacaagaatttggatttgaaactagtttcgaatcaaaggaattactgccgggggaggatagagataaatatggtttgagttgggatcgggattcgagttttacattttaacttagtgaaatacaaggggtcaaggagagggcatcgactcgagaacgtgatattttgggatggatgtatatttggggacttgttggattattcgaaaggaattcaaaagagagaggggaaaagaggaaacttggtagcatgggttcaaggatggagtttaattggactttgcatcttggagttgaaagggatacttggagaaagggttcaaaggatagatagattggtagatagagagcgagagggggagagaggagggagggatgaaacttgagagtttgagttcgaatttgaggaatggtttgaaggaaacaaaaggcggagtttaggatttggcggtgaatcgctggatcgaattttgaagtcagatatttgacggagtttgtggatagggttttaggagagaaatccgaatatgaaaaattcgaacttccgatattatctggaacgagaattttgtggagttggttgttggcatcgatgaaggaatcaaccgatggattgaaattgagatttatggcacaacttagactctacaatcaaagaatgaaattttcgcaattagggttttcattaaattagctttttaatgccacgcgaaaaacagggtggtacacaccgccacatatgaggttcaagatagtattgttgcagtccacattgcagccttgagtattgcgatgcctagtactagacctttccactttatgtctacttaatgtagttttgttcaactttacattttgaaaggaaaaactttttgaaaggaaaaaagtgggatgctaggaaggaacttagtagtggcgtagctaggattcagagtaaaagtgatccatctatatatagtaggtcaattaaaagggtggtccactatataatttttattatattaactagtatatattgtcacctagctagctaggcctctgcattgaggggactcagtgggatgtgtaacgctctgcttctcgtgagacattaaaaactaattcggcaaaatcctaattgcgaaaatttttgttctttgtgtgagagtctaagtcgtgccatggatctcaattcaatcccgttgttccctctcatcgaaatcaaaaatcctccacctcaagatttcctatccaaaattcaagtctccgaaatcaaattccgaaagtcaatcccttcctttgaatccttgccgaatattcgctccgactaaaaaaaatatccaagtttccgttttgaatctcttccttgacttctcctcgagtctcccttgattcctccctaaaccatcgagttcgaatgtcaaatttgaattcgaatccaaaaccccaattcgaatccactccaaatcagtcttctctgcaaaagtctattttacctccctcgggtgttgtgggccgttttcccccttagcccacctccctccctcagcctcgcacgtgcgttgcacgtgccgagccgagccaagagagagctctctcgctctctctgtttctccctctatctctcgttttctctctcgcgcgccgacgccgcttcccgccgtcgccgcccaaaacccaccaccgccttcgctctttcccgcgctcgcgcgtggccgaccggccggtcgttgccgccgtcagccctgtcgcgcctgcgccacgcagccgcccggttgccgccgcgtcaagccctggcgtcgcctgcgtcgtgcactgccgctctgccgctccacgccgctagcttccaaagctaagagaggcagcccctctctcactccctctccctccttcaacttttccccgaaacagcaaggagcagagctccctttctccccctcctttttccttttgcccgaccaccatcggcgtcaccgcctgccaccgcctggactaatggcgcgaccgccggctcctccccttgaccgccctaagtcggtttcctcccccaaaaccgacttcccgcacccataaaacccaacccgagcccctccctttcctcttcgtttccttgcccaacctccaccgcaccattgttgccaccccgccctgcagtcgccctcgctgtccgtcaccgaagcaccagggagaccggtgcgtgcgtggacgcgtgacgcgggactccaggcaccctctccttccccttccccggcccgaggccggagagctcgccccgcaccgccgccgcccatcactgcgcccggctcggtagtgcctccctccgttctccttcctcgttctccctcgccctctctagcttgcatgatagctcggttagcccctcgaacgcgcgtacacgccgccccgacctccgccgctgctcggcatggccttgccgccgtcggcgcccgctcccggaggccgcctctcgtcgccggacctccacagcgcctccccaccccatccaatcccacaaacgaaacccttgagccccggagatgctcccgccgcctttaattgagtcctcgtcgcccctcggtgatttcccctttctctcgccgccggccgccgctgtcgaattccaccgccgtcgaactccctccggtgaatccgagccgttggctcgctccttctcgacgccctcgtcactccggtgtgctccccgaagaccaaatccgtcgtgcttgctccggtgaacaaggccgccgtccgcagtccatctcggcctccccttcttcctcctcctgccggcctgcgtggctgccacgtaggcgccacgtcggcgccacctcggctttgaccaagccgagccggtcagccacctcctccctccccccctccgcgcgcggtccacggtgcgccaaccggccgcgcgtgggcccgccgcatccctagtccatccggtgcacgcgcgtgaaccgcgctcacccgaaaccctagcgccgccctcatgcgccgctcccacggtgagccgcgccaccgacaagcaggccccactcgggacaccgcaaggtggactcggcccaccggccctctctctccctcactctccccgcgccccattgggacgcctctccgggccagccggcccattagttcggccgagccgtgcctctcctcttgggccgcacccaagccgcccgaggaagtctaaatcatatccctccttcaatttctttccaaaaaggttttaataaattattaaatcctttttcctttagatagaaattccttaatccttagaaatccatatcttctcaaccgctcatccgattgactccgttcaactttcaataattccgtaaaattgagatctatctaatggtactattatctagtctaaataggatctttattttgggtcttgtgtaggtttttaattgtttgcgtatagttgcggttaccggattttcgtcgatcgcgggttttcttgaagattcgtgaagcttcgtgaagacctcgagcaaggcaagtcaccctttgaccaattgctcctataattgaaaaatcattattattttgtttgcaacttgcattattagaatcacacactcaacttgcttggcctcggtttgcgtgccaaaccgacggacctacccagtagtcgcactaattcctgtaggtcgtactaccctgattccttgtcgctccgcccttgtggtacctcggtattcgtgctctctgagcgcgtataccaaatatcccacatacaccgttgtttgtcgaaaacttgggaaatgggtttgtgaagccttgaaaacccgacatatggtgtcggtgtgtttgaaaataaaatgaattgtgaaaactcgcgatgcgggggttgtacctatgtggcactgtcccgtattcacatataaggaccgattcctatgggaaactcatcgaacataatcaaagtgtaaccacaaggtggaatgggacaccctggctaagtaactagtcggttcagggaaacgtcgcatgccaatagttgggaatgccggggcggggtcaggacaaaccgggttcctggtaaggcaaggacgagaagcttgctctcttaccgatcaaggtggttggagttgatttgtgaatgcctaaaatggcctatttttatgtgaggatttgatccttctatgtggtatgaggtaaccctgggtcggcttgggaaaggctttgtcgcaaacctctgacaccggccagtgtttggagtaagtctatgtcttgagggtaaagtgtacccctctgcagaggttaactaactgttcgaacagccgtgcccacggtcatgggcggatgtgaggtggttccctttgcgtagatttgattgcctgtgctttgcgaaaagttgttgtggtttggaaatcgtaactagaatcagcctatgtggcagatggatgacctgagtggtcagaaacggatctgtgtgattcaggatgtctgcgggcatcatagactaggcttcccgagtggaagcggattgctttgctgctaggcagctggactctaggagtccgagaaaatgaaaaaggctctgggagccgcttaatcaagtgaaatggctctgggagccgagaagcaatgatctgacccgggaggtcggtacattaccaattgagttgttgaaaagcatctcttaagtcgaatcgagacgcaagtctcttttcgacccaaacctaaaaagaaataaatcacttagtggtttcaaaatggatttcaacaaaagatttacaaaacaacctcgcctctcttccaagcttgcattaaacacctaagttcccgtgacttgccgagtacgaaagtactcacccttgctctatataaataaataaataaataaataaataaatatatatatatatatatatatatatatatatatatatatatatatatatatatatatatatatatatatatatat

SEQ ID NO: 6952 - DNA, 27008 bp, Oryza sativa
tcggaatgtttgctgcttcactatagagttttaaggaaccaatgtccagagctcacgtgttataggtgcagtaaagtcggatgaaatcatgaatatctgtttcggtctagacacttttcttttaagaatggtcaccgggggcgaaatgcccacctgaatatgttacttcaaacaatcttacacagggcaggcttagcttatgcaagcgtaggtggccctggaggataatatggaagaatacacgggatatacaaagaagagaatacaaacgtatcacaacctcccccacctaacacaaagaggcacaatagatagaagacagaagctttgacgtttgccacctgcaaaatcacccaacaaaattccaaatcaagcaaatgctagaacccttgttcgacatcatccacttcacatgcagtctggaaacaccaggaatcgaaagtgtcggagggcctctccgccatacgcatgcggctcggtaccctggcagtgtgaaaggctgtggttgtcgaagaccacccgcatcatgcaatcagaataatgacttagtcatgttgctgctgggatcaatgcctgtcggcgtcctttgggggaaggaagccccaaaggagggagggccactgaaagattgaggccataggccatccgcatcaagtcatcttcaatcagtctttaacaaattgctactccctctgtcctaatatattgcaacctaggatgggataaatttatcccattctaggacaatgaatctggacataccatatatccagattcatagtcctaggatgggttgcaatatattgggacggagggagtagctagtttaacgccctccaacatccttcgggggaaggaagcgccaaagtaggaaaggccgctaaactttgcggacacattgatacactgttagtcttgatctcgtctaaaaatttaccatggtaacagatcaaacttgtactacctccgtcccaaaataagtgcagccataagtttccgcgctcaactttaatcgtccgtcttatttgaaatttttttataattagcatttttgttgttatgagatgataaaatatggatagtactttactcgtgacttatgtttttaatttttttcaaaaaaatttcaaataagacgaatgatcaaagttggacgcagaaaaccatggctacacttattttgggacggagggagtatttttcctttagaaagaagtacagtatataccttcatcttggaaatgacaaagttctcagtagtgtgtgtgtgtgtatactaatattttttcgaaacgttcgtcatgatatgattatctatgaaaatgtttctactgcattatcatatattcatatttttcctcgacatattgtactatgaggacaaacttatcagttaattgacaggctgtaaagttgtaatgcgcttcttacatttttgacagaagaagaagtgctgtcaactttgagataaaggcaaaattacgagaaaaaagactttcaagttcttttgaggatgagtgaccctggagagccttctaagcattcccaatggatgtcacactggaccaaaggaagcagcagtgcagagccccaagttggcagaagtaatgattctccggaggatgcgaaatatgacatttgcgaggacaattctgggccttcaaactttgagatcatgaaatctagattgtttgaaaggctaatggtaggaatcagccaagaaagagcttcgttggagcatggacagaagttaaattctaacatgaaagtagtggtaaaagatgctcgccgacacgctgtgcaaaaccaaattgatcagggagacgggccaattcaaaaatctgtgatgcaaaaagatgtcttatatgctaaggctgttgtatcaaaatcactttccattcagaagctttcagagttatcagtggattgtcagaaacttgcaggttcagatgacctgagttcagagtggaaccattttcctatgcttgcaatcaacagaaaaattgactccattctcaaccctaagaggaagtctgcaaagagtactggacccaatgacgtttttgtgccaaaacaaactctgaagctaaacatgactacagctaatctgatggcattctcatctcaggaatatgagctgcattctcatcgaacaaccgacgagacaatggatcactgcaaacatgcaggaggcattgtatctcgcctggaagatcatgctggtgtcatgttgaatcctgcagagcaaaaattaaaaggtcaattattgccagcaacgtcatgttcgtgtagcaaggatgacagtaactcatctgatagtctattagatgagcagcatacaagccgctacattgcagattcagatcaggaaccaacctgcagatctcgtgaaaaaaggttgaaatcttcagaaaacaatgacacgaactgtaaaattggaagttgctcccagaatcagaagtcaagagcacctggacatcataaacacaaaggttctgcgggagtcatgtttcgtacgtcagtacctggtaaagaatttgaagctgctgaaattaattgttccgacaaaattaatcagcgacatctgaatacacagagaatagtatctgcagcgaatgtcactggctcctgcatacctgatccagctgcagacatatctacagtaaatggtaggggggaggcagtgacccagccatcgagcatatctggagattcaactaaacgaaaagctccatatttatttgaaatgctaaccataccttccaaagctcaaaatatgaatcctgaagattcactgccttcaggaaactcgactgcttttggagttcacatgtacggcacaaatattggcagtcatctatttggagcaaataacaaatcatcaactgaaactgaaatattatccggcgacagtcaacatgtttcaaaatcctcagcaggtaggagagaagaagctcagataatactcatgcgacattcttttagcttatattgattaaaaggacttgtctctttccaatgttgtttgagtcgagattgatttattgggtatgaaagaaggcaataaaaaccttgaataaaatataacaattttctttattccattggtggtatcactcacagttttgttctctcttctttcaggcatcgcctcattgttggcacaaaaggtactagtgtcctatactactctcatgtttggtcgttatcatataagtttatgcaaatttactttaaaaatgtatataatattgtcggatatgcattttttttctgcaccatcaacattgttttccatatttaagattttgatcacatatataatcatattagcttggacatagcccatttttctcttcttatatcctcgcaaacaagttacttcatgctatctcatttatatgaacatgccgcggctaattcctatatggttgcaggcaaaatccgagcagctcgcgactctgtacatgaaaggagcatcaggatgcaatgtgaatgaacatcaaggtgtttcctccaaggcaattgtcgccaataagcaacaatgctacaatccaagaacagcacgcatggacttagatctcatgcaattccagttgagcagaatgagaaaccaagaatcacaagcgcgaaccgaaccaggcgacagatggctaaaacgcctacagattgacagcaaggaccctcatcatcttccttgctccaagaggtcaaaagctggagacggatccggtcgtccagtcaccggaggagcaagcagcatggcaccccgttgcgacgggagcaacgacgacgacgacattgttgaccgtgatcataaggaggaacaaggattggatgaaggggtggaaattcaaggcggccgagaagcatctcctgttccggcaaagagtgatgaccggtggattgggagatggtgccagggtggtgttcctgtgtaccatgaagatgatcatgatcagaggaaggaagtaacaaagcctgatcttgccgccggtgactccggaggacttgaaggtcagttcccaagcatcaaggcgatggcgatgatgggacgagcaatgagcaaggttcggccgtgtcaggaagagaggaggggatccttcatggtgtggaaggcgtagtaggagagatcctgatcacgtacaggtttttttttcctgttttttgttctgtgtaatgtagactgggctgccctctctcctcccgtggcagctggcttcagatccggtggctatcttatagggtatgtttaccaaagtatctttgtgccagcttggactccctaatcctcttaatctcttggcatctatggaaggaatgcaactctagagatttcgactctgcgctcttttttatcagtggttcagtgtaaacgatgtctggttttcaggtttatgagggtaattcggttgaccgtgatagtttgggagtaattcgtacttttttcatttctaaaataaatagttgtaaataaatggatctacgtgttataaacatctgcatttataatgttaaaaaattagtacccctccgtttctaaatatttgatgccgttgacttttttaaacatgtttgaccgttcgtcttattcaaaaaatttaaataattattaattcttttcctatcatttgatttattgttaaatatatttttatgtatacatatagttttatatatttcagaaaagtttttgaataggacgaacaataaatatgtgctaaaaagttaacagcgtcaaatatttagaaaaacagagggagtactctttttgtaagaaaaaaaaacttagtatgacagcttaacggatatattatgtttgttttttttatgtactaaaagggagcagtaaagtaaataaatctagcactgcaacttaatggatcgtcttttactagagctaatgacagaatggacaggacgatttgccttttgttccaactatctatgagactatgacatactcattccatcccaaaatataaggcttaactactcataacataaagactaagaaaatatttaatctcctgcttggttggatcaccctaatacatacaagcaatgtgattggaatatttgatggtataggatttaaaacaaatcaattctattggaaaatatttaatctcctgcttggttggatcaccctaatacatacacgtcttatattatacatgagaaaaaaatggttgtgtggaagggagtagtaagtacgtaaaccatcatcagtcatcaaatgaatctagtagctgattctaattaacggttgctatatgcagatcgacgagatgacattaagggggtgtttagatccagtagtgtaaggttttggcgtgtcacgtcggatatacggacagatatttaaagtattaaacgtagtctaataacaaaacaaattacataattcgcctgtaaaatgtgagacaaatttattaagtctaattaatccatcatcagcaaatgtttattgtagcaccatattatcaaatcatgaagcaattaggtttaaagatttgactcgcaaattaatcgcaatctgtgtaattagtttttctttgcctatatttaatactttatgtagatgttcaaatgttcgatgtgatagggtaaaaaaaaattaaggtggaatttaaatggggcctaactcctagtaagacacaaggaaagtgactccagctttacgagcaattttactgtctttgagaagataccatgaggtatcactttttggtacgaggtatcactttttggtacttagatactatgaaataacgaattttacactaaatttttgatatctcatggtgtatcctcaaggaccataaaattgctccaagctttagagccttttgttccgactatcgatgacgtaggtacgtaaaccatcatcagtcatcaaatgaatatactgaagggatggatttgtccctccaaccaaacatcacctattaattctaaacagttgctatatgcagacaaaaggaatgtgactccagctttacaaaagttcgtcaacgtaacctgtcctttggatagctgcaaaagctcaattatacacgtaggagtagttcctttggctgcaaaagtagtttggtgatgtggatgtgatgtttacatttgctgctgcctttggtgatcaagtggaatatggtagtactaaaaaatttacattagctgactagccattcgtgatgctatgtttgttgatttttccgatggagagaacggtgatagtttttttttattatttatttattggcacgtctcgtgtctatatatcgagaccgatcgtatccaggcgcacgacacttgacaactctgtactacgtagttcgtgcttctaaagagcgcgggggaacccatcggcgatgccggcgcagtcggagagacttcgcttgccagcggcggcgccgatgccgcgcggtgcgcacgctctctacggactactcgcgctgctcggcgcgtcggtggtggtgtggtccgtcgccggcaagccgcccgccgcccacgccgggcacgcactcgccggcttcctgctttggctgctggggatgatagcactgctgctgtccccgtacgccgcgcagccattgttcccggttgcaactactgccaatctcgccgtggagaaactgaagcatcgcttctccaacccccggacgccggcgcaggcgcaggcgccggctttggcttaaaaacccaccgacatgtacgcgacgcaacgcaagcggcaaagccggtcctacgccgaccaagccgcgccgtcgtttactactactactactactcgtacatagcaagtgaagtggtttgagactttgaatctgctcgtctgtgtgtgtgtgaataaaataagttcagtttggcgataattcgactgcaagtgcaagcagttggtttgatttactgatccagttctagcattcgcagctgatcacgcgttgtaaatataaagctttgttctttccttcattttcagtatacaagtttctgaagctactgtaacttccaaaaaaaaaactaaaaataacgaaaaaggctggacgatactagtactactcgttattactactaataatttactgtactactactagtagccaaacaaaggggacacattcaatttacatgcttctcatttaggagatttggtgcgaaaagaatagacatattttcagaagcaacgaactttcaatatcacaactagtgacaaaaaaataaaataaattgtatgtggggcgaaagatataacgagaatagcgccttaccatgtcctctgatgtagtttgttttccttctcttttttggttttttctcttcacccttggtgattgtgtacggtttactcccctacctaggctgcaatccatattgtagttcgtttatttatgttcctaaccttcactctcttgttttcacgtgtacaccttctaaccgtaaatgatgtgttttttaaaacgttctatggaaaaagttgctttaaaaatcatataaatttattgttttaaaattttaaactaatacttaattaattatgtgctaactcaccattacgttttcagaattagtttcgaacacaatcttaatattaaaccagtagcgtctgtcattaaaattactagtagctcggtttgagaaaccagaccattgattaagggcatgtttggagaatttaagattttgagaatatgaaaattttaggtttgtcagcttgtgtcttttaattcattttctgattctaggcctaaaacggtttgaatccaaaaagcccaaacccgcgaagaaatatcccaacccccttcgtcctcccctccttatccgccaccaccaaacccaaaaccccacctccacatctcatccttcccatccatggcgccaccgcgctaaaccccccaccacactccatccatggcgctctccgagctcccgctccaccactccttccgcctctcctcccgcccccacctccgcctcctcccgctccgccttctctcctcccgccacgcctcctcctcctcctccaccaccgccgccgcgtcctcctcctcctcctccggcggcaaccgcgcccctccggctccaaatccaacccgaggcgcgccgtggctgcagaagtgggggcccaccgaccccgccgcgccgccgccaccacctccggctccctccccgacctcctccatcgaccgaatcgtccaccgcctccgcaacctcggcctcgccagcgacgacgacgagcccaccgccgccgccgccacggccaccgcgcctcccgacggcaacgagcgcctcagcgacctgctcgaccgcagctgggcgcgccccgaccagcagttcgccgcctccagcttcgacgagtccgtcctcccctgggagagggatgaggtcgcgcgaggaagagagaacgaggaggacggggtgaagaggaggagggttagggcgccctcgctggccgagctcacgatcgaggacgaggagctgcgtcgcctccggcggctggggatgactcttcgggaccgcatcaccgtgcccaaggcgggcgtcacgcaagccgtcacggagaagatccacgacgcctggaggaaatcagagttggtccggctcaagttccacgaggacctcgcgcacgacatgaaaactgctcatgagctagtcgaggtgtgtgctatattagccctttctatcagcattggcagcttgctcgttgtaactgtttaatctattatgtttttttttggatatcagttcagtttagtgatttctagtggcaattgaacttgaattattatgtttgttgctgtgaattcgaggttttcgatgagttattagttgtgccatgataaatggattacttacatgacgtttgcctatcgatcagcgacggacaggaggattgatcatatggaggtctgggagtgttatggtggtttacagagggagcaattacaaaaggcctttgaaatctgaaacattggatggtaactcatcagcggtgaaaggggcagacggtacattgttcatcccggatgcatcaagccccacagagcatgatagccaggggaaggatgtaaacacccaacgtgagattgcagccagattaaatatgcagaatactgaggacatgactgaagaggagctggagttcaatcaaatgcttgatgagttgggccctcgttttgtggattggtggggaacaggcattttacctgtggatgccgacttgttgcctcaaacaattcctggttataaaacaccatttagacttcttccaactggaatgcgtttgaccctaaccaatgcagagctgactaatttgcggaagttagcaagggatcttccatgccattttgctctaggtgattatttcgacagtgttcatattgtttatcccctattatagcttttatttgttggtggcaaacgcctgactactgcttgataaaattcatttaagggagaaaccggaatcatcaaggccttgcagcagctattgttaagctctgggagaagagtttggtggtgaaaatagctgtgaaacgtggaatccagaatacaaacaacaagctaatgtcagaagaaataaaggtttggacaccatgctgttgctgttttgactcattgactggcatacctacttacttcacagttcacagaatttatgccaaggaacattgaaaactatggtaattgccagattatatctaaatatacaattgcttgtcatagctaagctgaatatatgatatatctagtcgtatttgaggcatgaagaaattcaactaaaaatcctgataaaaaaggggcaactataaggaatactcagtactcacttactcagcagtaggttttgatgaagtccatatttgtcctgtgaatattacaaaatccatgatttgttaaatcatccaaagcaacaccaggggtttcggaaaataataacaaaattgtgctgcactgcttgctctaatgaatataacttgcttaatgtaatgcttttatttgtctaaacaccatcatagacaatcatgctttaccaagatcatgatggagacagcttcatatagtttagttctattccttgtcgaactttcatagagttccaaaggtgtgtttccatgaatcaactgtgttcaactgttcatgcactatatttgatttaacctgtataggatttctgaatcagtgaagccttatctttttaacattatttcagaatctaacagggggcaccttgcttcttcgaaataagtactacattgtaatatatcgtggaaaagacttccttccaacatctgttgcagctgctttggctgaaagagaggagttgacaaaagatatccagaatgtagaggagcagaaaagatgcattccggttgtgcactcaatggatgacagtttagatgggcatgctcttgcgggtactcttgctgaatttcaggaggctcaagctcgttggggaagggaagtaactgctaaggagcaagaagaaatgaaagaagcatcttctagatcagtgaaggaaaagcttttcaagagactagagcacaaactttccattgtaagcattttctgcatgttctctgataaaacttgtcttattttgtattgccattttttaattatgccgttgatctaggtatgccagtgtgcttatttgacatatatttatttccatcagttgttatgcatgttctttatttcttcttcaattgttcaggcacaggcaaaaatacatagagcagagcggttactatcaaagatagaagcttctatggtccttgctaatccatctgatgataaagaaatgattacagatgaggaaagatctgttttccgtagaatcggtttgcgtcttaaggcatacttgcctgttggtgagtttcttgaacaataaccttggagagcattctatactatttctattgattgattattcccccttccattttaggaattcgtggtgtctttgatggcgtcattgaaaatatgcacttgcattggaagcacagggaagttgtcaaattgataacaaagcagaagactctgccctttgttgaggagacggcacggcttctagagtatgagagtggcggtatactagtcgccattgaaagagttacaaagggctatgcacttatattttaccgtggaaagaattataggaggcctattaacataaggcctaggaatcttttaacaaaagcaaaggcattgaagcgtgctgttgcaatgcagcgtcatgaggttagtttgctacaaaagaaaaaagcaagagcagtaccttctttttttatgataatcattgtacacaactttagcatccttctgatattgtttaaactcatgaattgttatgcaggccctcagtcagcatatagctgaactggaaaacaatataaggcagatgaagttggatttggtacgtaatttctcatattacagaaaagtagttgtgttttaattaaggcaaacatttagcataacgaacccttttttcttctcattatacagcactaaaactaatttctgtaggcttaaaatgtaatatgatgccatgccttttgtaatttttgccatttgcatcagagtaaaaacatattaacatgcatcttagttgatcctctgcccactaaatggcctttaaattccacaatatttacctattgttttagcaaaaaaacaaatgttgttattcattggcatttcattattaaggcaacaactttcccttagactgcattttttttcagcagagatgtttttgacagtgaggcatatatctgttggtgcgctagtgataaattgatcatatatgtcttttagttaatgtcttcattgatgaatgctttcctgattttatgtcaaaacaaaatagggcattgaggttgatgaggaatatgaagaggacggttcagattcagaaaatgagaataatgaagcagtttcctctgcaagatacgacgaggtatccaatcttttgaaactgatgctgtctgttttagaaccaccataaaatccattcttccctttaacgtgtccaggaccaagatgattttgatgaatcaagtgatgaagatgaatatgatgattatgatgaagatgatgacgatgacgatgacgaaggcgttgatagctagtaatatggaactgggctttgcgatgtagagtgatgtttatctctggaggtgatattgcaatcctttggacattcttggtaagagcaaagatttttgttttggagttctaccaatacctcaataggttcatgcatagcatatacagaaccatataggtacaaagaattaatcatgcagtttcggtttgtattttagggagattttttattaagaacactggggaatttgtagttggtttgtattatatcaacacctcatctgttactgtatcaattaatcaaccactagcctgtaaggggcttatcttttctgatgtccttctcaagaacattttgatgttagtaatgggcttagattctgagattttgaaaccacctccatttttttatttgagagatatttataccagcataaatggattaatggattttctcccgtactattcacttaggtctttttgttacacaagtactcctttgtgaatccttactgttattcagcattaaatgcaactttgaaatatcggcacattgcaggagccaagaggatcgccggcagaccttgacaactgtattgctgctgcttctgtttacgcatggtcttttggacgaagggcatataactttcgcatgtctctactctgtatatcccatttgctttgttgtttgcaaattggctgctgggatctgccttagaaaagctgagttgggtgtaaatggtaatcttgtgtcgatgtcttctcatacttctcattttgtaacaattatttaagcaggctcgaggtagaaggtacgtttccacccccaaaatgtactagcacacgagcactgtataattcttctgctgtataaccggatattccaggacacgaagaatgttgaatatacttggtttttctcccttgcacggttgcacgcattgttcatgacatgtttatacttaggttctttgtaagttttaaggtgattgttcttgtaatgctgatctggttcttatatcttcctcagtcctgttggcctttttcaccgtaaaacgtcattgtttatctgtctgtctaagtactactcgtatcaactactgaagtgtacgtcaaacaataaaaataaaagtgagtgtgcaatatgcttcgcacagaagacacgtgaacaagtttcaccaaatttattggttttcgactgtttggttttcatacaatctgtttgttggtgaaagccgaccggtattggatttcatatgacgttgatagaaagttatcactttttactagtttccacttcaaaacaaaaagatattggtgcgttgaccgaaactcatcggtttttactagttttcacatcgaaaatgaaaagataaaccctgcacgtttggcttgtcgattcgtgcagcatgtcgattcacaaaaatgctatcgatcggtggctattggcttgtttgttttattttccttcatttttacttgttgaggaggtggtcagagtttgagaacttttacggtacactacacttgtaatatatacttgtagtataaacaatctaatacactacacttgtaatatatacttatagtataaacaatctaacggtgtggatttatctgatctttcttttacagtataaattatgtagggtatatttgtctttctatatttttgcggaaggttatttttgtattttcatgattccttctttagtcagatcggatcgtgagaaaggggctagtcccatgcgctgccggtgacagccgctgcacgcgtccctggctcgcccccagcagccacggcgatcaagggccgccacgcgcagcaaaacaatgaaacgtcagcaaattaattctgaaagcagtcgaagattcatagggtcttttagagttcgtaacttcgtatgtgctagcaaatgctgatattcgtttcgatcaatcatgtatacaagcatcgtagtcgcacaaccggacactggctggatgatggcgtgccggtgtttgggaatctttcgatccgccgccccgcgtgatatattccgaagaagcgccgctgctcgtcgaacggacgacgagatccaaaacaaataccaactaagcaaacctttccagattaactccccccggtgcaaataaatctcaacttcaaattactaaataacccattctatattttgaacaaatactaaacatacccttctatataaagagatgcggcagctctactgtagacgctgagccatgccgtcggacgccgttggacggcagaggccatgtaagggaggtctagtttgcattgggccgagcccgttaatctgatgtaatttttttttccttttcagttttatcggttgaggaggtggcggagttttcttctccgacccctgttttcgcaagaggatcgccggcagaccttgacaactgtattgctgctgcttctgtttacacgtgtcttttttttttgtggacaacgtataacttcgatgtatgtactctatatatccccattgctttgttgtctccaaatcgctgttttgttgttcgtaccaacagttctacatcgtcctcggtcctgtggccttctttactgttccacaactgtgtcagtgtttatctgcctatcatactagtagtatatcaactagttcaccaatctgtttcatgtaggagacgcgggagcgattcgtgcagcatgtcggttcataaaaacactattgatcggtggctgaaggtattggcttgcttgttctgttttccactttttctccagtgaggaggaggggttcggagttttcttccccgaccaccagttttcctggtttgacgaggcagcagagcaccagcgcaggcagggtagtagcggctcgaacaccgtcttctcggctcccgtgtggtagagttcctcgccgccatacattccgcttacagcgcaacagatgcggcggctcggctgtcgacgcctcgacggcaagccggccgtcggcgccggtggacgggaggtggggaggagagagcaaccaaccagcagggctgctaattttctagttgggcctggcccgttgatctggatgttatcggcttgtttcttttgttcctttttcttgttttgtttatttgttagcttgatcatttccgtcgcgcggtctctttcgttattcgaacatctcgggcgcgcccacaaggcggataacattttattattccaaacaaaatagaaatacacaaacaggtcagcttattttcttgggctttttgggtttggccaggtgcccccatgatatatgatatataagtctaattggtaggctgcgtttgtttgtgggtttgggaatgatattttgagtagcataactaaacatgaaaaatgaattaatttatttattaaaaaattatataaaaagtttttcgtggaacgcacagtttagcaattcaagaaagtagcctaagccgagaagtggcttaaaactcagcctagtctccgattttaaatgtatgttgctgttgtttttcactttctttttaatctaagttggttagtttctaagacatttattcactatattctcgttgttaattgaatgatactcccctgtcccgaaacataatgcgcaactaccactaacacaaaaccaagaaaaattactatcactttcttgtttggatcacgtcaataaatataatacatgtatccaataaaattaaaaatcttaagggtgaaagttttagaaaagaattaaaggagagggggagatgctagttaattgcacgtatgaatgcgcgctttatattactatgaaacatcgaaaaggtggttgcggagtatattttaaagaggacggagcgagtattattttcgtgaaagaataggatctcattttcagtttcaatgtgcaatgaatacagagcaacaatgtcacgttaactgtttaattactcctgtacacatgcaagtctaaaacgacttgtatctggagagtattactacaatggagttatgacaaatttgtgacactcaatttggcaatttgtcacattcctttcccattttgctgggcactgaaatttgtggttggaaacattttttttttatcaatacacaagtggtagttcccaacaactgccccattatcttgacccttttttggtgcctaatacatatatatccaacttggtaggtttcagatgaaggttttcatgtgaaatcagcaatgattgttttatgggagtacagctcgtattgctgcttgccactcgagcaggagatgacacgatgcatttaactccacattattaattgggcatttgggcaacttgatttgggagttaaaataccggaggcccataatgagggagcaaaatgatcaaagtaatgccttggacgtcgtcacctattcccatttctgaggcgcagcatggcacttactaattaacattagcaattggattggtacgagttgaattttatagtacttcataagtatatttgcagcctgttgtatttttctactatatttggtgtgaaaaaaaaatgcgataatcagtatggctttttgcatctttaaatgcagtgatggggataaaaagagatcatcatcttcttctgtaagtcttttttttaaaaaaaatatggccaaatatgttaataagagcatattacagtcctattgttacaagaacgagaatgtaaaatctgttaaaaataaaacgtagagacaccgcaccttatattgccacaagacatgcaaacacacaagtacaactataacactgagtcactgaccaaactagggtacatgcaaaacctgcatactccctctgtgctgtaaaaacctacacagaatttgatttttttttttacgtaacagatggagtataaatgatcaaccacttctcccttttttttctacgagtctcagtaagcacatcagcaatatatgcctaaaaatttatctccaaaattttgttttcggattcttgaggtgtaagattcctcttttcaatatatatatatatatatatatatatatatatatatatatatatatatatatatatatatatatatatatatatatatataagttgactcataataataataaaaagtgaatcaaccccaaactaccaacagaaatagaaaaaaaattgctcacccccttcctcagcgagcacgatccctcccctcctagcgcatgatacctcccccatgcgtcactcaatcccgtgcatgggaggcggattaggaacctgggcgctttcccactagtggagagcaagaatgacgagaagggtatttttaattttggaaagtaatcagataaattgttagagccaaattttttattaaaaaaatattaaattttaggattaaaaaccatattaaacatccattggcgatgctttaattctctcctcaaagaaaactgcaagtgctcttctactttcaagtttttagcattattaaaggctggaatgttacattccattatcttaaaaaaaaaagttcagcattagctctaggggtctcatattttcgcttatgcttatgtataagccaaaatttgaattttcaattttaaatttggagttaattttggggttgcttcatcgaagtttatttttcagtttttactttaaactgctaagaacacacacacacatatatatatatatatatatatatatgtgtgtgtgtgtgtgtgtgacactcatatggggcactatggtgcccgggcaccatggtatctaatgcacaaagtcacttaaattttttaaattgtgagtatatacctagttataataattcgatccatacctatacctatcaacaaaacaactcaaatttaactttatttcacaatccatgattacatacctaactaattatatgtatggatgctatatatctagaatcaaaatctaacgaaaacaagttcaaattcagttcaaacttactttgaactagttagtaaagtagttaatgttaataactaagtaattgaaaaagtttcatactcatttgaattgggtatatactcaatttcaacaatggttcccgggcaccatggagcaccaaatatatatatatatatatatatataatttataaattattttcttatttgtaaatatgccatgaataagccaaatgatagggcagcaggacggtaaaccacatgactgattgactgcaagagcacacacccagtaaaccaccgaccaaatggtagaatataatgtgatatactagtactagtattgttctggagagaagctaacaagatagtagttgttgataagcagtcacaaaaggacatggaaagacaatggtccaagcatgtagaagcaactcagcaacgtctctctgctaaaagacatgctttggttgtagtggtggcttaaactactgctcagatcacttggactgctcctcatcatcaaccattcaaccctccaactttggacgtattatgttcagccgcacatatgcagggttaaacccttaaaaaaccggagacatgccaacacatcgaaggtgacggctgcctccactctttgctgagactaatatagtatattaggaccttctatccaggataatagttgacctgttccctccaactcttcacttaatgtttttttttagtttgttcttctttttccaagaaccttttcttttgaaggtcaatgggactcttgaatggagattagttagacacttgcatagcttaaggatattgttttttttggggggtaggatcattattgtgagatgctatatagctttgaccatggtcttaattagctctataatgcatcatatatagtgcacttccccaccactaagcaaccagtttgcagaggatagaaattgtttccattatccaaatcttctttgtttgtagtattaatgtaaagattaatcaaactctgaagcattagaacatatggattgtaatcatatcaactcgcgatgttgctcaggaaaactgtaccaccctattccagaagctagactattctgattgtatagaatcactatgaaaatgtacgaatatccgtctgggggagacctgtcagcgcaagtgcgcctatgtagaaccaataaaaaaaaccctcattcttgactaggggcttgtttagattgatttcatttcaaaccctatcattttttcggtaaagttgtcaaatatgtgcatccattttgtttcttaccaaactttgataaatatataagaaatcctaccaaaattttggtaatattgccaaaatgccagtaaggtttattttggctacaatctgaacaacccctagctttttacgagtaaattcactactatagaatttaacaaattgagaaaagtagtatttccttcgacgaaatctctgagataaatagcggagggttagttaacatcaccaaaattaggataacttacgatgaataagactagtatattgggaacgttggctggcagctgtggtgaggacatgttaacatcactgcaatttacaatataaatttgtcattactagctcttcatagtgctaaacttttgatatccagatcgatacttgatcgtcatccttgagtcctgtcaattgagttaagtaaaaaaattatatatactccttacatggatgttcgtcatctcccacattcatgcatcgatgcacaaaactacagacacttggcagataaaattttcattaactcaatagacacatgacgccatgatggtactgacaaaaataacaaacaaataaaacatgggcaaatggaataaactgcagtaggcattatggccagtgataagctcatcatccaagcacacagccaaaacaactcacaaaagaataccaactttgtatatcttaacatttcttacataacctatcgttttaacgttgttgataaactgtctgacgcatgctacattaataatcgatacagacattaactgcaagagaattttagttaatagtactaatttctagaagaccataaggctttaattctattggtcggcttcggatagatctatgtgacaaggtcttttgccaagtggaagacacacgctacgtggaatatacccatcccatacatacgttttagctatgtgcattgcattttgctgtggctagttgcactttaataaaacattggcttgcgttgaatcagatcgcaaatgatcacaaatgtgtgatttattctgacgatacacgatacatatatatatagttatatacccataatattcagagagtaaaatgatgctagtaatcgacgttgatgatttccacaccacaaaagggataaataattaaggtattggaagcaagtggtatatcaatatcacccttccctcctttctctgctactaggtacctagctatataggctgggcctttttatccaggattttgtgctttaattgatgactatggttttaaggagacgtggcacgtagaaataaattaagtggagcggcgtaagagcaagtttaatagtatagcccactactagctccaatttatttatagccaatctaatagtcaattcatacaatagttacttactatattattaatatatggtcccacatgtcatacacacattgcgtcttggagtccgtgctacagctagctacagatctgtagcccactactcttctctcacatcttttatctcattaaaatatgtttatagctgactaatagtctgctattgtacctgctctaatagcactctccatgtatagtactccatccattcctaaaaactttcgcggttgatcggcattgttttgactttgaccaccaataatattttttttagatggttatacaatgatgaacttaaaaaactcaagcttatgcttaggatgcaacatacttggtacgccttctttccaaatttttataaattctttggaaaaaagaccgagtgctcaaatttcgagtaacaaacactccctatgttctaaaatataagtgcttctgggagttttacccaagaacaaggtatatgcctcttgttaaataaggcatttgttgggggtaggagtttagtaggggataagactggaagtaaattgaatgagggtgattattgattggacaagtaatactttataagtgtttacattttgataaaaaaattaattcttcaagtgcttatattttaaatacaagaagcattgagattattatctaaaaaaaagaagcattgagattattcagggcagtcataaaaggttactgttgttttacctaactcatcgttcgctctatgacccataatcaagtgaaaaatgaatgaaataatcaaaatgctttatatctatgacttttatatatgtgttttcaatgatttgaaaactaatattgaaaaataaagtacgataaagaaaaccttaaaaccagcttcaaattttaagtttcgaaataaaagttttggttatggctgacaagccaataagaaaacaacgagtgaggtaaatgcatcaatagtctttaaaatgcaacatttgacaaaagaaaaaggaaaaaggaaatgcaaagtagaatcatatcctatgtgtaaattttacaactcctggatttgtagaacttttcgcctaaaacacatgattgagggcaaatctttccaagggacagcatgggctgtgtcctgtgtccaactcgttcctgcaccaccgcggcacacacaaggccacgtcgacgtcgggacccatgtgggcgcggcgcgtgtggcgttgccgcgtcctgcttagagcatgtacagtgacacgctacaagccagctataaacatattttaagaagataaataagaagagagaaaagtagcggactacagatatgtagccaattgtagcacggactttaagacacagtgtatgtataataggtgggaccaaatattaatagtgtagtatgtaaatattatataaatgagctattagattggctacagataaattgaagttagtagttagctatagtattaaacttgctcttaattagcagcgacgatggagcatgcaaacgtcgccgtcgccgtcgtcgtcgtcgtccgtctttatcgattgatctccacttgaaaattaatcagggatggctgcaccgccgcaggggagaaggcttcattaattaattccacgtcgaaattaatctcaggttgggtgttaacttcggaagttggaataatcctcctgtgtagtatgtacatggaggatgatggacgccatggtccaatgggcatcaatgcaccgccatgcatggaccggcttccatttgcatagaaattgaccacccaatccagtgcacatccaaggaaaaaaggcatgatttcgtgtcaaatcctagcctgttcaaaattattgaaaaaaaaaggggcctcagatcatttaccccgaatcatacttcggctatgttttagaagcccaaaattataagaaacaacggacgaaaattttagaaaacttgatttttccaatatctacctgctaaagttcatatgccgaattctagaattattgatttaaaaaactactcctatataagattctaagctatttggagaactggagattctgaaattgcgagatactcactccgttccaaaatactccctccatatacttttgatagtcatatttcattttagcacacagactaaggataagtaattctacttatcatccatttaaatatgctactagttattcctcgtaaacaagcgattcattaatatttacatttctcgatgcccatgtagccaatcctgtgtggaagaatggagagtcacgcattaaatccgagaaagtcactaagagaataggttttggattgtaatatgcctataaaaatattttttttcagatttaaaaatatgcctatcaaaagtagatgaagagagtataaggcacaaccacccttaaccaaaagatcaagaaaaacaattattatcatctcttagtttggatcaccctaataaatactacctctatctacttttgatagtcatatttcatcttgacagacaaaggataagtaattctaattatcatccatttaaacatactactagtcattcctcgtaaacaagcgattcattgatatttacatttctcgatgcctatgtagccaatcttgtgtggaagaatgaagagtcatgcattaaatccaagaaagtaattaagatgataggttgttgaagtgaaatatgcctatcaaaaataaaattttcaaatttagaaatatgactatcaaaaatagatggaggaagtataatacatgcatccaatagaattagagatcttgagcgtgaatgatttaaaaaagtaataatttaatggagaaaaggtgctagttaattgtatgcatgtatgcatgctggaacatttttaaaaaagtagttgtgttttatattatggaacgaagggaccgagggagtatctaattatataaagtagggacaaagctagctgaactctaaattacacagatcaattagagcacacctcgtcggggtctcacgatcgatctcagtgcccgaactgctcgcttccaagttccaactccgcgcttcgcttggccaagttgggtcaggctccacgccggattttgccgtgtctgtatccatcacgcgacgcggtttgcagagcccaccaccggtggcggagaaccgacgcggagaaagccggttgcactcgcgctgttacctgcgcattgcggcggcctcccgtgctccgatccgatatacgctcgtctgatgtggatgggagatgcaacgacgtcgttgaagaggtgagtcggacaaaacagtactgttctgtgacagtttttgcctaaaaacttggtggttcggtatagaaagttttgctaataacattgtgcttgtttggccgttatttttgtggttgcgggtatagccgtgagtagtagacgccagggtttcccaaaccgccggggccggggttaccgtaccccggcggtaagcacagtaatcgcggtaaccgtgaaaaaccgtacaaaaccataccgaatttatcaaaaattcaaattatttttaaaatttatttgaatttaaagaggttaccgtggtatttatattaccgtacccccgcggtaaccatgcggttaccggcggtaacgtaaaccctggtagacatggcttactactctaaaaatcatagccgaacaacttttttttctttttgaacggtcagtctgattagacttgtcttatattgatagaagggagtttaagtacacacagctaaaggccaaaagaaaaaaaaagtacaaattcgagtgcaaacaaacttgcacgtcaactctccttacacctcatggcaacattctcctgatgtgctttatgccggtgagtcccaccatcccaactcctattggatgcgattgattatttgatggattgttgcctctttccctctaaagattcccacaatcatttttctccagatttcccaagcaatggcaagaataccgaacaacctcttgtccttgttgaagatacacatatacatacaacaacattcacttgcacacaatatacgtgtggtattatgaaatgcacaacacatattcgaggataatgataaatctgcgaactcactaaattgttattgaaatgcatccgcccacataattttactcttatataagccgtttatttgttttttttttgtttgggcacatggaattaaccagagtgccaacgacaggcacatggacgaccatcttgcgatcgaggacggacagccctgatcgagaagacatgccacatcttgattcgattccactggagtaagtggccgggcacatcaaaagggccgtaacaaatacgtatcgatttctgtacgtactggagtacttccttttggcgaaacaagatcccgatcaatataccctccatctttccgtagcaaaagaaaggtaccgaaatgtatgtgcatcagtaccatttcacacaaaattctcttgctgatgaacaacgtacaccacatcctcccagagtccaaactgtggccgcgatcgcataatatctggtgctttggtgcagctcatttttgtccggtgaggattctctactataatgtataactactattatagtcactggttgtgagtcatactctcttattgttcgatctacacgttagtgtctgtagtgatagttgtagtgacagtgatattatgatagaggatgtgaacccacttgtgtcgtacgcagtcgtctctgcatgcatccatcgatccttaataatcaacggacgcttttgacgccatgcatggcttttgagggattcgatcgcctaaataattggggttcgtatagatctcgatactgccacagattttcctcatttggttctaatcaagaattttttttgtgatgaaaaacagtgagaacaagttgattcgatatgagaatccaactgcagccgaaatatgccaacctaatggcaaaggatatgtgcagcgcaaggttatgggctctgacctataagcgcgtgcacagacgaggtatcggattatatttgtcaatccaacctttgcttttggaagttgataaaaaatgccaaccaaaaacttttgcaatgttctttgtttatactctagctttgatgctccaggtgcaagtgcatgaattcggccatgttcttttctgattctggattctagattttcatttgcacgcttctaaagctactaaacgatacgtttcatataaaatactagagtatgcaaatttttcatgggatactttttaaagcaactttttcaactctatagcagttaatttattcatctgtatatatcctcaaatggttaccataaaaatcaaataatccatcgatttcagttatcacaaacaagggccttagcagcagaatttactagtgtcacaatcaaaatgtcaaacaagccccaagtcctcgcgcatctcttccaccctttctctgtggaagaatgcaaaaggatttggcaagtatatgtaagaataaagcaggggtctctctcactcgcttgaagccaaccttcagaaagcagtagtattttagagggaattcatgtgatacgatgacgaaatttctcacacacgtaagtgacaattcaaaattagttcaagttgttcttgaaagggaaacaattcgttgccgttccaaatattacggccatggtgagctgacctgtcagttttctcgcttgatagcaacgcaacaatatatatgcatgtcaacgacggagtacaaaataatcacgtactcctactaactcttcctctaaagattgtttctcatcttatatttcgaaccttcctccgtttggtcatggagtcacctttcaagtgaccgagtcatgtgaccaagcaatgtgacatttccattcacctagctagagtcaatttcatggctcatataagatctccattttatacccacgaactcttataacactacatttatcccttaatatttgatgctgattagttcaaaacataaaaaaaatataggaaaaatagtttaagataaaattaccatatcaaataagggaatatttcctacaacagcaatggcattttttggacgttgctatttgacaaaattttgagaggagcgtaaaattaaggaaaaattggttatatagcatcgaaagttcacgttttttattttatagcacagaaagataccggttcactttaatagcacccaaagatcaccctgttcccatttttagcacttccgtcaattctcaatcgttttccgtccgtcttgatccagccacacacacaatataatgtttctacccctcacaagtacaagtagaatgcatgttaatgaggggtagaaacgtcatatcgtgt

SEQ ID NO: 6953 - DNA, 59023 bp, Oryza sativa
cagtgaagatcagcaatttctcccctggtttgcttgccgtccaaaaaaaagatgtcccctagctttgatcagtgcgcatgcatcgactctactacgtgtaaactctacagaggcacgcctcatgagactttccttgatcagctatagcttcatcggtctgaacccactcatgatgaactctctgaaactctccccgttccactaacaccacccactaacatcatcataaaatgttttgctccgctcgtacacgcaaagagacgaacacgtcgccgcgcccgagctcacggtgcgcctcacctactgcaaacctctgcaaatgcctataaatacaccgacgaggcagcgatcactctccattcacagcaacagcacatctcgcagcttaatttcagcttactgatcagtgatcactgagctagctgagacaagtttttgagtatggcagcgaaggcatctgcagtgttcgtcctgctggtggtggtgctcgcggtggccgcggcgatgcggggagcggaggcggcgacgtgcacgccgacgcagctgacgccgtgcgcgccggcgatcgtggggaactcgccgccgacggcggcgtgctgcgggaagctgaaggcgcacccggcgagctgcttctgccagtacaagaaggacccgaacatgaagaagtacgtcaactcgcccaacggcaagaaggtcttcgccacctgcaaggttcccctgcccaaatgctaagcacctcgtatggtcacacacgcactggtcatcaatacagtagcacaccaatggcatatgcatggttttcaggctgccattatgccatatgggtgtcagtttaagtatactaataaaatgagtcactagacagtgttctgtttaaagtttcagaataaaatccaggctcagtacgtgctcggtgtgttatgagcttctgctctgcaagctttatgtgtcatgtatatgttacagaaataaatgtgagacggctttctgcttaaggtccaattgcacttttgtacttttgaagttcagtcatacaagatcaacagttacacaatacagatttgtcatgttgtttttagacgatgttaactcaagaaactttgtggtggaatcttcagatcgtctgcagagctttgtaacatctcaaccactctagtcatcgaaggccgattgttaggcagtagttgtatgcaccatagaccgatgattatcatcttccttacgagtacagaggtgtcaagtcttatctcattagctgtgacacaatatccctccaaatgttcataaatccattgaggaaaatatttgctgctgacatctgcacttgcactgatattctttcttgctccaaccatctcaaggatcatcatcccataactatagacatcagacttgctgcttgcatctccaaattgctttgaaaatacctctggggcaatgtaacctattgtccctcttgcaccatcaatagagatgatactctctttttgtttgcacaattttgccaatccaaaatcagatatcttaggacaaaaatcttggtctagtagaatattgtggggtttaatgtcaaaatgaacaatacgagtattgcaccctcgatgcaaatattcaagtccccgagcaatcccaattgcaatatcaaacaatttctcccaactaagtgaatcttcagtttcagagtttggtctgaaagcaaatctctccagtgatccattaggcatgaactcataaatcagagccctttttgatccctgaatgttggaattaatgaatgggccttagcccactcgaagattaattctttggaaaatcacaaaagcccacctcatgggatggcatgcatatggagtttagtaccaccttgcttattctaggagagggggacctccttaaaagggaggatgccctcctagtcacttgaagcatgtgtggtggagagaagaggggaaacacgcgcgcgctcgctcgcctcgccgggccgggccgggccggcggcgcgcgtgcacgacgtacgcgtcgaatggtccgaaaaaattggctcctcacccttgcgcagatgcagcctccttttgcagttttgttttgctgcaaattcggattcgtttttgttttggaaacgttccgaaaaatccggtgcgtgcaaacggcgtggagtccggataagttacgcgcgacttatccggttcggttacgcgcagtagagatcgtgcgggcgccctgatcaagcgacccttctctatataaaccgacctgccgtcttcatgcaatatacgcgaaatcaatctagggtttgcctcctactctgtactgcgccgtcgctcgtagactactccatcccgctcgccggcgtgcaccggcgatcgggagagcaggtctccggaacctctgccttcgacgtcctgcaccgggagaaggcggcaataaggtttttgggaagcgcttcgcgcgactgctccctgttcgttcgcgacggctcgccttcctcttcgctcgcgtgtttcgtgccttcgtagacacctgcgaaaagtttcgaccaagcagccggtctttccgtcatctcggtacgtgttcaatatgttgcgcatatttgatctgttcatgttatactgtgtagtttacatgtgtagatctaatgatgcgtccatgctagttttcatctgtaatgtcatgatttatttatggaatagattaaatcattatatgtctataatctcaacaatccaaaaaccttattgtaggcactgtgattttactatggctggttttgccgatgcactgaggccggataaattcaccggtgtgcattttaagagatggcagatcagggtcactctgtggctgacagctatgaaatgcttctgggtgagtactggcaaacctgaaggagttcttactgctgaacagcagaagcaattcgaggaagccactactctctttgtgggatgcattcttagcgttcttggcgatcgtctggtcgaggtgtatatgcatatgaccgacgctaaggagttgtgggatgcactgaatactaaattcggtgctactgatgctagcaatgatctgtatatcatggagcagtttcatgactacaagatggctgacaaccgttctgtagtcgaacaggctcatgagatacaaaccatggctaaggaactcgaactccttaagtgtgtcttacccgacaaatttgtggccgggtgcattattgcaaaactacctccatcttggagaagtttcggtactgcactcaaacacaagagacaggaatactccgttgaggggttgatagcgtctcttgatgttgaggagaaagctcgggaaaaagatgccgcgtctaagggcgatggtgggcagtccagtgccaatgttgtgcacaaggcccagaacaagagcaaggagaaatacaaagctcagcagaccaccaacttcaagaagcagaagaagaacaacaacaatcctaatcaggatgagaggacttgctttgtgtgtggccaagttggtcatctggctaggaagtgtccacagcacaaggggatgaaggcacctgcagggcagacttctaagtctgctaatgtgaccattggcaacactggagatggaagcgggtatggtaatttacctactgttttttcagttaatcaatctactaattggtgggttgatactggggccaatgtacatgtttgtgctgacatctcattgttttcttcttatcaggtcgcacggggttccaccgtcctaatggggaatgggtcacatgcttctgttcatggtgttggcacggtagatctgaagtttacttcgggaaagatcgtgcagctgaagaacgtgcagcatgtcccttctatcgacaggaatcttgttagtggctcccgtctgactagagacggatttaagttggtttttgagtctaataaagtagtcgtgtctaaacatggatattttattggtaaaggttatgagtgcggaggcctgttccgcttttccctttctgatttctgcaataagtctgtgaaccatatttgtggcagtgtggatgatgaggctaatgtttggcattcacgtttatgtcatattaattttggcttgatgtctcggctttccagcatgtgtttaatttctaagttttccattgtcaaaggttctaagtgccatagttgtgtgcaatcgaagcaacctcgcaagcctcacaaggctgccgaggagagaaacttggcaccactagaactcctacattcagatctttgtgaaatgaatggggtgttgacgaagggtggaaaacgatatttcatgacattgattgatgatgttactagattttgctatgtgtacttgttgaaaacgaaagacgaggctctagactattttaaaatttataaggcagaagttgaaaatcaacttgacagaaagataaaaaggcttaggtctgatcgtggtggagagtttttctcgaacgagtttgacttattctgtgaggaacatggcatcatacatgagaggacgcctccctattctcccgagtctaatgggattgctgaaaggaagaatcgcacactgactgacttggtgaatgccatgttggacaccgcgggactgcctaaggcatggtggggggaggcattgttgaccttaaatcatgtgttaaacagagttcctaacagaaataagaacaaaacaccatatgagatatggattggtagaaaaccatcactttcttatttgcgcacatgggggtgcttggcgaaagtcaatgtaccaataacgaagaagcgcaaacttggacctaagactgtggactgtgtttttctgggatatgctcatcatagcattgcctatagatttttaatagttaaatccgaggtaccggacatgcatgttggtacaattatggagtctcgtgatggtaccttctttgagagcttttgcccaatgaaggatacacatagtggttcgaaccaaccctctgaaataattcccagttcaatcacaccaccagaacaaactgaacatacacatgaacttgtctctgaggaggatgtcagtgaagctcctcgaaggagtaagagacaaaggacggctaagtcttttggtgatgatttcactgtgtacctcgtggatgacactcctaagtcaatttcagaagcatatgcatctcctgatgcagactactggaaggaggctgtccgtagcgaaatggattccattatcgctaacgggacttgggaggtgacagagcggccctatgggtgtaaacctgtggggtgcaagtgggtgttcaagaagaagcttaggcctgacggtactattgaaaagtacaaggctcggcttgttgctaagggctatactcagaaagaaggcgaagatttctttgacacttactcacctgttgctagattgaccacaattcgtgtgctactttccctagtagcctcacatggtcttctcgttcatcaaatgaacgttaagacagcttttcttaatggagagctggatgaggagatctatatggatcaacctgatgggtttgtagttgaaggtcaagaaggcaaagtgtgcaaattgttgaagtctttgtatggtctgaaacaagctcctaagcaatggcatgagaaatttgacaaaacattgacatctgcaggctttgcagtcaatgaagcagataaatgtgtgtactatcgccatggtgggggtgagggagttattttgtgcttgtatgttgacgacatactgatatttgggacaaaccttgaggtgataaatgaggttaaatcattcttgtctcaaaattttgatatgaaggatttgggagtagctgatgttatcttaaacattaagttaattagaggtgagaatgggattacactcttgcagtcccattatgtggagaagatcttgaatcgctttggctacattgatagtaagccttctccaacaccttatgatcctagcttgttgcttcacaagaacaagagaattgctaggagtcaactggaatactcccaaatcattggctcgttgatgtacctggctagtgcaactaggcctgatatctcctttgctgtgagcaagttgagccgatttacctctaatccgggagatgatcactggcgtgcgcttgagcgagtaatgcgctatctgaaaggtactgtggaattggggcttcactatactgggtatcctgcggtactggagggttatagtgattctaactggatctctgatgtggatgagatcaaagccactagtggatatgttttcacactgggtggtggtgctgtttcatggaggtcttgcaaacagaccattttgacgaggtcaaccatggaagcagagctaacggcactggatactgctactgttgaggcagaatggctgcgtgatctattaatggatctgcctgttgttgaaaaaccggtgccggctatccttatgaactgtgacaatcaaacggtaattgtcaaagtaaatagttctaaggataatatgaaatcgtctagacatgtgaaaagacgattgaagtctgtcaggaaattaagaaactccggagttataatgttggattacattcaaacagcgagaaatctggcagatcccttcacgaagggactatcacgaaatgtgatagacaatgcatcgaaggagatgggtttgagacccatgtgagttatactatggtggtaacccagtctatgtgatcggagatcccgtgaattagatcctgggaagaacaaaccattaataaactagaggagagtaccaatatatataccctctccaagtgaagatgcatatactctcgtgagctgcaaggcaggttggctatgccttaatgagttctgttggctttaattagcgaagatgttgtcctgcagagcattcttgaaagaactcacctttgtgagcttgactgttggtcgcagtctatgaagattttgggtgaatcttctaggaagcttactaaagacctaggagtatgacttatacgctccacccgagggatagtctacagacggtctagtaccagataagactttgagtgaaacttgcttgcacaagacttgcaattcaaggcgtagtccattgttcaagttgtgagtaagtgtagcttggagttctaggtggatgttcaaccttaattggtctctatcgaaccgctggtatataaacagtacattggaaaaggcaaatctcagtgggattttgagatttggtgggggattgttggaattaatgaatgggccttagcccactcgaagattaattctttggaaaatcacaaaagcccacctcatgggatggcatgcatgtggagtttagtaccaccttgcttattctaggagagggggacctccttaaaagggaggatgccctcctagtcacttgaagcatgtgtggtggagagaagaggggaaacacacgcgcgcgctcgctcgcctcgccgggccgggccgggccgggccggcggcgcgcgtgcacgacgtacgcgtcgaatggtccgaaaaaattggctcctcacccttgcgcagatgcagcctccttttgcagttttgttttgctgcaaattcggattcgtttttgttttggaaacgttccgaaaaatccggtgcgtgcaaacggcgtggagtccggataagttacgcgcgacttatccggttcggctacgcgcagtagagatcgtgcgggcgccctgatcaagcgacccttctctatataaccgacctgccgcttcatgcaatatacgcgaaatcaatctagggtttgcctcctactctgtactgcgccgtcgctcgtagactactccatcccgctcgccggcgtgcaccggcgatcgggagagcaggtctccggaacctctgccttcgacgtcctgcaccgggagaaggcggcaataaggtttttgggaagcgcttcgcgcgactgctccctgttcgttcgcgacggctcgccttcctcttcgctcgcgtgtttcgtgccttcgtagacacctgcgaaaagtttcgaccaagcagccggtctttccgtcacctcggtacgtgttcaatatgttgcgcatatttgatctgttcatgttatactgtatagtatacatgtgtagatctaatgatgcgttcatgctagttttcatctgtaatgtcatgatttatttatggaatagattaaatcattatatgtctataatctcaacaatacaatatcccaacaaggtgacaacgttaacatgagaagttctgctgatgcttgctacctcattcatgaattcttggccatcatccttgcaagacttcagtaacttcactgcaattggcttgccatttggcatcttgcccatgtaaacagtaccaaagccaccttggccgagcttgtgactaaaagatttggtcattgttttcacttctgagtaagaatatctctttgggtgttgagcttcatgcttttgcaagaaggactcgatgtttggtgcttctttggattttcccatcgaggacaatagaccatgccagaacttcttaacacacaaggtgcacatgagaagcaggaacaataaaattacacctgaaacgactgatacacctacagtaacattttaagacaatgtcatattaccaaggataaagaaatttcaattactctattcctttttcaattgaaaatgcgtggttctggtatatactctctatttttgtgcaaaaccttcatcaaattttttcataaccatttaggtgacatgcaaataacaagggatattccctcgagggattaaaatagtttctccatttattcatagggaaaagaatgtactgtatgttagtggcaatcctactcatgagagtttttttgcttacaattttgtactcgcaatatgtgcaattagttgactaattacactcgtaatgggttcctgtcattaatattttccgttgctagattcagatttccggaaaaatatataggaggcagagttttcatatatttacctattgcaatagcctttttcttcgatatctttgatcctgcaaaatcatgaaacaattttatcaacgaaacaatcagcaagcgacaacattagctaattatttgacaaaaaaaatgtttttgcaggtcataaaaaaatagaatgcatgcatgctcctttaggaaaaaaaagacacaatatcacactaaaagtgcatcatgataccggtcctatttttcatcttcttccttcttttaagacatcttcatcttatggggtgagaaaacaaggaatacaagaaaatggtctacttggtttgccattcaacacgagcttaattatttaaacgttttggtcaaaaaataactaattcagttcatactacctaatcccctagttgtcaattttgataatgcttataggttaacagtcggcatcaacaagagaaaattctataaatttaagtgaagagattaattcaagtaagtctgaattttgtagacttgcagaacgtaagcgaatacttgtcatttgagccatgtcaaatgcacgcaaatcaaaggttgatcaaggccccgtcaaaactagaacatcaccaaaaaattggcacattaatcaaagaaagaaacgaaaatcgccactcactatcctaaacttgtctaagatgaggtcaccagattaaactataggacccaaacatagcagaaacagacatcttgagtcaaacatagttgtcctaatcgaaacaaattaactaaaaaaacaaccttatcaccaaccttgacttgccctcaagtttgttagaagatacaaacggtacctgatgaagaacatgatccgatagcctgaccatcaggacagtaacatgtatactgatcaggaaaactgccattaaacccacaatgccctccagaagccttacaatcactacaccaacctaccccaactttccatctcgccgtgaaaccccctctaatcacatccacaaggctagaatttccggcagccaatgagcctgccatggttgaattgaatggaacaacgaaacttgagctgcatgatcccagaatatctgattccaacgagtcatccttgttcttgtgcagcctatagtaggagcttcccccagaaacgcatgacagaagatcatagataaaaggcagagatgaagacttggcactgcagttgacatagaccgtcaggaactgatcaaggtctgtgtacatgaacctgctctcgtcgatggtggtgttgtgatagcgatccgggcatgtctcctgaggttgagtttgatcgatgaccgcaagaaacttgttgccatagtcgatatctgtaacctggaacacggtggaattcatgtggatcatcagcttgttgtctgggttgcagatgagacggtacccagggtaagagcagtagtttggacggtcgacgccattcgccgagaaggggtaatcgacgtcgagcttgagtgatccgcactggtaagaagctgtggtacaatttgtgtaccggaagaaggcatcggattcttgtacagaaagtggcactgaagagatcagcagtagggtgatgaggagtggcagcgcacacaggggatgcatctgctccaaggcgtggtgatgatgaactgaagagcaacaggaaaggggagaggaggaggaggagctgcttgatgaacaaagataagaggggacaaagaacagctacagtaggtcaagaagggttggctgagtaaacgtggggaacagaaaatcgtgggaggaaattgacctgatgggttgagttaaactaccattgaccatggacctgcgtaaaacttaaacttttcgtaaaaaaattcttagccacaaagaaatgccttaggtaggtagcttgagcacagagcaggacgagcgtcaccgatttcgaccgcgttagtatagtagtattatctactaactgaattttgacctcgtcaagattagcgactttgaacagtatcaacaagactgcacgtcaacgttggttgccgcgctacttctactgctgcccacagttcgtcagagcacccgcaatggtaaagtagggtgctctctataaaacatgtacatctcagcaatagactagattaatagtaaaccacctcaatagtatgtctacataggtatctatagctctctcatgcattgcttcgtttttctctatagactatctctaagctagtagatagctttgctctctctcttcatttaatatcttccaagtagaaaaatatgctgacatggatctcttgtagatagcttatagataaccattgtgggtgccctcagtgtgtttttcttattctgtattttaattaatttcttgtgtttccaaaattaattaatatcagtttaaaaataaaatttgtgtattaatttcgtggggaagacgagttaccgcaggtcgagctgctggcgcggccatcggagcacaggcatcccaggaactcgttcttcgtgccgtagctgcagcgtcccccggatacctcgcactcgtggcacatccccgccgtcgggtcccagctcagctggaacccgcgcttcagcacggcgccgtatccatcgtcgcccaatttgccgtagtacttctcgttcatgagccaatccttgagcacgggcaccatcaccacctccttgcacagccccaaccactccgtctcgcctgccacgtccggctgcgtggcgacgaaagacggcgccgtgtctcgccgccccgggaagtcgaaggtgctgcagttgatcgggcggatgtacggcggcggccgcagcacgacgttggccgtggagttgcagtcgaagaagaaggtgatgctgtcgttgccggggctcgggaacgtgagcacctccgggagggtgacgttgtgcttcaccctcgggcagtcgccgccgtcgagcgcgtcggagtcggccaccgtgacggtgtggttgccgtggttgatctccaggacggtgtagttgtaattcccgagtcgcaggatggcgcggtcgtggtcgcagatgatgcccagccacgggtagccgcagtagcgggtgttcccgtcgacgacgacgacctgatccgtcgtgttggagaggtagaaagggtacttgatctccacctgctcgccgcaaaagatcggcctcgcgcatatggcgtcgtcgtacgttccgccggccgctgtcgcgccctcaccgccggaagcgatgaaccagaagaggaggagaaggtgggaagcatggctaccgagcagagcaagcccgtatcttctcattgtttgctcgaaacgcgtcgataattgtcatactttgccgtgcttagtgcctcggtgctttaatgcttactaatgacgcagaaagttcaaccgaatgttcaagtcaaaggtgtgtactatcgtctccccgcgaaattttttgcttcagaattatcttgaaacagtaacaaacaagacaacatgcgcgagttgataaggtaaatttttttttcgcgaacgcgcataaagattacacgttaatatattaaaaaagaaaagttttttttacacaacgtattcaaccagaccggcttataccagaaaaagggataaaacaaagaaaaaaaaactaaggaagaaaaaatggaaagacaaacacaactccaatcagcgggagtggacaaagccacactacatacactcccaacaaatcgcaaacgaagcaacgccaactaatgaccacagacggccctccaagatgatgaactataaaactactaggacagtaagaccgaagaaagcgtagagtcgaaaaccatatggttccgttaattccacagttgtcaagagaccatgaggactagaaagtcgaagccggcttggagactggagagacggagatactcaggtaagcatgtcctagaagatgctcaggtctgccacgggagagagagggcaacccagctaggagacgacaacacacatagccagacctgtcgaacaaacacgcagtcgaggagggcgtgggataaggtaaagttgctcttcggctgtccatttgcgaacacttgctcagctttgtatagctcggaactggttttacgaactgtttttcgctagtactactaactttacaaatttagcatctcgaaacgttgaaacttgcgattcttgaatccggaagtcagaaaacttgtgcttgaattttgaaaccatatgttatgctaaaaagcccaatatccttcacagcccaagcgcctgcgttgaatttaggcctggaacaaataaggctgcttcctaagatacatacgtttcggcctggcccaaaacatacgagcctggccagctggcctataatagctagcaggccgtcaagggaaacggcccggtcgtttctaagaatacagatgtattaccgaccggagtatatgctaccatgtctgactgtacatatggcgccatatttttcatcaaaaatagtcagtatgtatttacattataagttttaaaattacatatgtaattttattgtacttacaatgtatataccaaaattacacatgtaagtttcaaaattacatatgtaagttttaaaattacatatgtaattgtagtgtaaatatgatgtaattatggtgtaacttactacacgtatctcatccatcggttaaatcagcatgtccctcatcaaacaacacacacggagtcaattgacgaggcaaaagctgtggaagagccgtaaaacgtgcgcggatacaacacatgagcacgaatctacatgccatcctaaggcaaaaaatcgactgcgattggacagaaaatctgtcgccacgattatagcaaatccgctacgaatctacgacggatgcaatgttcacatatacagtatactgttcattgtatggtcagcaggaattgatgtcgcgatgcagaagcagacaagaatcaaagaagtagctagcactaataaaaaaagaatggactagaaacatgttttttctcctggtctgcttcacaagtcaagagacaatcttttcttcttctggcccgtgttgtgatttgtgagggggcttatgtttggcacaaaacgtattttttgggctttttctgtcatcctacctataagaatatctcagagttcaccggacatggaaaagaagaagattcttaattcgttttatcgtttagtttctcttgttcacattgcgcgtacggtagaccatggttcgacttccgccggtaaccgcacggttaccacggtaacctccttaaattcaaataaatttaaaaataatttgaatttttgataaattttacgcggtttcatacggttttttacggttaccgtgcggtaaccgtgcttacggccggggcgcggtaacctcggcccggccggcggtttgggaaacctgcggtagactggacctggattgacctactgcaagtctgcaatcctaggacatctgttcctcttggactggtatttatgatcataggctaagaaaattcagaaagaaggtagcgaacaaaacatctactctctccgtcccatataaaatcaaaccctagcatcccaatacaaaattagtagagagtgaaatgaccaaaatactctttattatttaaaaaaatagtaattgtgacaggtagataaagggtattgaagaaataaaacttttcattttatatactgagagtagttaggatgttagaagttgattttttatgggataaaatttaaatgataataaatgcttaaagtattttttaataataaaacaacttacaacataataaatgataattacgtaattttttaaataagataaatgattaaatgtgtgttaaaaaatcagcagcttcatccgtagaaaacgaaggtgtagaaaacactttccgatatggatatgtctcttttgggatatgttgagtttttatgggacggaggtattatgtcatagtggagtagtatgaaattgcaggatcaatccgttctggaagcagttggtacggcagctaataagttcatgggagcagaccaaataaagagcatctgccattcaaaagacgactgcttaattaagtgctcatcactttcttatacctgggttgtttgtttgtaaagagcattatatttcacatttgacgcggaccggatgtgcggatgcttcctttccatcgcgttaggagcaatcgaaaatcacaaaaaagacaatgagaaagaatctgaaacgagaagcagcatgtttatttgccacgaaaacgacagtagcactgcttccgttcaaaaaaagaaagaaagaaagaaagaaagaaaacgacagtagcagcagcatgcgtccatgcagcctggccgagtccccacccgaccggacgcagacgcacgactcccacgaggtcgtcgttccggtggcgtgccaccagcaaccggatcgaggaagcaggcagcgaaccccaactgcccctaccccaaccaatcccaacacgccacgtacccccaatacctacgcacaccaaccccctcaggtcaaactcgtgctcgtgctgtcgtgcagctcaagaagtccgttttagtataggaccaagctagtagttcgccaacacgatgtcacaaaaaaatttaagcagccggtgtaagctcgcaccgtgcgcagtcgtcgccatgccgccactactcttccacctcctcgtactctccgtcgtcgtcgtcgtcgttagcggtggcgcggccactgccggcggcggaacgtacgacgacgccatatgcgcgaggccgatcttttgcggcgagcaggtggagatcaagtaccctttctacctctccaacaccacggatcaggtcgtcgtcgtcgacgggaacacccgctactgcggctacccgtggctgggcatcatctgcgaccacgaccgcgccatcctgcgactcgggaattacaactacaccgtcctggagatcaaccacggcaaccacaccgtcacggtggccgactccgacgcgctcgacggcggcgactgcccgagggtgaagcacaacgtcaccctcccggaggtgctcacgttcccgagccccggcaacgacagcatcaccttcttcttcgactgcaactccacggccaacgtcgtgctgcggccgccgccgtacatccgcccgatcaactgcagcaccttcgacttcccggggcggcgagacacggcgccgtctttcgtcgccacgcagccggacgtggcaggcgagacggagtggttggggctgtgcaaggaggtggtgatggtgcccgtgctcaaggattggctcatgaacgagaagtactacggcaaattgggcgacgatggatacggcgccgtgctgaagcgcgggttccagctgagctgggacccgacggcggggatgtgccacgagtgcgaggtatccgggggacgctgcagctacggcacgaagaacgagttcctgggatgcctgtgctccgatggccacgtcagcaaaacagactgcggtgagttagtaccctcttgcatacatcaacatatttaattactagtattacctagtattactttcattccgaaataaactaacgtaatacataacatcacatatcgtaattctaagaatttagataagtatttgtttatcaaattcgtaacaatataatatgtcatatctcgtactagattgatttattttgaattgaatgaagtgtgtctatgatatattacgaaagtttgacaagttatttaaaaagtagatagaattaaataggaagaagttatgattggttaagaagtaaagctagttagaaaaagtgaatgatgaatgatgagggttagtaattggttgcgaaaagaatgtaaattataaatgctaggagttataagcgtgatctctctccaacttttaattgcttgttgtcgaaacaaaacatttttttgcgggtaactttgacagtgttgcatgaatgcattgtggcatcccaaaagccaattgctgttcgtataggtgtggtaggcatccccgcacatctttcttgatagaaaatgaaacctggttttgttgatgcgttctgccatgttggtgacggcactgcttgtgccaaccggtatgacggcagcaaagtatctagaaactcctattttcaccccagaattctcgtttatttggcagaggttatttggtactaggaactgtgaaatccctgtgaggtaggggtggagctggctcgtgctcggttcgtttgagatcgttgtcttaactcggctcgttaatgttaatgagctaaaaagctagttcggctcggttcacgagctagctcgttaggctcgttaacgagatatatctcattaataccatattaataattttaaatttaacattttattatgtattaacataataataaacactaactaatataatactctctaaatatgaatagttttgatgtaattaaaagactaaacactagttcatgaagatatgatgatattttatactaacgagctaaacgagcagttcacgagttagcttgttaagctcacgagctaaaaggctagctcgacttgactcattaagactacgagttcgaatcaatccgagccacgagttttgagctttttatccacccctactgtgagcgcaagtgcaccaccatgcctccgagttgaagatcactggtgatcagtagtcacagttggtgggtaacttctcctggaacaagacgaaggttctgacttttgaccatcgcaaaccatcgcaatcttatttgacgtgagccagacgagagtgcgacgtgccagttcacataaagaacaggtaccaagacgcctcaaatctttgacttgtaccaagtgtttgcccgaaatttccttcgggctgagccgccacggaaggagaaaagaaaaaccataacccataaattcctgaaacctgacgccatgatctgtctcatgaattcttctcggccgtcctctcttgacctatatgaaaacaatcaatgagccgtgcagtgacttaatcgccgtcttaagtagtactagtacactcatctggtattgcatttctcgtccatacatctacccaggcaggcagctagctagtatcctcttcctctccccttttcttgttgctcttcatcaccagttcaccacacctttgagaagatgcatcccctatgttcgttgccattactcatcatcatcctactctcatcggtgccaccttctatgcaagaatccggtgcctacttccggtacacaaattgtaccccagcttcttaccagtgtggatcactcaagttcgatgtcgattaccccttctcagcgaatggcgtccaccgtccagactactgctcttacccaggatatcgcctcatctgcagcccagacaacaagctcatgatccacatgaattccaccgcgttccaggttacagatatcgactatggcaacaagtttcttgcggtcatcgatcaaactcaacctcaggaggcatgcctggatcgctatcacaacaccaccatcgacgagagcaagttcatgtacacagaccgtgatcagttcctgacggtctatgtcaactgcagtgccaacttttcctctctgcctcttatctatgatcttgtgtcgtgcgtttctgggggaagctcctactataggttgcacaagaacaaggatgactcgttggaatcagatattctgggatcatgcagctcaactatcgttgttccatgcaactcaaccatggcaggctcattggctgctggaaattctagccttgcggatgtgattagaggaggtttcacggcgagatggaaagttgggctaggttggtgtagtgattgtaaggcttctggagggcattgtgggtttaatggcagttttcctgatcagtatacatgttactgcccttatggtcaagctattggatcatgttcttcatcaggtacccctatgtatcttctaaccaaacttgagggcaagtcaaggttggtgttaaggttgtttttttagttcatttgtttcgattgggacaactatgtttgactcaagatgctctgtttctgctatgtttggtgtcctatagtttaatctggtgacctcatcttagacaagataggatagtgagtggcgattctctttgctttctttgattaatgtgccattttttttggtgatgttctagttttgacggagccttgatcaacctttgatttgtgtgcatttgaaatggcccaaatgacaagtatttgcttacgttctgcaagtctacaaaattcaaagttaccctgaattagtctcttcacttaaatttatagatttttctcttcttgatgtcgactgttacctataactctataagcattatcaaaattggcaactaggggatttggtagtatgaactgaattagtttcttttttaccaaaacgtttaaataattaagttcgtgttgtatggcaaaccaagttgaccattttcatgtattccttgttttctcatcccataagatgcagatgtcttagaagaggggcttttaactatttgccacttttagatttggcaaataattatttgccacccctatctcaataacatgtgggtccacatatgtctatgacatgtgggtccagtggccaaaagttaattgccacatctaaatgtggcaaatggttaaatatctccttagaagaaggaagaagatgaaaaataagaccggtatcatgatgcacttttagtgtgatactgtgacttttttttctaaaggagcatgcatgccttctatttttttatgacttgtaaaaaaaaaatttagtcaaaaagttagctaatgttgtcgcttgctgattgttgcgttgatacaattgtttcatgattttgcaggatcaaagaagtcgaagaaaaaggctattgcaataggtaaatatatgaaaactctgcctcctatatttttttttccggaaatctgaatctaagcaacagaaaatattactgacaggaacccgttattatgagtgtaattagtcaactaattggacatattgcgagtacaaaattgtaagcaacaaactctaataagtaggattgccactaacatatacggagtagtgcatctatttttttttctgtgaaaaatgttcttttctgaacaactttcatccccatttgctactttcagcaacctccatcgcctccggtgttctgttcctgcttctcctcgttgtgtccttcttgtacattcgcaagaggagacagtacaagatgacctcgtcgtcgaggctgctcaagtacaccacctccggcaggacgccgcggtcgaaaggcagcagcgacaagttcgtggagtccggcagcttccactacctgcagacccaccacttcgcctacgaggagctcgaggaggccaccgacggcttcagcgacgcccgcgagctcggcgacggcggcttcggcaccgtctacaaaggtattttcagttccctccgttttaggttacaagttgtcttgagtaaggcccagtttagattctaacttttttctcaaactttcaacttttccatcacatcgaactttcctacacacacaaattttcaacttttccatcacatcgttacaatttattcaaactttcaattttggcgtggaactaaacacaacctaagtttgtataaaaaaataataattttttaacctaacataaatatattataaaaatatattcaattatagatttattaactgaacaaatttggtgttgtaaatattattatatttatctataaaatatagttaaatttagagtagttaaaacgacttataacctggaacggaggatgtagttgatttcgttgggtttttggttgatctggaaatgtgttcaggtgagctccgagatggacgcgtggtggccgtgaagaggctgtacaacaacagctgccggcgagtggagcagttcgtgaacgaggcggcgatactgtcgcggctgcgccacccgaacctcgtgctgttctacgggtgcacgtccagccgcagccgggagctgctgctggtgtacgagttcgtgcccaacggcaccgtcgcggaccacctgcacggccaccgcgcgccggagcgcgccctgacatggccgctccgcctcaacgtcgccgtcgaggccgccgccgcgctggcgtacctccacgccgtcgagccggcgcccatcgtgcaccgcgacgtcaagaccaacaacatcctcctcgacgccaacttccacgtgaaggtcgccgacttcggcctctcccgcctcttcccgcgtgacgccacgcacgtctccaccgcgccgcagggcacgccagggtacgccatgactgacgctctgcctctgctccattgctgtctcgccattaccggtggagatttgctccgttccaataaaaaatatctcgaggtaccagtacctcatggtaccaacgatcgaaaatgatttggtaccttgatgtatcttttattggaccggagcaaatctcttgccggtgacatggtgccatgttcttgatggtgatgcgatcttgtgtttgacgcggcaggtatgtggatccggagtaccaccagtgctaccagctcacggacaagagcgatgtgtacagcttcggcgtggtgctcgtggagctcatctcgtcgaagccggcggtggacgtgacgcgggaccgcgacgagatcaacctggccggcatggcggtcaacaagatccagaggtgccaggtggaccagctggtggacgacgagctcgggtacagctccgacgaggcgacgaggaagacgatgaccatggtcgccgagctcgcgttccggtgcctgcagcacaacggcgagatgcggccgccgatcaaggaggtggccgacgtcctccggggaatccaggacgagtgcagggcggcggagaaaggcggcaagaggggctcgccgtgctcgcccaacaccgtgcacgcgccatgggacagcatgagcacgacgccgaacactagccagtaacctctctgtcgatcgagattcgcttgttttgtaccggacagcgtactgattttttttcctgccggtttgatgtaaattatgttattttatatatctttgaaacagcggaaatgacgaaatgtacatagaaacttctgaagttgtgatagcgtttggcatgagtattgagtaaccagttactgatgattctttttatcctgtaatttgccctgatacaacattgagaaagtatggaataagctcagacttctgacttctgagtggagggtggaccggtggagcttgcaagcttgttagtgtcaactgccaaagctcaaaacatgagcagaggcacgatctgaactaggcccatctcgcgtcgcgcgctggccagtctagccgggcccggggcccagcggctgcgtgaggccttgctgccttggtgagcgagagtggtgcgggccgcggctcgtggctggcccgagcaacgcatgcagcaagcgaggggcgcctccccagccttcaatttagctagagttagagctgtgccaaacggtacatattattcatttttcggagcggagttagtagatgtcagggttatagataccacatacctaacagtagttgactaaatctcggcaggatccaccacataccatgttctatacggaagcaaccttcggatataggaggagttccggataaggaaagacaaccagagttctacatggaaacgacaaggactactcggattgtatccatattggtttccctagttctacttggacaaggggacacctatggacataaatacaagcccccctaggaggacagggggacacccatgaccatgagacgatcaacacccaccatgaagggatcaacacccaacacaatcgacatagaagccataacataaaagcctatatccaccaggacacgccgccggatatcgacttcagggataagcacggctagtaccctacggtgtctccggatactgtcaggagagacgaaagtgctatctctgatctcgccgggcacggattcaaggagtaaggctaccctgttgtcgactacgagtcatatcgtcagaccgccatgtcgacaacagttagatgggctaccccaaatattgtactggtgtgattatcatgaataagagcaataccggcttcgcccaacaggatgtagggttattacctgacaactcaggggcccaaacctgtataaaaatctctgtatccatgtcttttacctcagtctcgcgtatatcctagcaccaataatccccataccatgcaaataccagaattacgacatcaaacgtcaacagtagagctacttcacaaatttgtactacaggggtatagctgggtttttctgctccacagctccactccaccttaaagacccactaccctttaattttttagtctatttacacaaaaatgccattgagctacccttcctatcttctttcctcccgttctctctcctcccccatcctcctcccgaggccggccatggaaggtttcatttgcgtcgttggcagcgagcggcggctgagtcacgtcggcggtggcggctgacggcggcacgcagtggcgacaggccgcgtccgcagcagcgggggcacgcggtggcgagggcagcacgggcgatggcggtggcagtggcgcgcgggcggcggtgtcgacaggctgcggtggtagctcacgggctaaccggcggcggcagctcgcgggctgcccggcggcggcggcggcgtcgacagctggtgggcgtgggctgaccggcggcggcggctcgcgggcggcgaccacgataggttgacgccaacaaggtgttcgatgaaatgctgacgaggaatatggtggcgtggagctgaatagtctagccaagcactttctgtccccacctcagcttctataggagtcagctctcactggagttagagtttagagttgggagttggagtttagatccctaccaaacggggccaaaatcttcattctagcccttgaatgatcgattgataggctcagctcgacccaacgacgcatacacttcattctaggcttctagcaatatatacagccacgcagcggggaggaagcgagagcaagcgagtgacgacgccatatgacatcaagggggttcggtgattaaaatttcgaacccccagagccggacttcattagcaagtgtttactgtagcacaatattgtcaaatcatggcgcaattatgtttaaaagatccgtctcgcaatttacacataatatatgtaattagcttttttctatatttaatactccatatatgtttccaaatatttgacgtgaaaagatgaaaatttttttgtttgagaactaaacatatccttcatatacaacctcaaaagggccgagttatttttttaacgagataggaggggctcggagtttaaaaccccgactctcctttgaccggttttttttttttttttgctttatcccctggtggcgcgcctgacagcgtgcgttcgcgttattgcggcaagttcgtggcgcaaaacctacgcctacgcgtgatacttggtgagtgcacgtacggcttcgctggctcgggagcaggcagcaccgcagcaggcgagcacgtgagcgcctcgtgcccgcacggcgtccgcgttccctcgcgcgcggcaagccacacccgcaccgcacggccgcacgccacgcgcgcgcgcgctgcgagtgcgatggcaatcggcgataagccggtctcgtcgcgttgttccatagattagttttctttccaggctcatccgaacagaagaagctaatcgctaattattggaatctctgaaccgaaacagctaatcatgcagctctctcggtcaatcactcgagcggagatcaacgatttggggggagtgctcacttggagctagcgtacgtgcaaacgtgtccgcgactgcatgcatgattcaggcaagcttcgacttggatcgatctcaagacaggtcatcactcatcaggttgttcaaaatgccggcaaaataaattaaggctgctgcaattctatcatgacaaggactcttcctttttttcccctgaaaagtactgaaacaaatgacgactcggccgaactaattagcatcgcaatcgctgcaaccatggcaatacatagtgcatctgtgtgcatatgggctggttgagtttgatcgatcgatcgactcagctcgatccaacgacgcatgcacttcattctagcttgcgtacatgcagccacctgtatgatctgtatctgtctatgtagctagtgactcaccacttggacagcatgaacctctgcctcccactaccatccgaatatccagtgtgatgaggtgattgttccactcaaatcatatccacgtatatgtccctgtcctttcctttcaccaaaaatcacttatatttgtgcattcgcgatcgatcctactagcttctgccacgatagcacatacacagtcttgcatatgaagagttagctagctactccccgtattttaatgtatgacgtcgttgactttttaaccaacgtttgactattcatcttattcaaattttttatgcaaatacaaaaatagttatgtcatgcttaaataacatttgataataaatcaagtcacaataaaataaataataattacataaattttttaaataagacgaaatgttaaacgtttgttaaaaagtcaacggtgtcatacattaaaatacggagggagtattttaaaagaacatggagaaaaagggctggttatcttaagcttatcttcgtttttctggtcaaggcagctgaggcacatgcttgcattcgtgcatgaatacagcatgcacatgcgtccaccccaatacctaacgaagattattaattaatctgcctctttttgtgtttgtttaaagttatctggtgactggatcccaagttccaactgaaagtcagtcacatttctttttttctaaaaaaaatacaaacgcatatacactcacttgatgaacacacgtgtctacgtcaccaatatattttgagattaatgaagtcataataaatatctcaccgtccgtcgatgtgtacgacgccaatcaattaatgaagtcataataaatatttcgctgtcgatgtgtatgacgccaatcactaaaagaataacgctacgtctaggacttaaatcctaatgaacatgtttattttttttaaaaaaactaactagctgagtattcacaaagtgagtctcgtttttatcagcttgcatgatgattgttgatatgttcatctctccaaattgcacctacatactccctccatactcataaaggaaatcgtttaagacagcgatatggtctacaaaatacaactttgacttcttatttctataaaaatatttattgaaaagtgatatatgtatacttttatgaaagtatttttcaagacaaatctatacatataatttttatattttcaaacttaataacttgagagttattcatgatttatattttcaaggtttggcttaaacattattctaaacgacttcctttataaatatggagggagtaatgcggatcgatgttgttcggatattaatatggtcatacatacatctatctgaaaaacagtatgtatatatgtgtaacttgcataaacagaatactccatgctatatacagtatatgttcaacttcagtcttcagataatgtgattgcgacgcaagggtaagcagactacagaatgcagattaacatatccaggcatgggtggagagcgcgcacgcctcacgccgcctgaatactcaatcattccatcccacaatctgggcgatacataattaaattagtagtatagcggaaagcagatggatacctcgacagcatcctttcggggcatggaagggtcaggcaaccagaaaccagtttgttgcgatctgatgcttcttccattctgggacttgttttatgtttatctctctgaatctgatcaagccctgaaatgtcattgactgcatggtacgtacgtacgcgtcgttggaggtgacagagacctgcaagatcagattatactactactactagattttagtatatattagattataatttgtctcgtctgattaacaatggttttaattaccggaccgatttgctcgatcggtgccacgcgccacacgatttgttttctatgtgcatgcatgaattcgtacggagcccaggcgtaatctcacagttatatatgttaacccaggtggatttcaattgaaagttgcttcaattcaaaagttcaaaacgtgactggaagttattctcgttcagttttaagtttgagctgtcaaacttttagttgcacattgtacacgaatttagggctagttacaagtgtattttgttccattccaaaattacgatttacaaacaagacaaattttgctactggacattaaaaaattgcataatttgctcatagacatcgaaaaaggtgtcatggctaaaagactttaaaaaactgataatttgttagagtacactttcggctcaattgtattgataaattcttaatgatgataagaatgtccctaaagaccacatgctttaaacatgatgttagagtaaaaatttagaaaccacgaaactctaaatttgccatcaccctaagtacatcactagcatacattatattcaatcttagctccagtctcagctcgaagcttttgaccttaggggcattcttgtctttttgaagaattcctctctccaattgagctaaaagtgtccccagcaaattactttttttaaagtgtctttcagccgtgacacgtttttatgatatttaccagtaaattgcacaaattttaagtgttatgtagtaaaatttgcctacaaacaatatatgcttaattttcaagttgggccggaagcgaaagtcattggtgtgtgactgatatacatggtgatgtgtataaatatactcttttgccataaaataaaccaatctaatactagatatgataaatctacaagcgaattataatttgtgccatcttttcatacctactggagtaagttttagtttggaccatatttatctaatatcttcgttttggactatataaatttattttatctttgttaccctttgaactaccctaacgtttttatctagccacatccaatctcttctctaacaaagatgttaactgcacgtcaacagaggatatcatcggtatgatggtgccaatgtgcttgatgctaatgctgtgcttgtgaagatactttgggtggtcaaaacacaaaaatggaaaaaaaaacctaatccaaaataaaaaagattggagaaaaatagataaaggatgatccaatctaaaacttgaggacaaaaacaacaaaaacacaaattcactctaagataatgagaggggctaaagtttaatccctctcgttaccaagcaccacctaaatctttcgtggcatcaagaaaagaattaagagagtgggggcccacaaggccacggtgtccactcgctgttccacctctcatctcattggctacaaatacaagcagcccacagaggcagagagaggagcgcacacagacaagcggaggcgaaaagtggcgcattattttatccgagcgagcgagtcagacgcgcacgcggagcagccgcctccgccgccgccgacgacgaggaggaggatggcgaccccgttggccgacgagggctcgatcgccgccgcggtgatgccgcgctcgccttctccaccggccgccgccgcggggtcggcggccgaggcgccgatgctgatattcgtctacttccacaaggcgatccgcgcggagctggagaggctgcacgccgcggccgtgcgcctcgccacggagcggtccggcgacgtgggggagctcgagaggcggtgccgcttcctcttctccgtctacaggcaccactgcgacgccgaggacgcggtacgtacggggtgaatgccgccgccgcggccgtagcccctctcttactctctcctctctcgcgcgggatcgctgttccggcgttgtttatggtagaattgcggggagtgacaccatgcggtgtgtgttatgcgtgcagaattgggtagtgtgaggctctgggttcggaaatcgtggcattggttggaggatttgggttggatttgtgttgaattgaggtgaaaccaacattatctcaaaatgaatgaagtttgcaggcatggttggttggttgtacaacttagttgtggacacactgttatgttcatgttgatcttctgagatgcatttgcatctacttagccatgtgattgcgaacagtatactgcattgttttttttttatccttttggtgatgtccccatcagtggcctatactgtcttagactgaatatgcaaaagtacatgttaaaatttctgagtcctgaacattatgcaattatgcatcaaagtcacagggtttcatctcggattacatcgttagcttatgttaaccggactagtgtagccaatatgaactgcctactcatgcaaagggtaaattctactctatttaagttccttcagattagtggctgagagtcaggaaccaatgaaggatcccatccattttttattgaagactattccgttccgaacatgaaaagttgaatattgttctgcactgaatgaaaatgaattttgctggagttcacgacagttgctgtggtatttcataggtaaggtagggtattttagttctctttgcatttatgttgtgccagtagtaagcttttcggttctgcactgcaaaactcttctatacataaaggactgcaccagcgtcgtgttgattgtttagaacataacacttactagtttgacttctagctaattctcccccaaacctatagattgatatatttgtgaaacagttccagacctttctcataattcatgatatataactatattgaacgtttggggggcataagatctgtttttttgattgcaggttatctttccagcacttgatattcgagtgaaaaatgtagcaggcacgtattcccttgaacataagggggaaaatgatctgtttgcacacctgttctctctgttaaagcttgatgtgcggaatgatgatggtcttcggagggaactcgcgtcctgtacaggtgcaattcaaacgtttataacccaacatatgtccaaggaagaagagcaggtttccttttcccctgtttactctgttaattcctttgtatgtcatttgtcgaaataagaccaacatgcctttctatttctcatgagcaacaatatgagaggcgctgacatgatgcaatagtctaattgggtgcactagagttctatattagtatattgaaatttatcatatcaagctggcaactgtttgataaaagtatttggaatgatgcttctggatctattttttatttgatatatttaatcttagagataaggggctacataagagaagaatatatagcatctgtagttatgaagagtacagtacaatacagaccatataaagagcaacttcatttctacatttgcttgaaggtgaggccctgtagaaagttatttcttaccaatgttatgcgcttctgcttattggaagtctgctatctatccacttcacaagtacttgcttgctacttggtactcaccatgcaagtagaacgaactatagtgctgactccaattatttatctactctgtgtgtgtgtgtgtgtgtgtgtgtgtgtgtgtgtgtgtgtgtgtgtgtgtgtgtgtgtgtttgtcaaggctttgtaatccagaagccaactgcagaatgcttgagcatatataggctggcatttttttatgctcaccaatttctgtgttctatatatgacacggagctatcttgttatgtgtcttcacttgcatttactgttcaaaactcggctttaagcagtataaggacattgagcttgcattgtatataagctttgattaaagtgtttttaagttttgatagcctagagaactaaatgataagctaaactataaagatcaacattggccgatgatagtttctcaaatgctgcagcaattaatttagaccatgtacttgatgacaattcctcatgcactttttaaaatcatacgtatattattaatcagtatattggtatattatgtgtcctctatcattatcagttcctctcagcatagggcatacagctatacactgttggtgtctaatcatttctgaatgtttcaggtcttcccactgctcattaagaagttttcacatgaagagcaagctgatttagtctggcaattcttatgcagcatccctgtcaatatgatggcagagttccttccatggcttgctacttctgtttcatctgatgagcaccaagatattcttaactgcttacataaaatagttccggacgagaaacttctccaacaggtctcgtgttgatgcatcgttttctatcaataatgttgccatgctttacttaactatagtttcgaaatttgtgaaggttgtatttgcgtggattggaggggaagcagtgaaaacaatatcacatgatttttgtagtccttgttcaaaaagcaatgttagatgcaaggatgctattgatcaaacagacaagtatggatgctcacatgagcactttaaaactggaaagagaaagcgtgcagaatctagttatagtcagcttgttatgcatccaatagatgagattttgtgttggcacaatgctatccgaaaagaattgagcgatatagtagaagaaacaagaaggatccaacaatctggggacttctcggatatatcagactttaatgtgaaacttcaatttattgcggatgtgtgcatcttccacaggtatgtggctctgaatctcaactcatgcgccactttgtttcaaaagcttgcatgtaaacactttcttattcaatgtgcaacataagaattgattagctcttgtttctatcatgttaaacacatttacttcttcagttgtacattacacagcttagaagaacatgagcaatcgagatactgggaagcacaataaatgtgtggtaccagttccctgctataacatattctttgttttatgtggctaatagtagagcttacatcttctttttcaaaagaactggaatttctagaattgtggcacaaatattgattttgccaagcatagtggcctagccgattttatatgttgatctgcagtattgcagaggatcaggttatatttccagcagtcaacgatcaagtgtcctttgagcaggagcacgctgaagaagaacggcggtttaataaatttagatgtttaattgaacaaatccaaataacaggagccagatcaacagcagtggatttttactctgagctatgttcacaagctgatcagataatggagaaaatcgagaggcacttcaaaaatgaggaaacaaaggttagtattttagacataaactctgtagttaaggaggaatgttgtctacttgggtcacgtgaccaatgtagtctaacatgtaattcatctaaatatccaggtacttcctcaagctaggattcatttttcatcagagaaacaaagggaacttttatataagagtctctgtgtcataccgttgaagttattggagcgtgttttaccgtggtttgtatcgaagctgaatgatcaggatgcagaagcttttcttcagaatatgtttttggcaggttattttccaagtttactattttcttctttaaaacaccagttttttttttccaaaaaaaaaaaattctcaacattttactgtttactaatatgttgaactgaacagcaccttcctctgaagctgcattggtcactcttctctctggttgggcatgcaaaggtcgctcaaagggcacctctaactctggaaaattcatatgcttgacaccaagggcactgagcagcccattggatgaaaatgggtttaaagactgccagttatgtccatgttctttacaatcagatatttgttctaggccagccaagaaatggaatgacacagaatctagtaacataagcaactgctcacaaacggctgatatagcattgacatgtaaaaacagaccttgtcacattcctgggttaagggtagaaattagcaatcttgctgtcaattcgtttgcttctgcagagtccttccgatcgctgtctctcaattattctgctccttcattgtattcaagtcttttttcatgggagacagatgcagccttttctggcccagataacatttcaaggccaattgacacaatattcaaatttcataaggcaattcgcaaagatttggagttcttagatgtggaatctagaaagctcatagatggggatgaatcttcccttcgccaattcatcggaaggtttcgtttactgtggggtctttatagagcacacagcaatgctgaagatgaaattgtatttcctgctcttgaatcgaaagagacactgcacaatgtcagccactcatatactcttgaccacaagcaggaagaagaattatttaaagatatatccactattctttttgagctttcacaattgcatgctgatttgaagcatcctcttggtggtgctgatgcagttggagcgaaccacattcatccatataataggatcgattggtccaaaaagaataatgaacttttgacaaagcttcaaggaatgtgcaagtctatccgggttactctgtctaatcatgtccatagagaagaacttgaattgtggccactatttgataaacatttttctgtagaggagcaggataagattgtaggccgtataattggaagtacaggagctgaggttctgcagtcaatgttaccctgggttacatcagcgcttagtctagatgaacagaacaatatgctggacacatggaggcaagtaactaagaatacaatgtttgatgaatggctaaatgaatggtggaagagatcacctacttcttctggcccttcaagcgatgcctcccatccagaaggtctgctcaattaatttccatcccatctcccctcttcaaccacttccaccatattttagtttgctatgttatgtaggcactcactgttttccatttcataaaattgtgtcaaagctatatccttttccccattgaagaaacttctatcgaggcccacttgttatatattgtgttagataaaggtgttatcccttacaatggttatcaacaaataagattggccttctaatgagcaacatataaacttcatacattggttagtttctgtgttatctgaataaaaattatcactaattggacaaatgtagttggccaaaaggaaattcgggaaatgttcaaaagcaaagaagctgtaaaattatatccatgtatttgttgatatgtgataagtgataacaccatgacaacgaggacttcccaattgatgactaatttcaactgtcctagctagcgatagtgcaaatctattatgatgtaaatttgtgataaaagagatttagtgaagttggacttagcataaaggaaggtagaatggtgttagaagagagaaaagtagtgggtctgggatgtatatttatgataaaagattaagcactacagttttcatgatcagattttgaattatcttaactcttgttctttgctttggcctgtagaagatcatttccaggaaaagttcgatcagagtgaacagatgtttaagcctggttggaaggacatcttccgaatgaaccagagtgagcttgaggctgagatacgaaaggtttctcgtgattctactcttgacccaaggaggaaggcttatctaatccaaaatctcatgaccaggtttcttatatgaaattttcagaaaacaattttaggatcttttcctactgttcctccactacaatataggaagttattttgaatgactattgttttgctaattatattttttcagccgctggatagctgctcagcagaaatcgccccaacctcagtcagaagatcgcaatggatgtacagtattacctggatgttgtccttcataccgagatccagagaatcagatttttggctgtgagcattacaaaaggaaatgcaaacttgttgctgcatgctgcaataaactgttcacatgcaggttttgtcatgataaagttagtgaccatacaatggaaaggtaaactcagtgcaaccatgttgtctatttttttgagatttactgccaatgatacttctgtattggtcgcagtagtaatgtgttcaatattcatttttaaacaccaaacaacagacatcaataagcatgcagtggttaaagatttaactacagttagagaaccttgtgataaatttatatctgtgcaaaacagtgaggcagaatgattattttaggcatgacttgtggcctttgtattgtccctttcgttcttctcttcatctgttgttttcctcccaagtaaatgtttggttgaaatgatgcgatggcccaaaaagttgtccaatatgaacttttccgtctttagttttttaatcgctgtatttgcatgataggtgtatacagagttttaagaacatgtgagagaggataggaggcagaaactctcctgttttctatcatattatgtgttggttgttatagctttgttataatataaaatgctaaatgatattgctaagtctggggagctgatatgtcaggaaagcaacggtggaaatgatgtgcatgcaatgcctgaaagttcaaccagttggtccaaattgccagaccccttcttgcaatgggctatccatggcaaagtattattgcagcgtatgcaagttttttgacgatgaaaggtaaaaaaaaaaaaaggacgtggttgctagttttgctaactcgggagattgatggggtccaactttgcaatgttttggtgaccacgctaatagtgaatcttttttcaggagtgtgtaccattgccccttttgcaatttgtgtcgtcttgggcaaggattgggtattgattttttccattgcatgaagtgcaactgttgcctgggcatgaaattgatagagcataaatgtcgagaaaagatgctagagatgaattgcccaatctgctgcgacttcctatttacatcgagtgcagcagttaaaggtctaccttgtggccatttcatgcattcagcttgctttcaggtacaataatctagtcgcattctgatgcatggtttcttgagcgatatctcttactgtgagtagtgctgttctgacaagtttgtaaatttcaggcgtacacctgtagtcactacacctgcccaatctgctctaaatccttgggagatatgacagtaagctacaccacttaaataacattttttttcattcaccatagattatattttctccaactccatatttttaccatacacagaacagcttgtaaaaaattccgttcttctgattcagtagtgcagttaatgtatgttctttaaatcgcgtttctctgcaggtatactttggcatgcttgatggcttgctggccgcagaagagcttcctgaggaataccgggaccggtgccaggtaaattattctcctattcctagttaaaaaaatttcagtggctggggtataccgtttgatatgattgattgttccaggatatactttgtaacgattgtgaaagaaaaggaaggtctcggttccattggctgtatcacaaatgcggcttctgcggttcatataacactagagttatcaagattgatagagctgattgttcaacatcagattaaccaggcgagattttccctctcatattcgaaattccttttgaatatatatattgttgtaaatatacatcaacttaaagaaatccatgcgtcatgcgtgctcttgtgtgttgctgcgattaacaagtcataggagatgctaatggtgggcgcttatgaaattgtgtcacagtctaaggtgcgcacaatctctagtttaatattcggggatgtttggtaaattggtagagctttcagcttccggggccaaattctttagagaatcaagagaagcccaaccaaatgggcacaaagggtgttagttcccaggggattggtggcatgtggggcaacaaaattgttggtacccaaatatggaagtgaccactgaggctcctttgaaatgcagggatggtaaaacatgaatagaaaaaaatagactgcaacaaatgaaaagtacatgaatgattatttggctagagcttgaaaaggaatgggataagagagatggatgcaaaggaaattttgtaagagatttaacttgtgctaactctcctctaaaatctctatgggcctcatcgtttggcatattcatatgcttatcagccaaaatttgaattttcaacgttaaatttagagctgattttagggttttttcatcgaagtttatttttcagcctttgcttttagatcgctaagaacacatatataaaagttttattcacaaattgattttcgtttgtaaatatgccatttggcatattcagaaaatatgccaaccgatgcggctgtatgcatctttgttatcaattctaaagaaatttcatgggtgtcaactgtcaatcctttgttccagagtaaaaaaaaacaacaacaaatcatttagaattcaatcgctgcataaacatgaacagctgggatagattccttgtgcgcaaaccttcccacttggttaaaactaaagtcgcgtacggcaacgagccgatccgcatcggcccagccggtcttggaccccccaccgccgtggcacgggcaatcagcacgcgatcaccgattggatgcattggcatcagccgccactggatcgcgttagcgcgcggtgggcacccactgcccagcccatcatgcatcatcgcatctggccgccaggcacggccgcacggtacgtacaggccgcctttgtcatcttcacgtgtaagcgtcgcgtcgcgtggcgcctagcctggcgcctcagtgatcgccccctcacggcctcactcggtcactcccggtcaacccccacggcaatctcatccctcgcctttgtcaccgcacgcaacgcacacggcaaaaatgaccaaacttgtaacatataatttcaccatattgctacgaaatcatcatcatcacgtcacaaacgcctcaacatatccatcccgatctcggccaccagctcttggagcagatcccgttcgatctgggcaccaatctcaaacgcctcgtgcaggacatccacgccgatctccacccccgagtgctggacgtcgctcgcgatcagctcatccacctccttcccggccatgccgctgcacctcgcgatctccctgtccacctgagcagccagcctctcctcggggcagatcaggggaaccctcgagaacgacctgtatcctgagtcgcagaactgggtgaacagcgagtccaagcactccatgacggaatcgaacgcgaggcttcccagcgggctcctgctcttctccccttctgtggccttgacgacgccggcgttgaagctgaacccgttcttcttcttcttcttcttcttcgtggagcttgtggtggtcacggtggtcagagcagactcgaatgtcttgacaaggaacgccttgaatggtgcctttgatgtccgtggaggagtagtagaagtagaccggcgaacgtttgttagtagcagctcaacagttgctgcaacctctccagggtgtatcaggttgctgctgtcttggccaaaattagtttcagagcacctggagtttcttttgttagttccatcttgttgcattgtgcaattctccgagcggcgtcggtctctgaatccagcttctgatgctggcagtggttggaaaagcatgaaagggtcagcatgcaactaaaaaaactgtgacttaactatacgatttttttgtgtttatagtgttttgtcacaagagatcgtagtaacaaactacttgtaaacaacctaaccaacaattagtcaatgcacttaaacaaaggtcccttacctgcagttttgagcaggctcccagaaaagcactcatcatctgcataataagatggatcgctagcatttgtagtaacctgcagatgatgacagccaaagatattcatcagagaagaatgacccttgcagttttgatgagaattaactcggtattgcaccatgatagagaacaggaaaaaccaaaattactgacctcatgctttttatgagtttcacgcaatttaccacttctaggaacctctctgaagccaaaagtcagactgtccagaaagttacactgccatagaaattcatcacttggagattcttccattacattgatagcactcgtctttcgaaacaatgaagacattactctgtcgtccagaatttctctgtttctcaactcatttcgattaaagcacactgattctgcactttccagacttgatatgccttgtaaagcttcactcaagaccaattccctttctgaagaaatattttggcagtccctacgatagtctctcttaggacaagaaccagttggagatcccagaacaacactatctgatcctttagtatgaccattcagcaaagcgaggacagcctttctcggtgaattagaagagatggaaatgatgcctgagttgttacccctagaagcaatgcgtgactctacctttctccgcgagtcattccttacagagtttggactggtagactttggcttctcactaactaaccctgcaccttttgcaattatcatgtctttctctgtagctttcagtgttgcagtctttgatatctgtttattagaacaatcaccatgcaggccactggttcggtgacattttgtgctcaagttcctgttctccgcactaccatgtggcatgccgattttatcctttacttttcctttggacctcaaagatgcactgttgttcatacctctgtttgaacagacaaagtcattggctgtgtttgccacattttgctccttagctctatgtttctgcctttggaccatatgccctgtatctgctgctctataagtttcaggcaatgcattctgcttcagattgttctgtttaagaggtctacaatcaacattctctcgggatatgtttttcggctgtattttttggacaccttgacttgaaacaaggacatcatctgatgttctctgaccactgtccttaaatccgttcctctgacccttatggtttccttcagattgtgcttgacatgatatgttctggtttggcctcctaacagaaacattcctcatagtatcctcttcggaccactgattggaagtagaattgtgcagagaggtggctcctacattttgagcacctgaccttgatgcatcaacatcacacatttctcttgcgaattgatcggagaaatcgtgcatggcttcagcagcactctgcacatcactgctgttgcatctatactcgaggcgcgcttgcctccgagcctgatggtggtgcctggattgtaaaccgggttccaggaccttgactgctgcttcaatcagcctaaccttgttcctgcttgaaactgatcttggactcttaataggtgaggctaacttgtgtgctgcatgcttccgtgaccacaccggctgcgcatctgcatcgagctgattgccattgtcatgccggccatctctgatatgccctggcttttgttgcttctgatgcgagttgtatatgcttccataggagcattcactccggtgaccaccaagctcggaggcatccatggtttttactgccttttgatggctggtggctggcattgcgctgagccccattagcctggctaccacacccggtgtgcacatttcactgcttttgttgtcttggccaggaggtggcaagcgagtggtaacttcatttggatagtatggagcatcaagctgaaggaaaatagtacaaggtgagccagcaacttagcattctaaaaataaataacaaaggtgaaaaggaggtaaaaagggatcaagaaatgttaatgtaaagctaaagctaaagtgttaaaaactccatttctgaaaaggcaccggaaaaactttcctaggtcaagaaagctaagaaatctgaatgtaaagctaattgtttaactgatttttttaacaagagaaaaaaaagaggcttcatagcacaaaatattggcttaaaggggaagaaaaaagagagcttttttgggcatattctttggaaaattcaactagatctcataaagaatcaacaaacaattgtagctttacaacgagatgctaaaagaaaaggagaaaagtaccataccagcagagtcctcatcttggccgccggcgtcttctcgccgccggcaggtggtctcccaggcgagaacttctgtgtgcgcactgaaacagaaatggcagtacaatccattcagaaaaaaaccagaaatggttcaaaagccaattgaacacatctgatttgcacaatccaggaagaagaataataagaagaagaagcctgaacagtgtactactaccatccttgcaatctcacctgggggaagcagcttggtcttcttggaggacgaggagaagagcttcttcttggcgagcatctggaacagcgacgccacgcacgacgtcgccggcttctgccgctcgacgatcgccaggctgttgccgccgccgccgctcgccgcggtggcggagctgccgcctttcatgcctccaccgctccacacgcacacgcccacaagaacaagaaattcaaactcaaaaatctttcaaagcctcttcttgcttcccctctctctatctctctctctctctcttgccgtttcttatgagcgaataaatgcaacaaatcctggaaaaccagtcgcttcaactctttctccggataggcattaattgccacatcaaattcttcatgactttgcgacaatgcctttgcagcaacaacagctcgagaaagaactatggcttatggccaaatgctagagaacaaaaaggagaagactactgtggcagcagcactccaactcttgctcaagacatgactaatgcatgccattattcctcttcctacacatagaaccggaatggatcaacactcatcctgaatgttcttgtatctactcctgtttgtgaactcttctaaaaaatgaaatgctataataaaccttgagaagaaaatatttggggatgaatctagagcaagtgggcgatgactggatgagccaaatggtggagttggagactggggaggagggggtccgggagaaaaagagaggggcttttgggtggcaatcggagaggaagagacatctcaagctgcttttgtttcttttttttttatgtgtatgtcatgggtagctggctggctggctgtgccaggttttctcggctttctttgctgatctctccttttttgtttgcttccttggccgtctagctgtacttttagggttcttcttggagtttgcactttggagtttggactggtctaatcggaagtgattagtattagtactcctgtaaaaaaaagataatgtaaattttagagacgaacctagataatttatctttagaagttactccctccattaaaaaaaaaagtaaatctagtactggatgtgacatattttgtataatggatttggacatatgtatgtccagatttgttgtattaggatgtgtcacatctagtacattggttttttataggattgagggagtagctttttctaatacagagggagtatcctcgataccgtttcatatgaatcttccaagtatttttttagaaatatgaaaaaaaaatccatatctcacaacggcccctaaaagtctaagatgaacgagtaaagaaactatacattttttgtggaaaaattctgcttggagtagttgcccactttcatttcctagctgtcattgttggtatgtttgattgtatacggctgaggctaagtagattctaagcaagaaaaagggaaataatgttgctgtcttgttggatggtaacagtagttgcacgaccagattgtaacattctacttaccaaaacaaggcaatctctgtatagtacttaattagaatcaccgtgtctattatctagcactcccagattcaggctttgtactgacagagctggtgtatctaccttttggttgatgtttagttgtggggtcaaagcaaagagaagcaaggttgttgcatacgggcagctcaagtaaactgaagtagaaagtctagtatactttgtactccctccattcaaaaaaccttaattcctgggtttccgtgtctaacatttgaccgtccgtcttatttaaaaaaattataaaaaaattaaaaagataagtcatacataaagtattatttatgttttatcatctaacaataataaaaatactaattataaaaaaatcatataagacggacggtcaaatgttggatatgaaaacccaagaattgagtctttttggacggagggagtactgctgattaggacaaggtgacatttggacagtttcacagtattgttttctccttctgtccgtcagtttgaaatggatggtactcctaatctacatatatgacccagacaagtgttacacttttcaaatgcgcctagtgtttcgtaatggcagatttagtacgatatcttgagactctagcgtcaaattgtacaagacaacaaagaagaagctgacattttttagttatgagacggctgaacttgagtgctgagcccactagtatacttgtaaatcaaatctgcaagtggacaaatacaaaagatttcaagaccagttagtcaaatgcaaccgtatcaataaatttttaagtcttatggaaggacattcttgggtatatcgttgactgctagagctattcttggacattcttggagtaagtagcaaagattagctcctaaattgccattcagttcatcaaagcgtaaaccgcactccggaaggaggaaacactatctcacgtgattcgagaaatttccactcggctataaaaaaaatcgtggcttattcaataaacctgataaaagttggcttattgtactgtgacacggtattaacaaattattattcaataaacctgataaaagattgcaagagcatatgatgatattcatgtcaattaccacctagttgttgatcgttggtaaatttagttcatgttctttcttatgttgttttcgacatcgatacaatctataatacatatgtttgattattattattttcctaattacatatttgcaaaaataataaaacatttataaccttgtggaagtggttttcatgataaatctattaacatcctttttacatattaaattttaatattttaaatgtataactccctcaattctataatataaggtataaccatttttttcaggtgttttgtaatataagacgtgcatgtatgccttcaattaattaacacatcttctccagttccactatattattattatttttaaatccttcaccctcaagatatctaattctattagatgcatgcattatatttattaggatgatccaaactagaagatgataataattgtttattgatttttaggttaagggtagttgtgtcttatattttaaaatgggggagtaatggtttattaagaatctaaggtttgacttcacgggttgcatcatcatctactccctccgtcctaaaaaaagacaaaccccggtttccgtgtccaacgtttgaccgtccgtcttatttgaaaaaaatatgaaaaaaattaaaaagataaatcacgcataaagtattaatcatgttttatcatataaaaacaatgaaaatactaattataaaaaaattcatattagacggatagtcaaacgttggcacgagaacccacggtttgtcttttttttttttggacggagggagtaactaataacacgtcatatttcagtttgactaatatgcctgctggaaaggctaagctctcccacggccccacccgtccagttccaggctctcagagatcactcatcctaacagcaaaattgaatcaactgtactatctcgggatatacctaccgggagatgtatatcccagcctctctcggatccttatcccagttgcagcaaagcgtacaaaaagagtaccacgtaccattaagtactccacagtggaatgaggcaaacaaacagcctggccaaacagaggacctccaacactcgccatggtcccagagcaccaacactcctcctttacaggcccaccttcagtctgacctgcagatacgagcaaactgttcctctgtgccatatccatggaccatccaaaggtacgcggtagttctgcaaaaagaaatgctactggagtagtagtaaaagtaaaaaccactaagactattttttctcaaatatatctcatattaatatttacctattcaaaaccacatcattacaagtacttttatactacgcgatgtgccattttctacacactggacactattggacccacgtgcaagcatgtacccctgaaaatcaatcatatctacgaaactggacacacgtgcgttcagattcatagctagaaattcttttttttttatagagtagtatttttctatcacccaaaataccccgctacgtatcttgtctctcacctcattgatatgtgagccttacatgtcatcccaactcaatcatctcctacagtaaggtagcggcatcctcattggatgacacactcatggcgagatacatgctcccttgcagatggaagacagacgggaatggacacaagacgggcgagaatggtgaggtccgccaccactagcgtaacatgtttcctcgggcaactaccgcacgacaagtgcgatggtgacttcgtcagcctgttccccgctacggctctcatcgctcggactcacttgatgttggctcgctcaccgtctacctcatgccatgatggtcatggatctatcgccgtggttgtctccctcgacgttggtttgtccatcgtcccgtttcccgttgctcttgctctgcctctccaacgtggatctatttgtaaaatatttttttttgaaaatggccaaaatataagtatttttttatataaatagatctttggtgccaaagtagttggcgtcgaggaactatttataaggaaaaaatatttatatgttggctcttttttaaaaaaaatatttacaaataggatctcgttgtcaatctttttttgcgctgacccctctatattttgtttgctggggatgtaagggtgttggtgctagtgtcgttgtgtcgttggtttagagacgttgaactttaacaacaacataaaaaaaagggtatattcttaaaataagtttatctatggatccatttataaaataagttttgaaaaggggccataatataaaaaatctaggccgttttggcgacgaggaaaaaagacgtgttttgagttgcgaattttgtatgtgatcaggaagcagaattattgcttttgtacttgcagaaattcattttttgcagaaaaaaaatggagttgtggccggtcagcttaaattggatgggcacttgtcttgaaggcgatagtacgcgatacggttggctttattgtccgcgctgcgttgaattgacactactgactcgcatgtttaggcattgaagtgactgaaaactagggatagttagagcatgtataataacagactattagcaagctataaacatattttaataatataagcgatgagagagaagagcagcggtctacagatctatagccaactgcagcacggactccaaaacacaatgtgtgtatgataggtgagaccatatattaatagtatagtaagtggctattgtatgaattagctattagattagttataaataaattaaaaccggtagtaagactatactattaaacttgctcttagtgcacattcctttaccgctgcaagagtttctctgtcacccttcgtactcctgtgcgtagattgtgctcaagtgtccattgtccgcaatctgcatgcaaagtcctgtccaaatttctccgataaacagaaagttcattttaacccctcaattattcgttctgtctgagacacaccctcaaactctaaactaggtagaccatactcttatcaaggaatgtgttcttttctcttgaagataaagataaatatgaagattaaggctgctttcgttctaccttcttcccaactccctctatcttgttttccgtgcgcacgtttcccaaattgctaaattgtgttttttttttgcaaaaagtttatatataaaagttattttaaaaaaattcatactaatctatttttttaaaaaatattaaatattaaattaatcatgagaaaatgtgtcgcttcgttttccgtgcggaggggaggggttcccccaataaacacaacctaagtattttatgtaaaatgaggcggattaacatataattaattgagttttaattattccaatacagttccgttgaccccactctcctctctctggtttttttcttaagttatgctgatgtggtgatttaatcaagcaaaaaataaataattggacccacatatgagctgctaacctgccatctatctcccaccctatctctctttcccttcatttttttcttcgtgagatgagcttgacgctagcaaagagtcgtggaaccatggtccccactgtaccaagagtgctcggcactaacgtgaagggttgagaccattattcacggtggtgcattggacatggtcggatggcttaaaatgtaatatgaaaatgtgatattataaaagttagtcaacatagcagaataacgattaaactttccgattgctttggtcattaatcattcaagacatgccaaatgatgacacagaggcacacgatatttcttaacgaagttcagtcgaaacctacaccttcgaagctttgattatgaacgtttctccccaaccaacatagcacctagccactacgagtacttagtatcgctaccatcttatctcagcgtgtctgcagtatattgtagtcgtcatggttgtattactctaacttcacttcctatcacttattataactttgaatttacttattatgtataactgccttgtactctcaaaaccggacggaaagaaagcactatttcactgaactagatacccttaacggcaacaagcaacagcatgtgcacacacgaaacgacctgcccgtgcgatggaaaaaaaataaacaaaagaaaacaagcaaagaaaattaaggatcgtacgaatgcagttgagtcagttgacacctgcccggacgaccggacgcctacgccacagggcagccacttgtgctttgcattgcttcgcaatatcgcatccatccaacggtgtcaggcagcagcagcagccgcaccggcgagaaattccgccagtgtcggtgggcgcttttggcccccggaccaacaccaactgatgatgatcaggtcaaagcttagccaagaatgagatgattggctctgctgccggcaccgccatggacaagagaaacgtaagagcaagtttaattaatagtacggcctactactagctccaaatcatttatagccaatataatagccaatttatacaatagttacttactacattattaatatctggtctcacctgtcatacacacataatgttttggagtccgtgctgcagctgactacagatttatagcccgctgctcttatctttcttcctttatctctttaaaactctaagtcgaagtagaccccggtcgccgttcccaaaaaatcaggctctgttttgaaagagggtctttttcataataattggcacacacacctgcaaagtgcgagtgatctgggcgtgcacccgtttcggaggtgtggatttggttgcgagatggtgaccggacaaccgagggagtgtggttgtggtccagtgaaatgaaaaactgacaaagtgacatggatggtaatggtatgcggctcaagtggcagaattgctaagggaagcttctggcccaaggtccaaaatgctgggctatagttttgggtgttctatggcccgttttctaacaaaaagaacactgatgttcaggacacatttagtggaatatgtccactctgactccctcaaatatagctccaatctgattcatacagttgaactgtaaaaccggatatctgactcatcatgaaagaaaaaggaaagaataaagaatgagagaagaagaaaatgtgacattgatatgtgggtcccacatgcttagttggactattttttctaattaagaaatcaattttaatccgattttcgttagcattatttttaaactgctagatggtttttttttgtgtgaaatctctttatatatgttactttataaatccagttttcaagtttaaaacaatcgtgcgctaatagcttttgttttttacgtgttccgactttatcttcatcttgagtgaacttaagctgggctcaatcacgagacgaatccctagccctaatcactatcatatatagtagtactccacttaagtaagtacatactccttcctcagattcacattttattccaaaatagttgttatattggagtactaattgtcttatcaatcactttcaattcaaatctctctcttttctactgtcaaccgcgctcatatatccaaccatacagtatttaatagatgatactatactattttccctcaaactttaatctatgccaattaacctagaacgataagtaatatgggagggagtactacagaattttgaaggcataaaagctctcacagcccccctggattcttggcagaatctgccacccctggaactctaccgaacagcaccatagcttgacattgatggttgatgcagctccactaaaaaatccacggactcgcgtgttttttttttattttgaacgaatcgaccaggccgtcaatctattatattattaaattaatagaaaaaggagcctccacgttcgctctcatggcctaaaaattctcacattaatcggagaaaaacaagcagagtccatataaaaatacaatttagaaatagctgaaattcggaattaaaaataaggaatattagaagaggagactagagtccatatagaaattttcggaattaaaaataagtaatattagaagaggagactagagtccatatagaaatataatttagaaatagctgaaatccggaattaaaaataagaaatattagaagaggagactagagtccatatagaaattttcggaattaaaaataaggaatattagaagaggagactagagtccatatagaaatacaattaggaaataactaaaattcggaattaaaaataaggaatactagaaaaaatgcccgtgcgttgcaacgggtgaaatctattttaattttattatttttatatggtttagttaagataaaattcattgttggagttcgcttggatatatatatttttagaaaatcatgagctgcagttaggagtccgaccgtctcaagttggcatgcgagtttttttaaacatacttcttatatgatttcttctgtattaccaaaagtgaacgatattaaaaaccgactcaggatatgtatttcgaaaagcaaatgaatttaaaaaacgactcatacacggatgacgtaacataataccggcaaaaacatatttaatttttataatagtagagatggaaaatttgggtgatacggatacgatcgatctgagaaaaattattggaagcgatctggagacggagtcggacaaaaaaaaagggctattggtgcgatctgagaaagaaaaaaaccgtgcgctattgggagtcagacaaaaaaattgtgcgctaaaaaaacaaaaaaaccgtgcgctattggggagtcagacaaaaaaattgtgcgctaaaaaaacaaaaaaaccgtgcgctattggggagtcagacaaaaaaattgtgcgctaaaaaaacaaaaaaaccgtgcgctatttccaattgggggcgacgcacgaatttttttttggggagacaagaaaaaaccgtgcgctaaaaaaaccgtgcgaaaaaaagaatacgctatttccaattggggacgatgtacgcaattttttttgacaaaaacaccttgaatttttataataggctagaaaaaagtacttgtacgttgcaaaaggttgaagcaattttaatcttaaatattactcacagtctacaagatatcctacttaaaaaaggaagctcgagattgatcaaggagctggccattatttgcctgatgaaaataggagctttgctatgattttgcatccatgtaaaacctatacacatcatgcgttgataacagccagttaggtagttcagtattgatgtttataatctcatcgttgtcccttgaaccagactgaaacggattacggattctatgtatgcatggtgcggtcgacataggaaggtccggcccgtcttagctcacgtcgtctaccgcagcagtaaagaccgtgcgagatacggaagaaggaaataaatcaggctatgcggattttcttcgcgcagagacgacgtccgattgacgacgtactaaaatttgagacaaaaacaccttaaatttttataatagtagagattagaagtagattatagggtccatatagaaatacaatcaggaaataataaaaattcagaattaaaaataaggaatattagaagtagagtatagagtccatataggaatttaaaactaactaaaattcggaataaacataataaaattaaaagtagagtttagagtccgtataaaaatataatttacaaataactaaaattcgaaattaagaaaaacatgggaataagagtttaaagtcaatatatgaatacaatttagaagtaactgaaattaaaaattaaaaattaaagaatattgaaagatgagtttagagtccacatagaactacaattagaaataataaaaaataatattggaagaagagcatagagtctatatagaaatacaatttacagaaaattcagaattaaaaaaagaaatattaaaagacgagtctagagtctatataggaatatatataatttacaaataactaaaatttgatattaaaaataattaataactaacacctatataaaatgcaatatgaatattacacattagtaatttcgtaaagttattgcaaaatttaaaattatgttgtcatacataatatatttgaataatataatgagaaaacatatatgttattatataagagaaaatacaatgatgttagcggcgcaatctgcgcgggccatcatgctagtttcattgaatagaggagacgaaaactgtaaaaaaggataaagtacagaaaacaaaaaaaacctagggccgtggccctaactataggcggcgagatttttttgcacccgctaacccccatgtttttgcttcctcctttatctttatcttggctagcaaagttagcaccagcaactccttgtgttggaaagtcctccggttcctttcgttccatatctcccagttgacaagcaaggctaacatgcgtagtgccttcttaggtgcttctcgtatgcttacggtggcctcccaccactcatgtaccgtcaaaaatatttgccagttagaaggtcttagatgttcatagtctgtccactgcgcgatttcattccagattctccttgtgtatctgcattccgcaagcaagtggagagctgtctcttgagtctggcgacataaagggcatgtggatccgttgggccagcctctggttgctagtctgtctgatgtccacactctgttttggagtatcagccaggcaaaggtcttgcacttgcatggtgcccaaggcctccatatcaatgtgtcaaaatttgacgatgttgtacccaacagctgcgccttataggctgaggtggctgtgtattcgccgtggttgttgagcttccaggtgatctggtcttcatgttccgtgaagtgtacattccgaacggcgctccaaatagtgatgagctcgtcaatcagatccgttgtccatccttcgtttgttggtagagcaaggtcgtgcagccattggtatgctaaagcggcatgtttgagggacctgctctttttcctagaggccgcgtggactagcggtgcgacatccttcaatcttctcccttggactcacgtgttggggatcagagaacttcgggtgtgtttagtttatatcaaaattggaagtttggttgaaattgaaacgatgtgatggaaaaattggaagtttgtgtgtagaaaagttttcatgtaatgaaaaagttgaaagttttaaaaaatattttggaactaaacacggcgtccatgttgagttgagctccgtttcgtttccttctcacagctcgggggcagccgcagcgcgtgtgatgctgatgccacgcaacggcgcgaacacagccaaagccaagccgcgtagccgcttgattaacagtgcagtgcaggcaaggggtaaaaatcgagaaaattgacatttagccattctcagggtggggtttcgccagaatgccatcgccaaatgtggcttcgttataatgccatcttcaaacgaccccatcttgccatactgccatttcaaccaattttgattatttgcaaatattttccactgttttgcttatttggtttgacccaaatgcccttgcctcagccgtggggcccacttgccaggagcgtcttccacctccgtccgccaccatccttccctctctccggtgaactcatgccccaaattgacctccctcctcggttgctctcgccccaaattaaatgcaaaaatcggttcctctcgtcctcctcatcaattcccccaacaaatcccactcaaatcggcttaactcagtggtggattttgaagtccctcttcaatggcgagctccaccatagccagcgtcgatctctctccccgacgaggttggagcgggcaagcggctggacgccgtggagtggagctggctacggctgcacgcgcgagcaggttgcctcgacgaggagctccgccgcgagtcgctgcccacgtcgaggagctcatcggagaaggaagtgacgccgtggcgcgcggtcaggtcgagcgcttggtgcgccacgccgccgagccgaaccgtcgtcctcgtccacgccgacgccttccccgttcccagtcgcgccgccgtgccgccttccccgttcccggtcaccatcgccaccgccggaaacctacgcgcgaacccggtgagctacgccgtcgagctggtgagggcgccgaagggcggcgtcggtgccatccccggcgtggccagctttctcatcccgtagcggttcagcgaaggtcctgagctgcgccggcgccgcccaccatctgcaacgaagagagcaagaggtaggagaagagagatgagataggatccaagggtattttggtcatctcaacaagaaaaaatcattaaactgagaagaaatggatgaaatgacattgtaacatgttgcccctgtttgagggtgacattttaacgaaaccacttttgggagtgtcattccagcgaaaccccgttttgacagtggcaaaatgtcaattttctcgtaaaaatcaccaaaattatcgatatttggttacgagcttggtggctcgacgacgtttgaaagcgaggcgatgcgatggcgtccgcgtctcgtttctttctttgggcccagcttggccacgtacgtcgtacgtatcgcgacgtacgacacagtgcagccgcaaaaaggcctccgcatcggcagggcccaagtgtaaaacgtgctttcggtgcgccatcatacggcacgcggtacggtacaaacagcgaattccatgtaccgaagtaatttgctgttgtatagcttggacaatttgttaggatttaccaggtactacctccatattttaatatatggcgccgttgacttttttccaacgtttgactattcgtcttatttaaaaaaattatgtaattatcatttttttactgtgactcatcatccaatattctttaagcatgacataaatattttcatatttgcaccaaaattttaaataaaacgaatggtcaaacgttagtcgaaaagtcaacggcgtcgtacattaaaatacggagagagtacgtaatttgttagaccggatagatttatatcattggaaaaaaaaaggagatgtgttaagatggcactccaagtggtgcttcaggtggcttaaaaaaagctactactcaccagcggctaaatcatattttcactggtggccaaaggtaagtgaaaatagagtattttcacaagcaaggattagccacttgcaaaaatatattttcggaaagtctaaaaaactgtcgacacatttttctttagaaatatgtcgatttctgatccattagatcaactgtaggattcgtgctattttggttgacgaaaataaaattgtactgtaaagaatcgaacctaggatctgacttgtccagcggccctgaccaactgatcgagcaaagattttggcttgaattgaaattacatactaattacacttaaattacatactatttacatatgtaatttagaaacttacattgtaaatacactaaaattacatatgtaatttagagacttacatatgtaattttaggacttacattataaatacactaaaattatatatgtaatttatggacttacaatataaatacatactgactattttttggtaaaaaatatagcgccataaatatagctactccctatattttttactgacaggtatctaaaaagcaacatttgccaaaatcaatattaacagacgaaatgcttaacccacctgcgacacaaaatatttttggcacgaaaaaaaatcagcaaatcctccaaaatcccctaccacccataatccattcaccaatcacaacttccatcacaaacctcataatccattcaacaaattcattaacaaactttataatccatttacaaattacaaattcatcacaaagagtgatcagagagaggatctcggaaaaattcattgccgaaaatcagtagaagagggaggaaggtgttcaaattttgctttttcacaattaagcacacgagcaggttttttttgacaactttattgactgcctgccaagagagtagtatacaaactgtctattctttttgaaggaatggaaatatggaatgatgtatgaatacgcacgcttcttaggctcttaaacgatgttttttataattttttttatataaatgaattcttatgaaaatgttttaaatctaattttcaactttgtaatatttaatttattcatcccactcaaatattccaaatcattcatcaatttaaccacattggaaaaaaatgaataggggccaatttggccaagaatcaaaaaacaaagtgaaggcatgcaaaaaagttgaccggcatatatcggccgtccgatctgcgatgaacggttgctaagccgacctcgagccgtcagacccacattagggcgctctctgcagtttgaatcgcatggacgctcctattattccggggtgggcctggatgcagcctcaaaagcctgcgttggtcgtgcaggccgagcaaactgccacttacaagcgggcccatctcccccttcccggccaggcctgcacgtatctcttcctcctgccattcacgtaccggcttaaccctgacacgtgggcccgacaacatcgtgccacaaagtacacatcctgattcccttttaatggggcataatgttgcgtttaaactcgatcgatcgatcgatcgaccatgtatataactatatgtgtacggactcgagtatacattcatgcatgtacatgtgcgtttttgtacgatgtgacagtgagcgaaaggccggtctgatcgttcggcctatagcagcaactaaaattaatttatatgtaaacattttatatctacgtacttaattgcttaattgcctatagtaccagtctgtattatattataagatgttttgattttctcctaagtaaaaaagacaataccaccaacattttgaacccaaaataaacatattatcaaaatatatttaatattagatttagtgaaactaatttgtattatagatgttattaatttttttataaacttaatcataactaaaatggtttgattagaaaagatgtcaaagcgtattataagtatgaaactgagggaataacgttgaaaatcaacaaataatgataacagatttaaagtaagtttaaaattaagttttaaaatttaatactattttttttgtggctgataagttaaaaggcaaaacatggaggcgtctcttgacctaggatgtcaacaaagacaaataatagcatcgctagatagcagtgctggaagtaggcaccaatagctcgatgattgcatcagaaagagcgatgctaaaggctttccctaatccctttcttttcgagcggcctatgctaactaataatgtacataacgcaaagctaatttcgctccacttgaaatgctacagtctgcaatgatagcgttgctcgcctttgatatttgatgatactactactactgctgctactgtgtgttgtgccgtgtcgaccccagtggaggagagtgaggggtccaaagaatccaaaaaatgcccggcccatcagcctaattctctcgttttatttttcttttctgaaaaaaaagagcctaaatacgtcacgtaatcccctctctctctctctccccggatatttttatccattgggtagcccccaagaaaaagcatggacccggaccagaacccgcaaaacccagccacgtaagcagccacagcagcacgggcacagccagagctgaagaagaactgatcgataacgagagcgacacagatcgatgagaagaagtacaggtactaggatgaattagcagatggattacaacaagcacaccgctgtacaaaaaaaaaacaaaaagaagagaaaagaaaacaacatatgctgaagcgaagaagaagaaggaagaagaaaaaaaaaactgaagttgagacatgacaaaagcacgagcacctaccggctcgacgcgacagagtagtcctagcagttataaatccgggcgcggctcgatcttgagccgcgatgtggtggtgaggtgaggtaggtggggtcttcaaagtttggaggatcttggcggcggcggcggccgccgccgtcgtgccggagcaagcggcggctactcgtccggcactcggtacgcgtcggcggtgacctccgtcagccacaacccagggaacagcgactgcacatgaaacagtagcaaccactgtgagtttgagtttggattgcaggagtgccattcttgcacacaacaatttaggtttaataaaatattaagtctaagcatacgcttaaagctgtattgtatcgagggaataaataagaggagggctaattgggtgattaattaaataatggtggtttgggagggggagggggaggggtagtgtggggaattcgccttacatcgagctgccgctgtacgacgcgcggccgcttcctcggccgccgccgcggccgtgagccggtcagcgcgtagatgtcctcctcgatctcctccggcgtgagcgccaccgagaacggcgcgcgcttccggcgccgcgacgacgacggcaccggcaccgccgccgccgccgcccacgacatggaggcggctgggcgccgccgcgtccgctgccgaaggttccacggcctcgctgcaccgtcggcttgcggctgcgccatggggagaagtggaggcggaggcggaggcggaggcggcgccttgagctcgggctccgagtccgcctccgcgggtaggctctcgggcttcgtcgtcgtcgtcggcggcggcggcggcggaggcggcgggggtggggggctaggctggggcacgcggagacggtcggcggcgtctcgtaggtggcccatgagcttaacccggagctcctcgatcccaccgtcgaagggatccttgccgacgacgacctgcacggcggcggc

SEQ ID NO: 6954 - DNA, 78089 bp, Oryza sativa
tgccattgttaccgttgttcccaccgttaccattgttcggagtcgatgccgacgcgccaccattgccgccgccgccggcggcgagcgcagcgggcaccaggagggcgacggcgaggaggaggaggagagcccatcttgctggccccgccattgctgcgtggatgctggtgtgtgctctgcgctgctctgctgggtgctgcgtggctttgccgatttatagtgcaggatttgcaatacccgcatgcacgatgaagctgagaccggtcaggggattgactctgctgcactcacatgtccaattgcagcatgttcccgtcgccggcaggaatggaaagccacctttgcttggcttcatggcgattagattagaacagctaatcgccaccataattgtgctcttttgatttatggatatgtctggattgtgttttgtctctgagtttctgaaactaagctgctggatgcgtggacagagcaggcacagaagagaataacaaagaatgttcagagcagtgtttgtctgaattttgctgttcttccttgttcatcgatgttggttttacagtgatcttactgctcttgtaaaaaatcgaaattttcacaatgacgactgaaacgaccacgtacatacttgcatgcgttccgttgaaatactcgcataagaacttagttatatcatgagatcgatcgcttcatcgctggtacatgtcttattcaagagaggaaaatcttcagcacgctgtgcatcacgtgcaggctacgaattcacgtcatgccatagaatgttcatatatgcagttgccatcttgttcagtctgcttctgctgtttataactgttcagcagttgacatgattagtaaaatcccttttcttttctgcagccaaaagcccagatattgggcaagcaaactgaagccatggtgtctagccatatagggatggtccagatggcctctatgaatcactcttttatgttggtccaaatggcatagcttcgaggttgctcaagaaccatcaggcaatctgacagatcagattcagtcattcagagatggatgaatcggtggcgcgaagtgcgacagatcagccaattaggggaagcctcgttggcgtgcacgcgtgctcgttgaatttgagcggaaagatagtatagtactcctaccttcatttgtaatcagaacagttttcaaaaacctgcacaagatgcatgcatgcttcagaatgaattcaaaatctgacagatcacttgtttgtaaatcgttgtgacaagcatctggtacaacatgtcttcacttggttgaatattgtcatagatggattggtgatttggtggtagagatacaagataaaagcagagaacacggacgaaatggcaggattttgttggattagaagtgcattgcagtgccagtgcatatggccagatcatagagggtttaactacaaacatgaaacatctatggttgagtcaataaaaacatgcattgatcatgagagattactggtggatgttcagttcttttgtttactgtgcactgagaggctgattctaggaagttcatactaacagatatataccaccagtccaccacataaagcgtatgttattggtgagttgacgacctcactggaatcaatgcggggattttttcatatatttttaccaattgtcacaagtcaaaaatatatgagcaaatgggaataaatacttggagaacagcataaggttgtagtggtaattaaccatacacaacttgatagatgtgagttgaatacgcagcatagactgcagtggtgattaaccatacacaacttgacagaccaaggtggtttttttctctatcggtgatgccacttgtttcttgacatgtcattcaaagctatggaaaaaaattaagaaaattaagggcccgttcagattatagccaaaataaaccttaccaaatttcggcaagatgacaatattgctaaaaaccatcttgctaaaatttgggcaggatttcttatgtatttaccaaatttggcaaaaaattaaacgtagacatttttttgataaatttaccaaaaaatggtatggttgaaaatggcatcaaagtgagcaggccctaacatgggaaaatttatagcacatggttaaatttatacttgttggcatatcacatgttggtctactctataaatttttcaataactagtataatgtccgtgcgttgcaatgactttttttaattgtttaatattttatcattatgctaattttgctatcattttataaagatgaaaatttcataatattctattgtcatattttcatgtcgacatgatctatagcatgtggaggctaagagacaagcaacttacaattcatgggtctcgcatggtagttgcctggtggtggtgaccaccactgccatcttttatattagtatagacaattaagatgagaaaaaaaataattgaagagacgttctctcttgcaggacaaatgtctttcctttcacagataagtattgaatacgcactatagaccgtgtaaaatatccgcgaaaaacatgactgttctctagcagtggtattctcttttgatttaacgataaaattatctatatttatattactttaaaagatagtagttggtacttgtgtaacacatgtcggtacttgtgtatatgtcactaaaaattaactatggtatttatttctttttgttttttatgatgaataatcttgtttcaaccaagtagaatccattttttttaacaaggacttcaattatttgctattttgaataatctgttgcaacagttatttgacaagtaagttgtaactcacgcaaacctaacatgttaacactgcatactacagttgacttatgtatcaaatcgtcgcatttgtcttgatcctaaatttgtccaccaatatttccaaaaagttccaagaaatataattaaagtgaaagctcctaccaaattttgatatagcaaacaagattcctgctctaaatgttaaactcgaaattaggtaaggaaaaaaaaaacaagactagaagtattatttccaaagaactcttatgttcaccctgtttgactctcaaaaagcacaacgtagcataccacccaacccagcaacacatactagagtcagccagccactcagcccaactacagcaactgcatgtgggccctacctccctccaacccgtatggaccccacctgtcagcgacggaaagtctcactttagcatcgttagcttccacgacaagcataaccccacgcccaatcagagcgcgcctctcgaaatcgcatagctatttgcgcgaaaaagcaatttcttattaaagagagggaaaaaaaaaggaaaaatctaaaccccccctctagcctagtcccaccactaggactcaacgagaaggggggcaggtgtccgaagcggatcacggcggcgggagagagatccggtggcccgatccatggctgcggcggcggtggcgcgccgcgtcgtcttggtgctcgtcctcgccgccgcctccctcgccgcggcgccgcgcggggcggccgctcgctcgctcggcggcagggagggccccggggaggtgcgacgccgacgccgccgtcgacctcaacgccaccaacttcgacgccttcctcaaggcctcgctggagccctgggccgtcgtcgagttcttcgcccatgggttcgactctcgcctttgactcgtttttttctccccgattcgtgactgaggcgttagttgtagtacttggtagaatcgataagtggatgagaatcgtggtagtccgatggcgtgagatgcgactgcggggtttcgtcgtcttccccgatgtatggtttatagaatcgaaatgatttactcgtttcgtcgtctgtgagcaagtgaatgccaatataatccacaatttttggggtttcaagcatgtagggttgtgtaggtgttgcaaggtctgattggtgggatggatgcgtgttgttttttttttttttgaacgaatcggcaagctgccaatttcattgaatagagaaggagtaaggatgcgtgttgttcaaaactcgatgagagtaaccaataaatgcttcgctcgtactaccttgaaatgtcatgtgaggatgcgaccctgggagtgttgtccgtgttgtagtactgtgacctgtgaagttgtgagctagaagaaaggtgcagacatgaatgagccccgaagcttggaaatttgttatatgtaggactaaatcggatgtaggccagcagttaattatggaaaatcagtggagcatttactgtaatgatgaaagaggaattgactgggttgtaagtttatcactatatagtttctcagtgttgccacttactcagagtattgcttcgatgcgatatttcttgtgtgatttggggtgtgcggaactttctcaaaagcataagtacggtcatttttgctctatgtaagttccactgttccccacattgggctataaatgccatgccgtttaattctaatttgcagagatcatctctttttgaaattttagcttcatgagattgagttatatttaaatgcttcttttggatgttaacaggaaaaataatacacttatatgagcattgatactgtacctcacatgatttaatggaacttgacgatttgattaatacacatggacctgtttatggggaatcaaggacttgaatgattagcatccttttgttatccttttcactctaatgtccatgttctggtcttccaaatattccatgtcaagttattttgatattatattccattggttaatcattataagtcgtcactattcagaataggttagtccatatgcattagatatgaactatgaagtggcgtatagtttctccagagcctcaagttttcacttactcgagataattttaattggaatgaacttctattggtcatatcggtattcttttttttttcttttgaggctgcctagatggcatttgttttattgttgaattgatgctaattgaaatacgtaccgtgtttgctcaggtgtccagcttgcagaaactacaaggtatgaagcttattgtggtagctgtgtacttaatttaaaaaacagtggtgcacagtgtatttatgaacagcaaattgactcttgctaaattcctttcttacatccagcctcattatgagaagggtgcaaaactattcaatggtcggacgctgcacatccagggttaatactgatggctagggttgattgtgcatcaaaggtatagtagctctggtgaagagtgataactttcgtcagtctcctaaatgtagacaactaaagcacttacaaaagggattaggtttgatggaatggtccagttaaatccttaactggatgatgagattatccacaggagtatatcttcaatcctttgatatctatttttcgttaccaaactgaaagctatattgcaatgaagctttggcacctcttattttgactgattttagcttccatgttttgtcaaaatgtccaataatttggtaatttcaatggagtaatactttatttcttttgattgtttgacagcacaggtgaacatcgatctttgcaatagattctcagttgaccattaccctttcctactttggggtccaccaacaaaatttgcttctgctaagtgggatcccaagcaagagaataatgaaataaagttaattgatgatggaagaacagcagaacgtttactgaagtggataaataatcagatgaaaaggcaagttattatcctagtctttcctgctctacctaaaagttcagtagatatggaaacaggagctacctgtactatgctcatgcctctctctattgactgttacctttttggtttgtttgaccattataggcatgttggtattttattgatgcattgtttatttatggtatctgcagctctttcagtttagaagacaaaaagtacgagaatgaaaatatgcttccaaagaatgcttcggatcctgagcaggttcaattatcagatatttctttgaaacaatttgcttgagatactgctatgtgcactatgtttcaattttctttaacgtttgttgacttaattcgatcttttgttttagattgttcaagcaatttacgatgttgaggaagcaacagctcaagcgttacagataattttggagcgcaaggtgagttaacgatgaaatttcacagcagatgtgatgtttgctcttctttttctgactatggcctaataatgttacttgcaaactgtagacgatcaaaccaaagaatcgtgattcgctcatcagatttttacaaattttggtggctcgtcacccatccaagaggtacgagtgaacctttaaattcctagtagagaaaatgcatataactttctttgtgcatttggttgattctttaggtgccgaaggggatctgctgagctacttattaacttcgatgatcactggtcatcgaatctgtcgttaagttcacaagagggttctaaattgttggaaagtgttgcggaagagaaccactggatctgtggaaaagaggtgccacgtggatattgggtatgttgtctaatgctaggcctagcggttggcaatgaattcttcattaggcattcttttatactaaactagaaaatgcaacttcatatgaatcattcttaattttgattttgagatattctcattaaatgttgcagtaaatccgttatatgaatgatagcattaggagcaagcaacatcttgtatcttttgacatagtttacttcaacagcagcattatttgcatgtagcttctttagtactgagttaatctagtttcattgcagacagaggatccttaaccactgtagaatgtttagtcgacacacgtgatccacatattttagatcccacagcccatatttatttacatatcttgatcttatcacaagtaatatctgtacctagcaatagttattcccttgaattttctcttcttatttctgtgtgccaatgttgcagctgttctgccgcggcagtaaaagtgaaacaagaggatttaggtgacgcctctctctctctgcaaatgcttcgaacatatatctttacagcacctttactgaaaggccataggagttgataaactataacacacatacatctttttttattgtatcagctgtggtctatgggttttgatgcattcactaaccgtccgaattggggatggagagagccagtcaacctttacatcaatatgtgattttattcacaacttcttcatctgtgaggaatgccgcaagcacttttatgaaatgtgttcaaggtttggaaaactaactttgtgttgtaccatcattcaaaaaatatatctacgacatgcctgactgtagccatttacctgtagcgtgtcagcccccttcagaactgctcgtgagctcagtctctggttatggagcacacataacaaagtcaatatgagattgatgaaagaagaaaaggatatgggaactggtgatcccttgtttccgaaggttacctggcctccaaatcagctctgcccatcttgctaccgctcaagcaaggtcaccgatggagctgtggactggaacgaggatgcagtgtatcaattcttggttaactactatggaaagaagcttgtatcatcctacaaggagacctacatggagtctcttcagcaacaagagaagaagatagtttcagaggattcatcgatttctaatgctgcaagcgtcccaattggagctgccctgggtgttgcgattgccagctgtacatttggggcgctggcttgcttctggagggcccagcagaagaacagaaagtactcacaccatttacgctctttaaagaaaatatgattaggaaaaaacattttaggttggtagggtaccattgttaccgcgtgactacgtggaatttcatatcacagagaagtgattaggttctatttgtcaatttttttacaggcaaagaaagaactggaactgaaaaatagcctaccagttgctcaccctgcacttcatcagaggggctcatcaatgaatgtgtatttttctggacggattaaaatcttggtaagtgctccaaacagtgtgggaaaggaaatggtcgggcagtcagttacagatgaaaaactcacagaagtacgatgattaactcaagtgtattttttgtgcaacgatgtgagctttgttgcatcatgtcatagatcaacgtgtaatagtttgacatatagatttcggatgattggtgtatacgttcggatgttactatccatttaacgagtgaaattttgaattcagttcgtagctttctactaacctttatcgttctcagatatttacctgcaattaaatgctttgtgatcgatttatgaagtggagtactagtactactgacgccaaactgtttcacggcccgttgcgtcagcgcctcagcgagtgagcatctgtccgtcgcggcaccgggatagctaattagcggcagccgtggtgtcaaaacacacctcttttaaaagaataactttaatctaaaaaaaaatttgcatgggaaacttttatctgaaaactttggcctcaaaactttaatttcagtttgtagttaagcaatgcaaacctgaacttaagcaagcattggcaacggcgaaagtgcctattttatttctgaatcttctgaatgtgtttgacttcgaatttttagtccaattttagtaggatgatagaaagccatattccgcgcatcctttcttcttttgagaatttttcaaggtgatttcgtgagtcaaattcggaaagatgggagttcggagaacaaaactccgaccctcctgatgaatctgatcaaaggtggcctgtcaacgcaccgtcatctacttccggtgaaaagtcaaagcagtcttcgccttcgcttactcacactcctctcgcgccctatggtaaatttagttactcatccaaaaggctgatgagatgggggaaattgctcgcagttttttccaggagctgtacacgaaggatgagagcatcaggccgacggagcttttaaatatgtttgagccaaagatcacaggagaaatgaatgacaacttaactcgtccattcactgacgaggagattggagatgctctgttccagataggtcctctcaaggcgccaggatcagactgttttccggcccgattttttcagaagaattgggcggtcatgaaaaaggatgtatgtgaagccgttaagaagttcttcgagaatggtgagatgcaggaaggagtgaatgacacagtcattgttatgattccaaagaagaattcggcggaggagatgaaggatttcaaacccataagtctatgtaatgtcgtatataaagtggtcgcaaaatgcttggtcagcaggctccgaccattattgcaggacattatctctgaatctcagagtgcttttgtaccggggcggttgattacggataatgcacttattgcgttgaatgcttccacgccatacataagtgtaccagggagaatcagaatttctgtgcacttaaacttgacctgtcaaagacatatgacagagtagactggggttttttaaatggggtgatgcaaaggatgggttttggagatgtttggaggaagtggataatggcctgtgtgacatctgttcgttacagtgtccggctaaatggtaatatgacagagcctttctgcccaacaagagggttaaggcaaggggatcccctgagcccatatctgtttctattcattgcggatggcttgtccaaaattttagagagaagaaaggtggaaggacttatacagcctttgaaggtctgtcgtgctgccccactgccccaggtgtgagtcaccttctttttgctgatgatagcttgcttttctttaaagctaatattgatcaagcaacaagaataaaggaggctttggatctatttgagagaagcacaggacagttaatcaacccaagtaagtgctcccttctgttctctgaattttgtccacagattgcacaggaggaaattaaaattgtgcttcaagtcgaaagatccagtttcgaggagaaatacttgggcttactgttaaatatgtgatccaaattttgggtccacaatatattcggattagttttctagtagaacttcatatctatcctattaggtgtccttctattatcccctatatatactcttgtaagccatatgggaaggggtgacgttcccattgttattcccctacgtttgtaatcatctaccctatagtgatcattaccggttggcgtccgtggttttttcccgcaagggttttccacgtaaaatttatatcttcgttgtgcatctattttcataacaagtggtatcagagcattggagatcgatctactacagtcccggccaccggcgattttttccgattgaagaaatcgatctaatcgacggcacgcgtcgtcgtgttcgtcgttccgtcgaaattctgttcagcgaaatccaatccaaagcggagtcgacttcgtccttcctgccgtgcgagaatcagagcagcagcagcgcacgcgtcaggagaggaaaagcaagcagagagaaacccttccatctgcagtgcacgttcaccgaggaaaagtagggcagaagccagaagccatcgagataggagcagagcgctcctgtacatgtgaatttttattcacgttgaaattgctacgcgcacacaagcttgtctaccaggaagtttcagatctatactacgtgcacacgagaagtgtaccaggtttcgtgttttttgatagtttaccctaatttcttactagcaaatttcaggattaattcccatggcgagtttgaagtatgatctaccgctcctggaccgagacacaagattctcactttggcaagtgaagatgcgagccgttcttgcacaacaagacctcgatgatgcgctttctggatttgacaagaggacacaggattggtccaacgatgagaagaaaagggatcgtaaggctatgtcatatattcatcttcatctatctaacaatattttgcaggaggtgcttaaggaggagacagccgctgggctgtagttgaagctggaacagatatgcatgactaaggatctgaccagtaagatgcacctaaagcaaaagttatttttgcacaagttgcaagatgatgggtctgtgatggaccatctctccgctttcaaggaaattgttgctgaccttgagtctatggaggtaaagtatgatgaagaggatttaggccttattctattgtgttcattgcctagctcatatgcaaacttcagggatactatactttatagccgtgatactctaactttgaaagaagtttatgatgctttgcatgccaaagaaaagatgaagaagatggtaccctctgaaggttcaaattcacaagcagaaggcttggttgttcggggtaggcaacaggagaagaacacaaacaacaaatcaagagataaaagctcaagtatctaccgtgggagatcaaagtccagaggcaggtataagtcatgcaaatactgcaagagagatggacatgatatctctgagtgttggaagctacaggataaagacaagagaaccagaaaatatataccaaaaggtaagaaagaagaggaaggtaaagccgcagttgttactgatgagaagtctgatgcagaattgcttgttgcttatgctggttgtgcacaaactagtgaccagtggattcttgatactgcatgcacctatcacatgtgcccgaatagggattggtttgccacctatgaagctgttcaaggtggtactgttttgatgggtgatgatacaccatgcgaggttgcaggtattggaacagttcagatcaagatgtttgatggctgtattagaacattattagatgtgcggcatattccaaatttgaagagaagtctcatctctttatgtactcttgatcgcaaagggtacaaatattccggtggagacggaattttgaaggtaactaaaggctctcttgttgtgatgaaagctgatattaaatatgccaacctgtaccatctgcgaggtacaactatattaggtaatgttgcagcagtttctgattcgttatctaattccgatgctactaatctttggcatatgcgtcttgggcatatgagtgaaattggtttggcagaattgagcaagcgaggattgctagatggacaaagcatcgggaagcttaaattttgtgagcattgcatctttggcaagcataagagggtgaagttcaacacatctacacatactactgaaggtattcttgattatgtgcattctgatttatgggggcctgctcgtaagacatcttttggaggtgctcgttacatgatgactatcgttgatgattattcgcgaaaagtttggccttatttcttgaagcacaaatatcaagcttttgatgtgtttaaagagtggaaaactatggttgaaagacaaactgaaaggaaggtgaaaatccttcgtactgacaatgggatggagttatgttctaagatatttaaatcatattgcaagtctgaaggcattgtgcgtcactacaccgttcctcacacacctcaacaaaacggcgtagcagagcgtatgaacaggacaattatatcaaaggcccgttgtatgttgtctaatgcaagtttgcctaaacagttttgggcggaagccgtttccactgcttgttatcttataaatcgatcacctagctatgccattgataagaagactccaattgaggtatggtctggttccccagcaaattattcagacttaagagtatttggttgtactgcttatgctcatgttgataatggtaaattggagcctagagttattaagtgcatttttcttggttatctgtctggtgtaaaaggctataagttatggtgtcctgaaactaaaaaggttgtgattagtagaaacgttgtcttccatgaatcaattatgttacatgacaaaccttctactaatgttcctgttgagagtcaggagaaagtaagtgtgcaggtggagcacttgatcagttcagggcatgcaccagaaaaagaagatgttgctattaatcaagatgcacctgttattgaagattcagattcttctattgttcagcagtctccaaaacgttctattgcaaaagataggcccaaaagaaatactaaacctcctcgaagatatattgaagaagcgaacatagttgcttatgctttgagtgtggcagaagaaattgaaggtaatgccgaaccttctacatattctgatgctattgtttctgatgattgcaatagatggataactgctatgcatgatgagatggagtcacttgaaaagaatcattcttgggaattggagaagttgccaaaggagaagaaacctatccgttgcaagtggatcttcaaaagaaaggaaggtatgtctccaagtgatgaggcaagatacaaagcaaggctagttgctaaaggttatagccagattccaggtattgatttcaatgatgtcttttcccctgttgtgaagcatagttcaattcgcactctactcagtattgttgcaatgcatgattatgaactagagcaaatggatgttaagactgcatttttacatggggagttagaagaggacatttatatggagcaacctgaaggttttgttgttcctggaaaagagaacctagtctgtaggttgaagaaatctctttatgggttgaagcagtcacctagacagtggtataagagatttgactctttcatgctttctcagaagtttagaagatccaattatgatagctgtgtttatctcaaagttgttgatggttcagctatatatttgcttctttacgtcgatgatatgttgattgctgcaaaagataaatcagagatagcaaagttgaaggcacaattgagtagtgaatttgagatgaaggatttgggtgcagcgaagaaaattctcggtatggaaattactagagaaagacattctggcaagttatatcttagtcagaaatgttatattgaaaaagttcttcatcgtttcaatatgcatgatgcaaaactagtgagtactcttttagctgcacatttcagattatcttcagatttatgtccacagtcagcttacgatattgagtacatgtctagagttccttattcaagtgcagttagttcacttatgtatgcaatggtatgttctcgtcctgacttatcacatgcattaagtgttgtcagtagatacatggctaatcctggcaaagagcattggaaagctgttcaatggattttcagatacctacgtggtacatctagtgcttgtctgcagtttgggagatctagtgatggacttgttggttatgtggattcagattttgctggagatttggataggagaagatcgctcacaggttatgttttcactgttggaggatgtgctgttagttggaaggcaagtttacaagcaactgttgccttatctactactgaagcagagtacatggctatttctgaagcttgtaaagaagttatttggcttagaggtttgtacactgagctttgtggagttacgtcttgcattaatatattttgtgatagtcaaagtgcaatatgccttacaaaggatcagatgttccatgagagaacaaagcacattgatttgagatatcactttattcgaggtgtgattgctgaaggtgatgtcaaggtatgcaagataagtactcatgataacccagttgatatgatgacaaagccagttcctgctactaagtttgagctttgctcaagcttggttggtgttacagtatagtcctagagactatttggcgcgcggtgattttacctacatgaggtatctttggtgattgatgtttttatgctacaagaggaaattcgtctcaaggtggagattgttaaatatgtgatccgaattttgggcccacaatatattcagattagtttcctagtatgacttcatgtctatcctattaggtgtccttctattatcccctatatatactcttgtaagccatatgggaaggggtgacgttcccattgttattcccctacgtttgtaatcatctactctatagtgatcattgccggtcggcgtccgtggttttttcccgcaagggttttccacgtaaaatttgtgtctccgttgtgcatctattttcataacacttaccaatgccggaagggagaatgaaggcagagcaatttcaaccaataaaagaacgatttgcaaagcgactaacatattggagtgaaaggtttctgtctgcggctggaaaagaagccttgataaaaagtgtggcccaagccctgccaacatacacaatgggtgtgtttaaaatgccggaaagattttgcgaggagtatgaacagatggtgaggaacttttggtggggacatgataaaggagaacggaaggtacactggattggatgggaaaagttaatgagtcccaaactattcggaggacttggtttccgagacattagatgctttaaccaagccttactagcaaggcaggcatggagactgctcgacaatccagatagtttgtgtgctcgggtgctaaaggcgaagtactatccaaatggatcactaattgatacggccttcccttcaggttcatcaccgacttggaagggcatcgagtatggactagagttactgaagaaaggcttgatttggagaataggagataggcgtcaaattaaaatctggaggagtcaatgggttgcacatggggaaaacccagtgattctgcagaagaaagcttggaatcgtctcaagtatgtacatgagctcatgttgccggaaaccaaaacgtggaatgagcctttaatcagacatatagtccaggaaaatgatgcatctggaattctgaagatcaaaatacctagaagggagatgacggactttccagcatggcaccttgagaagacatgaattttcactatcaggagcgcctacaggttagcatggaatcaatcagggaaggttcgtgtggaagcttcatctggtacggcgacaaatggtgaaaggaagatctggaagaatatatggcaaacaaatgttcaaccaaaagtgagaatttttgcctggaagcttgcccaggacagattgcccacttggggaaataagagaaagagaaagataaaacagagtggcatatgcccgatttgcgggatgactgaagagaacggttttcatgctacggtggagtgcactctagctagaggcttacgggaggcaatgagagcacattgggtgttgccggctgaaaggagttttgcatatacagggccggactggctattagtgctgttggatagtctgcagagtacataaaaggagcatgttatgtatttactctggagagtctggcacctgcgaaacgacatgatccatggcaaaggaagtgcatcaattgctgaatcagtcagtttcttggttagttatgaaggccaactgttgccaatccgacaacgagaagatgacaagaaaggaaagggtcctatgtacagggaaccgaaccagatatctctatctacaagtatcaacaaactgactgacaaatggtgtccaccgccggagcgcttcgctaagctgaatgttgatgcagggtttagggaagaaaccggggatgctagtgtcgggtttatattcagagattgcaggggtttagtgctactggcggcccatagaaccctgcatcaatgtggttcagctgcctaggcagaggcgctagcatgtctggaggggatcagagcggcggttgacttgattcacatgcccattgtgctggagatggacaatgcagaaattgttagagatttaatgaggcatgatcagttgaaatcggcctgggcgacgacgattgaagagattaaaggagtgatgcaatgccttcagcaagtgcaagtgcacaagataaagagagaagcaaatagggtagcacctgttttagcacaaatggcaatgtgttctaggtcctgcgcggagtggaggttgtgtgctcccgcaagaattctagatttattaatcaggagtgtaaccctttatttaagcattaataaagctctctctttaccctcaaaaaaaaatctcatgttactttcaacttaagcaggtacatcagctgtacccattttcatcgtgtattgtctgtattcttcttatgtacagtaatctcacttcatcttgatttacttaagaagcgagtggccgcttacgcatgcactttttttttcacaatatttacaaagagcaactactcacacatcacaccaatgtcttgcatatcttcgtatcttgatcgcacatcttgagcccaaaacctcatccaagtgacatgcctttgtatatacacgtacacatgttccatctctgaacttattggatgctgatgacatgctgtcgccgcggtgactgtggcgcctgctggttgatgttcaccgcagcagcagcgtctgaaatctggcaattgcattttctgacggttagattgcagtgtgaaacaagctgcatggattgttcagcagcattgaactgcagattgtgtcttttatatcaagaattcagaatgaggttggtgaacctgccgctggttgcgtcgatgaagcagttcagttaaggacagcaagatgatgtacacaggtataacgattccagccgttctaagcatcagcagctggttcagaagcatgattttggctcaaataatcaatcatcaaagtagtagggtaatatcaatatgtgtgctattatctgagaattcagagaattacagtgatcattgcgacggtgtaagcatcgtgatcaccgaggaaaaccgagattgcgtcgtggagtagcaagagtaccatcagctgatgaatttgagtgtgtctgaatgttaatttttggtggtggcacgaaatgatgattcttttttttttcaggcacttacagttagagcaactatgcgacaatagattacaccttttgggttggggagttcaggatcgtagcttgttgaggcagcagcacttcggtctgtgttttgcatgacctgtgcttgaatgtaaccaggagttctgcaaatgataaagcttgagatgatccatgtctaatcagaagctcagaatcgtgcttcttttgtgatgatacatcaattacctgaagaaaattgagtttcttccatgttgaaacaactttgcaggtgctgtgtagtttggtgtgtattgctgtatccacagaaatacaggctactatatgttaatttctttgtaggagcaacttgttttgagatggccatgagtactaggtgttcggtgaaaatttcacctgtaagcatatctcacatatggtgtctcccttctcatcacaccacctctgaatgcatttgcgatgagcatactgaaagaaacatgtatatagcactgttacaaaatttatttcgcagcactactacagattaagaggtctgaaatacaggaacaaaatttatcataagcctaaaaatatcctgtgcagaagcaaaatacgttgatggcctaaatagattccttgaccaataaagttgtttaacaactaaatctggcataccccgaattgcagaaacggaatttaattagtttgatactgaattttaccttcaagctgcccctgcaggagcaaggggtctccatgtaggtctgatcatcctcttcctggcaaattctacattctacaagaacaccactcttctccctctcatcttgaacatcattatgttcagaagcaatcactgaagaaggcatggcagcagcagaggcctcatcaatggcagactgaacagtcgattccgttagcaaccggccggccattactgcaaagtggtccgccatccctgagaaagttaagaaaatccaagcacaataaagatcaaatcagaacacatcgtttacaaatacaaatatgaatgtaatttgcaagaaaaaaaaagcaaattgtgtatctgaacatgtttatctgacggctcaagatgattcttttccatttcacgaagaagtgagcaattgagcatagcaaacgatcattacctgcaattgcagttcaaaacagagaaaaatcaaggcatgagcttcctcgacaattcgaggaggtgagcaaatgcagaggccaagaaaggccaggaggaaatagcagctacaagaggaggcttgcaatgggggatttggatatctgaagactgaaacattgggagattgtatagagagaagcaagagatggagtagttgcctgtattattattgcctctttgcttgcttctgagacttctttttttcctgattatgctttagcttctgatatgctttagttgttcatgcagaaagggaaccaaaagcattagagaaatttgacagcaaaaacggaatgatgcttattgactcaagaaagctattcttttcgagcaaaactcaaggaatgaaggcacttgaccacaattgcaggggaaggtttgcatcatcaagtcatactatattgccatttgcctaaggctcaggattaccctctaccaacgcaaacctatcttacaactgcagagttaaaagaataaaaaaaactcgttgattctgatacatctttcggttgcctttctttctgaattttgacatcacttttgcaatgtgatttgctggtttggatagtggagaagttgacaggtgcagatgttcaatggtggattaggcctctctatggcttttaggaatttattattatttacgtatatctaatcccaaaagcgaggattctcttgcagcttctactgctagtatgatttcacagtgtttatctaggtgtattattccacacgtgttgcaccggattgtaattgaagctccagagtgacgtcagacggtcagagtgagaaccccgcaaaaaaaaaaaaaagtttcacggcgaaacatagggctcttcaccaatccggcccaatgagcccaagcagaagaactcattggtccaccaaagtcttcgatatttcggaaagaaaattaagatactgcaagcctgcatcgtatttttcaaatttcaattcacactatctctcacagctcacatccaaattgaacagtcctatcctaaaaaaaaaattgaacggacacagcatcacttgaaattctgagttgaatggtgcaccttgttttcaatgttttcatagtttgatccgcactgtatttttcacagatacttccatcgtcaaaaaaacgaatttaaaattggatgtgacatattctagtaatccattaacacaataaaactatgataaaactactgaaaaaaatatctaaattgaacgggcgcagtataacttattcaacgaaatacccgattatttagagttcataggtcgacgaaagaaaaaaaaagaagacatacactcttggccgttcgatcccatccgacggtcaggatatcccgtccacgtctctagcccagataaaccctacccccccactcctcccgactataaattcctcggcttctcccctccgccgcctcctctcctagccttcccctcctccgccgccgccatctgccgtcgagagccccggttgcccacccccgcggcgacgatggcgggccaggagtcgctcaccctggcgggcgtcctgcgcggccacaacgacatggtgacggcgatcgcggcgccgattgacaactcgcccttcatcgtctcctcctcccgcgacaagtcgctgctggtgtgggacatcaccaacccgtccaccgccgtggccacggatcccgaggcggccccgccggagtacggcgtctcgtaccgccgcctcaccggccactcccacttcgtccaggacgtcgtcctcagctccgacggccagttcgcgctctcgggatcctgggacggcgagctccgcctctgggacctagccaccggccgcaccacccgccgcttcgtcggccacaccaaggacgtcctctccgtcgccttctccgtcgacaaccgccagatcgtctccgcggcgcgcgacaacaccatcaagctctggaacaccctcggcgagtgcaagtacaccatcggcggcgaccatggcgccggcgagggccacaccgggtgggtctcctgcgtcagattctcccccaaccccatggcccccaccatcgtctccggctcgtgggatcgcagcgtcaaggtctggaacctcacgaactgcaagctgcgcaccaagctcgagggccacaacggctacgtcaacgccgtcgccgtgagcccagacggctccttgtgtgcctccggtgggaaggacggaaccaccctgctctgggatctcaccgaggggaagatgctgtacaagctcgacgccggcgccatcatccactccctctgcttctcgcccaaccgctactggctctgcgccgcgacagaggactccgtcaagatctgggacctcgagtccaagctcgtcatgcaggacctcaagccagaagtccaggccttcaagagccaggtataccttttgcactttgcctctctcgttagccttgcttgtcacatgtatcgtgcattcgttgctgcctgaatctgaataggatgtaccgcgtgatgcatgttctgtcgttctgtctgattaggatgtattgtgtgattcgttccatcgtggttctcgcgtgttgcattttggattcctggtgctattattgttacgcccttcaatttatcaggatccctctgtagtaggatagggtagttttgatgcttattaagctcattgcgagcaggttatccaatttaactcacagcatcatgttcatgtggtcaagcatcacatgtacgtatgttatcagcaggtcatatacataattagtcccgctgatttatatttctaggtaccgaatcctctgttctgtgttgatctaatgatctaatcagttttatgatctgttctcagtaatacgtactcatcaatgatgctgttgatgtttatgctcatcccttctccactgaattgtatacatgtatttatattactatatactaagtagatataaaatgctgcattttatttgtttacatgttagtttcatcaaccatggtgctgattggtccctcatgtgcctgtgtaactatttggaaaccagcatttcggtatacctctgcatatccttgtagagctgtagcaatattagtctctgctataagtaattcaatttaacttcaaactataatttgaccgcaccttctcactagagtggtacagttttgacaaagttgatctttacaccttgaattttgtgttagttttgcaaacttttcttaatgtatgttttgttattttctaccacggaaaccttttctgttacagttctcataccccttttgattgagcacatgcaatttgttatagaggatgtgcattctccttgaaatctcaatagtccttaaattgttctattgtgcactttggctgtttccccctagacttatattctactgtgcaccttgtattaatatgtattcaattctttaactgaacttgattacgcatttattttccttaaaaagaatgtgtactgacacctgccgttacatttgcttagatgctgtactgcacaagtttgagctggagcgctgatggcagcaccctcttcgctggctacactgatggaactatcagggtttggaaggtctcagggtttggcggctatgcaatctaggtggtgaatttgttgaaaggcttaggaatcttaatttaaacatcgtgatgcctatcaagtttttgacagttctgaggcataacatttgcctggtactttctacttcattttcattaattaatgattagatttgccaatgagcttatcggtactctggaactatggaagaggatccttatgcatattttttgtttttggctaagttgaaaagatattagttatgcaactttcggagcctcattgcctagatgtaaataatgcttcatcaattgctattttctgatgattttgatggtgctaattagcttttcatctgccgctgataccttaaatcttccatttgtttgccttattttttattatctttcattctgtggtttttaccgtcaccatcaggttagtttgttctggacatgtacattggatgttattgcgtttgtaatatgtgatgtttatttagcccctaaaagcctcttaagttaagaaatagtatgtggtataactacgacagaccgaatcacctggtgtggctgtcatctagcataagcattgaccgtattatctgcatttcataatcaaccacagtgttcttcagttggataatcaactgtcacctgccttctgttttcaactgtgaccatcgtcgtcatatcttgcctaacctctatcattttttaatttcatcgtcttctatgattgaaattttctcaatgcttagtttcttattaaatctatgattggaatttttctcgatgattaattacttatttaatctcaaacacatggttatgcaatccttcacgcaaactgcgtcctcgaccaatccagtttcacgacgaagtcgtcgacccgaacctggtcaattattcttcttcagattcagaaatcaccatgtattagcaactctcttaactcgtctaaaattgcaccaattcattctatcattgttgccgccatgtcgtcgtcttcctcattgtacaagcagctcggcctcggagccggctctcccgtctccgcctctcacctgcttctgctcgtcctcggcgccggcttcctcgcgctcaccgtcttcgtcgtccaccccaacgagttccgcatccagtctttcttctccggcggctgcggccgtcctggcacggacgccgccaccgccgccgttgctgcctcgccggtcaagaatgtcagcggcggcgcaagtgatgctgctgccgcgaccacggcggcgcggtcgccggacaacgacgtgagggtgctcatcggcatccagacgctgccgagcaagtacgagcggcgcaacctgctgcggaccatctactcgctccaggccagggagcagccgtccctcgccggcagcgtcgacgtccggttcgtcttctgcaacgtgacgtcccccgtcgacgcggtgctggtgtcgctggaggccatccgccacggcgacatcatcgtcctcgactgcgccgagaacatggacaacggcaagacgtacaccttcttctccaccgtggcgcgcgccttcaactccagcgacggcgagggctcgggctcgggctcgccgccgccgccgcggtacgactacgtgatgaaggccgacgacgacacgtacctccggctggcggcgctggtggagtccctgcgcggcgcggcgcggcgcgacgcgtactacggactccagatgccgtgcgaccgcgagaacttctacccgttcccgccgttcatgtccgggatggggtacgcgctgtcgtgggacctcgtccagtgggtggcgacggcggaggagagccggcgcgaccacgtcgggccggaggacatgtggacggggcggtggctcaacctcgccagcaaggccaagaaccggtacgacatgtcgccgcggatgtacaactaccggggcgcctcgccgccgagctgcttccgccgcgacttcgccccggacaccatcgccgtccacatgctcaaggacgccgcccgctgggccgagacgctccgctacttcaacgccaccgccgcgctccggccatcccacctctgaaccgtgttcttcttcttcgcgccttctctctctcgatcgttttcgtgacggattcccgttgaatttggcggttgttggttggtggcgggtagttgttgcgcgaaagcacggtggattgcccctgtgttcctagctgatttgttccaaatttctcgagtttaaaatagatatgaaatggatatttgttcgttagtgcttacgtgttctttgataaaccaagtatgattattacgctgacgtttgcagcgagagaaaaaataacaggtgtgtgacatcttcagaggaaaatcacgtctgatagagaatgacacacggtatggatagaacgagcaatggtttcgccacaatcgggattggattctaatctcgaggggatgtcccttcgggtacttttttttctttcaaattctatataaatgattatgaaaaattctgaaaaaaaatgtagagtatagtgatatctattggtccaccaaaaatcaaattaaaattctacctacacatcaagaaaaaaaaagacaacttcagatattatcatatgaacaatgcgctactattaatatggtgaatttgtcttttatatatctgaacgtgtgagttgagttttatcgttgatatggtcccagggtactaagctcaggagagaaggccctccccgtatgacgcgtgtcataagactcctgaaggagtcgcgtccatgcattaggagcggccgtcccccccgcgaggggggggggggggctcagagcgttcccccgcccgaggggttgagccaccccgaggctctcacccgggcgccgcatgacgggagtgttggggtgcgtgagcgccgcccacctaaccacattcatggttagctgagcagccacctcccatcgcatttaatacgacgtagggagcgtagtgggtgcgcctgtaacccgtctgcgaccggtctatgaccaggcgatagacagatgggatagcggcagacgcacccacgcctcaagctcctgttaggcggcgtggggacaggtatgccctgtcccatcgtggataatgaggagccctatgtcccccatccggtcagcagtaggcttgactgaaagggacgtgaccgggtccaatgacctggtgtgtgtgtgtgtgtgtgcgcctatggagtcgccgagcattaaataccgagtgacggggggctgtccctcgtgtcaaccggagaggtttgatgggacccgcatgacggctggcgtacggatcgcctccggaccaaggcgcaagatatgtgctgaatataaacagtatccactctctccccgaggaagtggggggtggcgtgtgtagtatccccttgaactataaaaggaggaccacgcctagcggggatgggggatgaaaaaaccgaagcttgtagactagagattcagagactttgtaagcacaaaagaatcatcatgcacataggagtagggtattacgctttatagtgggccgaacctgtataattctctggttctcgctttcgccaagggacctagtcttcgactaatccaccgcactcgcatcctaaaaactcctcaagaattcacccgtgccccccgccgaacttaaaaaaaaaggggggggctcttagttccccgctggagggaatcactcttcgataattttggacttgagattttgtgaagttgtatagatatattgtatgagtgttcttaaatttttttcagaattttttataaacatttagatagtttttttaagcaaacgagggaatatcccctcgaggggatccagatagtttctagccacaatccgttagcagccaatctgcatgggccgtacattgagcccaacgtctgtaaagacgcaatgaggcctcacacgacgatgtatgcagcccaacaaaacaaagcccgatattgcagcaagcgtcaaacatccaacatccagagttaatcaagtcgtcacgtcactgttccagcctagctaagctagcaacaaacgggacaccacccaatgcgatgatgggtatggacgaatgatgccgctggctgccgagacagacagaggccacaagaatccgtcgtcgccgccgtcgggtcggcgagcagatgagatgggggcgaaggaagaagtgatctgatcggcatctgctcgggcgccgctgtctcgagttgaatggcaaccgctatccgatccgctgccgcatgcgacccgcggagcgcctcgggaccatacgttgtgatggccaaaaacaccggatgatacggagaaaccaatgagagctagtcgcgctcatgtttctgcacgaacagccagaagagaattactccgcgaattatgggtgacacgccatgtgcggtgcgatcctttgcctctctcaaattgattttaggagtacgacttgtgtgtgtaatttcttttctcctaagcccacgatgttgtgcaaattgtcaaactaattttgtgccggtgatctcaagtgctagggggtactgtttaggtgaaaatgagacccccagggttgcttttgtttcaagcctagtagcgacaaagttagcaccacccccctccgctcgtctccatccgccacacagacactctctcccggccgtacgctgccgatccgacggctcccacctcccccaccccgccgtacgtggcctcgactccgcttttcttcccccctcggctccggtttcttctccacacgtctctcctctcctcctcctcctgacctcgccggcctcacccaccacccgctcccgccgccggctttaatgcctccggggacaagccctctcaagcgtcaacgactcatccactgctccacccgcgtgggcggcgcgtacgtagaccctagccggcctctacctgctcgctacagagctcacgtacgtacgcgcgcgcggtggtggttggcgcgcgcgcgcgtgcggtgaggcgtggtactagtattatttattcgctcctgcctcctggggaggtggaggatgctggcgatcatgagcttgctgctgccgtgggaggaggaggaggagacgacggaggcggcgccggtgttttgatccgtcgcgcgcgcgcggcgaggtgcggatcgggcggtcggttttgaattttggagcgggaattgcgcctgagatctttgtatttatcctggttgttcatgtatttttcttcttaattgcttcctttggttggtggtttcagtaggaagaggttggagacgtggagaggagtggccgtctcgtttcagattcttctgcgcaaattctggttacaactagaagttgcaggacgcgagagggttgattggtaaggtaattctatggcgttcgtgtgttcctctcatgtaggttgagtggtttcttgtgttatgtttgtgcattctagatctgattgatatgcgtttgtcatctccatgaattctgtgttgttttttacgctagcctgactaatctgccaagttaatggcactgtttatgttttctgaatgaacactgctacacatactaattttttcttactaaatctttactaacaatcatctcaaccgtttgatttaggtagatggaagttatgaaaaatctagatacattcatagcatgacacatcagtgttagaatttagtaagaaaaagttagtatgtatagacttttcctttctgaatagtaatgtacaacaaggtgatcaactgatcatgtactaatagtgaacactttatgatgtagtaactttttttaaaaaaaaacgatatgatatggagtaagtaactttcctttgttgattcctcgccgttgcttgaattctggttttctgctcagctttggtacagtatcattatcatcgtaccatctctgcatctcaccagcaagcttgtcggaatgtttgctgcttcactatagagttttaaggaaccaatgtccagagctcacgtgttataggtgcagtaaagtcggatgaaatcatgaatatctgtttcggtctagacacttttcttttaagaatggtcaccgggggcgaaatgcccacctgaatatgttacttcaaacaatcttacacagggcaggcttagcttatgcaagcgtaggtggccctggaggataatatggaagaatacacgggatatacaaagaagagaatacaaacgtatcacaacctcccccacctaacacaaagaggcacaatagatagaagacagaagctttgacgtttgccacctgcaaaatcacccaacaaaattccaaatcaagcaaatgctagaacccttgttcgacatcatccacttcacatgcagtctggaaacaccaggaatcgaaagtgtcggagggcctctccgccatacgcatgcggctcggtaccctggcagtgtgaaaggctgtggttgtcgaagaccacccgcatcatgcaatcagaataatgacttagtcatgttgctgctgggatcaatgcctgtcggcgtcctttgggggaaggaagccccaaaggagggagggccactgaaagattgaggccataggccatccgcatcaagtcatcttcaatcagtctttaacaaattgctactccctctgtcctaatatattgcaacctaggatgggataaatttatcccattctaggacaatgaatctggacataccatatatccagattcatagtcctaggatgggttgcaatatattgggacggagggagtagctagtttaacgccctccaacatccttcgggggaaggaagcgccaaagtaggaaaggccgctaaactttgcggacacattgatacactgttagtcttgatctcgtctaaaaatttaccatggtaacagatcaaacttgtactacctccgtcccaaaataagtgcagccataagtttccgcgctcaactttaatcgtccgtcttatttgaaatttttttataattagcatttttgttgttatgagatgataaaatatggatagtactttactcgtgacttatgtttttaatttttttcaaaaaaatttcaaataagacgaatgatcaaagttggacgcagaaaaccatggctacacttattttgggacggagggagtatttttcctttagaaagaagtacagtatataccttcatcttggaaatgacaaagttctcagtagtgtgtgtgtgtgtatactaatattttttcgaaacgttcgtcatgatatgattatctatgaaaatgtttctactgcattatcatatattcatatttttcctcgacatattgtactatgaggacaaacttatcagttaattgacaggctgtaaagttgtaatgcgcttcttacatttttgacagaagaagaagtgctgtcaactttgagataaaggcaaaattacgagaaaaaagactttcaagttcttttgaggatgagtgaccctggagagccttctaagcattcccaatggatgtcacactggaccaaaggaagcagcagtgcagagccccaagttggcagaagtaatgattctccggaggatgcgaaatatgacatttgcgaggacaattctgggccttcaaactttgagatcatgaaatctagattgtttgaaaggctaatggtaggaatcagccaagaaagagcttcgttggagcatggacagaagttaaattctaacatgaaagtagtggtaaaagatgctcgccgacacgctgtgcaaaaccaaattgatcagggagacgggccaattcaaaaatctgtgatgcaaaaagatgtcttatatgctaaggctgttgtatcaaaatcactttccattcagaagctttcagagttatcagtggattgtcagaaacttgcaggttcagatgacctgagttcagagtggaaccattttcctatgcttgcaatcaacagaaaaattgactccattctcaaccctaagaggaagtctgcaaagagtactggacccaatgacgtttttgtgccaaaacaaactctgaagctaaacatgactacagctaatctgatggcattctcatctcaggaatatgagctgcattctcatcgaacaaccgacgagacaatggatcactgcaaacatgcaggaggcattgtatctcgcctggaagatcatgctggtgtcatgttgaatcctgcagagcaaaaattaaaaggtcaattattgccagcaacgtcatgttcgtgtagcaaggatgacagtaactcatctgatagtctattagatgagcagcatacaagccgctacattgcagattcagatcaggaaccaacctgcagatctcgtgaaaaaaggttgaaatcttcagaaaacaatgacacgaactgtaaaattggaagttgctcccagaatcagaagtcaagagcacctggacatcataaacacaaaggttctgcgggagtcatgtttcgtacgtcagtacctggtaaagaatttgaagctgctgaaattaattgttccgacaaaattaatcagcgacatctgaatacacagagaatagtatctgcagcgaatgtcactggctcctgcatacctgatccagctgcagacatatctacagtaaatggtaggggggaggcagtgacccagccatcgagcatatctggagattcaactaaacgaaaagctccatatttatttgaaatgctaaccataccttccaaagctcaaaatatgaatcctgaagattcactgccttcaggaaactcgactgcttttggagttcacatgtacggcacaaatattggcagtcatctatttggagcaaataacaaatcatcaactgaaactgaaatattatccggcgacagtcaacatgtttcaaaatcctcagcaggtaggagagaagaagctcagataatactcatgcgacattcttttagcttatattgattaaaaggacttgtctctttccaatgttgtttgagtcgagattgatttattgggtatgaaagaaggcaataaaaaccttgaataaaatataacaattttctttattccattggtggtatcactcacagttttgttctctcttctttcaggcatcgcctcattgttggcacaaaaggtactagtgtcctatactactctcatgtttggtcgttatcatataagtttatgcaaatttactttaaaaatgtatataatattgtcggatatgcattttttttctgcaccatcaacattgttttccatatttaagattttgatcacatatataatcatattagcttggacatagcccatttttctcttcttatatcctcgcaaacaagttacttcatgctatctcatttatatgaacatgccgcggctaattcctatatggttgcaggcaaaatccgagcagctcgcgactctgtacatgaaaggagcatcaggatgcaatgtgaatgaacatcaaggtgtttcctccaaggcaattgtcgccaataagcaacaatgctacaatccaagaacagcacgcatggacttagatctcatgcaattccagttgagcagaatgagaaaccaagaatcacaagcgcgaaccgaaccaggcgacagatggctaaaacgcctacagattgacagcaaggaccctcatcatcttccttgctccaagaggtcaaaagctggagacggatccggtcgtccagtcaccggaggagcaagcagcatggcaccccgttgcgacgggagcaacgacgacgacgacattgttgaccgtgatcataaggaggaacaaggattggatgaaggggtggaaattcaaggcggccgagaagcatctcctgttccggcaaagagtgatgaccggtggattgggagatggtgccagggtggtgttcctgtgtaccatgaagatgatcatgatcagaggaaggaagtaacaaagcctgatcttgccgccggtgactccggaggacttgaaggtcagttcccaagcatcaaggcgatggcgatgatgggacgagcaatgagcaaggttcggccgtgtcaggaagagaggaggggatccttcatggtgtggaaggcgtagtaggagagatcctgatcacgtacaggtttttttttcctgttttttgttctgtgtaatgtagactgggctgccctctctcctcccgtggcagctggcttcagatccggtggctatcttatagggtatgtttaccaaagtatctttgtgccagcttggactccctaatcctcttaatctcttggcatctatggaaggaatgcaactctagagatttcgactctgcgctcttttttatcagtggttcagtgtaaacgatgtctggttttcaggtttatgagggtaattcggttgaccgtgatagtttgggagtaattcgtacttttttcatttctaaaataaatagttgtaaataaatggatctacgtgttataaacatctgcatttataatgttaaaaaattagtacccctccgtttctaaatatttgatgccgttgacttttttaaacatgtttgaccgttcgtcttattcaaaaaatttaaataattattaattcttttcctatcatttgatttattgttaaatatatttttatgtatacatatagttttatatatttcagaaaagtttttgaataggacgaacaataaatatgtgctaaaaagttaacagcgtcaaatatttagaaaaacagagggagtactctttttgtaagaaaaaaaaacttagtatgacagcttaacggatatattatgtttgttttttttatgtactaaaagggagcagtaaagtaaataaatctagcactgcaacttaatggatcgtcttttactagagctaatgacagaatggacaggacgatttgccttttgttccaactatctatgagactatgacatactcattccatcccaaaatataaggcttaactactcataacataaagactaagaaaatatttaatctcctgcttggttggatcaccctaatacatacaagcaatgtgattggaatatttgatggtataggatttaaaacaaatcaattctattggaaaatatttaatctcctgcttggttggatcaccctaatacatacacgtcttatattatacatgagaaaaaaatggttgtgtggaagggagtagtaagtacgtaaaccatcatcagtcatcaaatgaatctagtagctgattctaattaacggttgctatatgcagatcgacgagatgacattaagggggtgtttagatccagtagtgtaaggttttggcgtgtcacgtcggatatacggacagatatttaaagtattaaacgtagtctaataacaaaacaaattacataattcgcctgtaaaatgtgagacaaatttattaagtctaattaatccatcatcagcaaatgtttattgtagcaccatattatcaaatcatgaagcaattaggtttaaagatttgactcgcaaattaatcgcaatctgtgtaattagtttttctttgcctatatttaatactttatgtagatgttcaaatgttcgatgtgatagggtaaaaaaaaattaaggtggaatttaaatggggcctaactcctagtaagacacaaggaaagtgactccagctttacgagcaattttactgtctttgagaagataccatgaggtatcactttttggtacgaggtatcactttttggtacttagatactatgaaataacgaattttacactaaatttttgatatctcatggtgtatcctcaaggaccataaaattgctccaagctttagagccttttgttccgactatcgatgacgtaggtacgtaaaccatcatcagtcatcaaatgaatatactgaagggatggatttgtccctccaaccaaacatcacctattaattctaaacagttgctatatgcagacaaaaggaatgtgactccagctttacaaaagttcgtcaacgtaacctgtcctttggatagctgcaaaagctcaattatacacgtaggagtagttcctttggctgcaaaagtagtttggtgatgtggatgtgatgtttacatttgctgctgcctttggtgatcaagtggaatatggtagtactaaaaaatttacattagctgactagccattcgtgatgctatgtttgttgatttttccgatggagagaacggtgatagtttttttttattatttatttattggcacgtctcgtgtctatatatcgagaccgatcgtatccaggcgcacgacacttgacaactctgtactacgtagttcgtgcttctaaagagcgcgggggaacccatcggcgatgccggcgcagtcggagagacttcgcttgccagcggcggcgccgatgccgcgcggtgcgcacgctctctacggactactcgcgctgctcggcgcgtcggtggtggtgtggtccgtcgccggcaagccgcccgccgcccacgccgggcacgcactcgccggcttcctgctttggctgctggggatgatagcactgctgctgtccccgtacgccgcgcagccattgttcccggttgcaactactgccaatctcgccgtggagaaactgaagcatcgcttctccaacccccggacgccggcgcaggcgcaggcgccggctttggcttaaaaacccaccgacatgtacgcgacgcaacgcaagcggcaaagccggtcctacgccgaccaagccgcgccgtcgtttactactactactactactcgtacatagcaagtgaagtggtttgagactttgaatctgctcgtctgtgtgtgtgtgaataaaataagttcagtttggcgataattcgactgcaagtgcaagcagttggtttgatttactgatccagttctagcattcgcagctgatcacgcgttgtaaatataaagctttgttctttccttcattttcagtatacaagtttctgaagctactgtaacttccaaaaaaaaaactaaaaataacgaaaaaggctggacgatactagtactactcgttattactactaataatttactgtactactactagtagccaaacaaaggggacacattcaatttacatgcttctcatttaggagatttggtgcgaaaagaatagacatattttcagaagcaacgaactttcaatatcacaactagtgacaaaaaaataaaataaattgtatgtggggcgaaagatataacgagaatagcgccttaccatgtcctctgatgtagtttgttttccttctcttttttggttttttctcttcacccttggtgattgtgtacggtttactcccctacctaggctgcaatccatattgtagttcgtttatttatgttcctaaccttcactctcttgttttcacgtgtacaccttctaaccgtaaatgatgtgttttttaaaacgttctatggaaaaagttgctttaaaaatcatataaatttattgttttaaaattttaaactaatacttaattaattatgtgctaactcaccattacgttttcagaattagtttcgaacacaatcttaatattaaaccagtagcgtctgtcattaaaattactagtagctcggtttgagaaaccagaccattgattaagggcatgtttggagaatttaagattttgagaatatgaaaattttaggtttgtcagcttgtgtcttttaattcattttctgattctaggcctaaaacggtttgaatccaaaaagcccaaacccgcgaagaaatatcccaacccccttcgtcctcccctccttatccgccaccaccaaacccaaaaccccacctccacatctcatccttcccatccatggcgccaccgcgctaaaccccccaccacactccatccatggcgctctccgagctcccgctccaccactccttccgcctctcctcccgcccccacctccgcctcctcccgctccgccttctctcctcccgccacgcctcctcctcctcctccaccaccgccgacgcgtcctcctcctcctcctccggcggcaaccgcgcccctccggctccaaatccaacccgaggcgcgccgtggctgcagaagtgggggcccaccgaccccgccgcgccgccgccaccacctccggctccctccccgacctcctccatcgaccgaatcgtccaccgcctccgcaacctcggcctcgccagcgacgacgacgagcccaccgccgccgccgccacggccaccgcgcctcccgacggcaacgagcgcctcagcgacctgctcgaccgcagctgggcgcgccccgaccagcagttcgccgcctccagcttcgacgagtccgtcctcccctgggagagggatgaggtcgcgcgaggaagagagaacgaggaggacggggtgaagaggaggagggttagggcgccctcgctggccgagctcacgatcgaggacgaggagctgcgtcgcctccggcggctggggatgactcttcgggaccgcatcaccgtgcccaaggcgggcgtcacgcaagccgtcacggagaagatccacgacgcctggaggaaatcagagttggtccggctcaagttccacgaggacctcgcgcacgacatgaaaactgctcatgagctagtcgaggtgtgtgctatattagccctttctatcagcattggcagcttgctcgttgtaactgtttaatctattatgtttttttttggatatcagttcagtttagtgatttctagtggcaattgaacttgaattattatgtttgttgctgtgaattcgaggttttcgatgagttattagttgtgccatgataaatggattacttacatgacgtttgcctatcgatcagcgacggacaggaggattgatcatatggaggtctgggagtgttatggtggtttacagagggagcaattacaaaaggcctttgaaatctgaaacattggatggtaactcatcagcggtgaaaggggcagacggtacattgttcatcccggatgcatcaagccccacagagcatgatagccaggggaaggatgtaaacacccaacgtgagattgcagccagattaaatatgcagaatactgaggacatgactgaagaggagctggagttcaatcaaatgcttgatgagttgggccctcgttttgtggattggtggggaacaggcattttacctgtggatgccgacttgttgcctcaaacaattcctggttataaaacaccatttagacttcttccaactggaatgcgtttgaccctaaccaatgcagagctgactaatttgcggaagttagcaagggatcttccatgccattttgctctaggtgattatttcgacagtgttcatattgtttatcccctattatagcttttatttgttggtggcaaacgcctgactactgcttgataaaattcatttaagggagaaaccggaatcatcaaggccttgcagcagctattgttaagctctgggagaagagtttggtggtgaaaatagctgtgaaacgtggaatccagaatacaaacaacaagctaatgtcagaagaaataaaggtttggacaccatgctgttgctgttttgactcattgactggcatacctacttacttcacagttcacagaatttatgccaaggaacattgaaaactatggtaattgccagattatatctaaatatacaattgcttgtcatagctaagctgaatatatgatatatctagtcgtatttgaggcatgaagaaattcaactaaaaatcctgataaaaaaggggcaactataaggaatactcagtactcacttactcagcagtaggttttgatgaagtccatatttgtcctgtgaatattacaaaatccatgatttgttaaatcatccaaagcaacaccaggggtttcggaaaataataacaaaattgtgctgcactgcttgctctaatgaatataacttgcttaatgtaatgcttttatttgtctaaacaccatcatagacaatcatgctttaccaagatcatgatggagacagcttcatatagtttagttctattccttgtcgaactttcatagagttccaaaggtgtgtttccatgaatcaactgtgttcaactgttcatgcactatatttgatttaacctgtataggatttctgaatcagtgaagccttatctttttaacattatttcagaatctaacagggggcaccttgcttcttcgaaataagtactacattgtaatatatcgtggaaaagacttccttccaacatctgttgcagctgctttggctgaaagagaggagttgacaaaagatatccagaatgtagaggagcagaaaagatgcattccggttgtgcactcaatggatgacagtttagatgggcatgctcttgcgggtactcttgctgaatttcaggaggctcaagctcgttggggaagggaagtaactgctaaggagcaagaagaaatgaaagaagcatcttctagatcagtgaaggaaaagcttttcaagagactagagcacaaactttccattgtaagcattttctgcatgttctctgataaaacttgtcttattttgtattgccattttttaattatgccgttgatctaggtatgccagtgtgcttatttgacatatatttatttccatcagttgttatgcatgttctttatttcttcttcaattgttcaggcacaggcaaaaatacatagagcagagcggttactatcaaagatagaagcttctatggtccttgctaatccatctgatgataaagaaatgattacagatgaggaaagatctgttttccgtagaatcggtttgcgtcttaaggcatacttgcctgttggtgagtttcttgaacaataaccttggagagcattctatactatttctattgattgattattcccccttccattttaggaattcgtggtgtctttgatggcgtcattgaaaatatgcacttgcattggaagcacagggaagttgtcaaattgataacaaagcagaagactctgccctttgttgaggagacggcacggcttctagagtatgagagtggcggtatactagtcgccattgaaagagttacaaagggctatgcacttatattttaccgtggaaagaattataggaggcctattaacataaggcctaggaatcttttaacaaaagcaaaggcattgaagcgtgctgttgcaatgcagcgtcatgaggttagtttgctacaaaagaaaaaagcaagagcagtaccttctttttttatgataatcattgtacacaactttagcatccttctgatattgtttaaactcatgaattgttatgcaggccctcagtcagcatatagctgaactggaaaacaatataaggcagatgaagttggatttggtacgtaatttctcatattacagaaaagtagttgtgttttaattaaggcaaacatttagcataacgaacccttttttcttctcattatacagcactaaaactaatttctgtaggcttaaaatgtaatatgatgccatgccttttgtaatttttgccatttgcatcagagtaaaaacatattaacatgcatcttagttgatcctctgcccactaaatggcctttaaattccacaatatttacctattgttttagcaaaaaaacaaatgttgttattcattggcatttcattattaaggcaacaactttcccttagactgcattttttttcagcagagatgtttttgacagtgaggcatatatctgttggtgcgctagtgataaattgatcatatatgtcttttagttaatgtcttcattgatgaatgctttcctgattttatgtcaaaacaaaatagggcattgaggttgatgaggaatatgaagaggacggttcagattcagaaaatgagaataatgaagcagtttcctctgcaagatacgacgaggtatccaatcttttgaaactgatgctgtctgttttagaaccaccataaaatccattcttccctttaacgtgtccaggaccaagatgattttgatgaatcaagtgatgaagatgaatatgatgattatgatgaagatgatgacgatgacgatgacgaaggcgttgatagctagtaatatggaactgggctttgcgatgtagagtgatgtttatctctggaggtgatattgcaatcctttggacattcttggtaagagcaaagatttttgttttggagttctaccaatacctcaataggttcatgcatagcatatacagaaccatataggtacaaagaattaatcatgcagtttcggtttgtattttagggagattttttattaagaacactggggaatttgtagttggtttgtattatatcaacacctcatctgttactgtatcaattaatcaaccactagcctgtaaggggcttatcttttctgatgtccttctcaagaacattttgatgttagtaatgggcttagattctgagattttgaaaccacctccatttttttatttgagagatatttataccagcataaatggattaatggattttctcccgtactattcacttaggtctttttgttacacaagtactcctttgtgaatccttactgttattcagcattaaatgcaactttgaaatatcggcacattgcaggagccaagaggatcgccggcagaccttgacaactgtattgctgctgcttctgtttacgcatggtcttttggacgaagggcatataactttcgcatgtctctactctgtatatcccatttgctttgttgtttgcaaattggctgctgggatctgccttagaaaagctgagttgggtgtaaatggtaatcttgtgtcgatgtcttctcatacttctcattttgtaacaattatttaagcaggctcgaggtagaaggtacgtttccacccccaaaatgtactagcacacgagcactgtataattcttctgctgtataaccggatattccaggacacgaagaatgttgaatatacttggtttttctcccttgcacggttgcacgcattgttcatgacatgtttatacttaggttctttgtaagttttaaggtgattgttcttgtaatgctgatctggttcttatatcttcctcagtcctgttggcctttttcaccgtaaaacgtcattgtttatctgtctgtctaagtactactcgtatcaactactgaagtgtacgtcaaacaataaaaataaaagtgagtgtgcaatatgcttcgcacagaagacacgtgaacaagtttcaccaaatttattggttttcgactgtttggttttcatacaatctgtttgttggtgaaagccgaccggtattggatttcatatgacgttgatagaaagttatcactttttactagtttccacttcaaaacaaaaagatattggtgcgttgaccgaaactcatcggtttttactagttttcacatcgaaaatgaaaagataaaccctgcacgtttggcttgtcgattcgtgcagcatgtcgattcacaaaaatgctatcgatcggtggctattggcttgtttgttttattttccttcatttttacttgttgaggaggtggtcagagtttgagaacttttacggtacactacacttgtaatatatacttgtagtataaacaatctaatacactacacttgtaatatatacttatagtataaacaatctaacggtgtggatttatctgatctttcttttacagtataaattatgtagggtatatttgtctttctatatttttgcggaaggttatttttgtattttcatgattccttctttagtcagatcggatcgtgagaaaggggctagtcccatgcgctgccggtgacagccgctgcacgcgtccctggctcgcccccagcagccacggcgatcaagggccgccacgcgcagcaaaacaatgaaacgtcagcaaattaattctgaaagcagtcgaagattcatagggtcttttagagttcgtaacttcgtatgtgctagcaaatgctgatattcgtttcgatcaatcatgtatacaagcatcgtagtcgcacaaccggacactggctggatgatggcgtgccggtgtttgggaatctttcgatccgccgccccgcgtgatatattccgaagaagcgccgctgctcgtcgaacggacgacgagatccaaaacaaataccaactaagcaaacctttccagattaactccccccggtgcaaataaatctcaacttcaaattactaaataacccattctatattttgaacaaatactaaacatacccttctatataaagagatgcggcagctctactgtagacgctgagccatgccgtcggacgccgttggacggcagaggccatgtaagggaggtctagtttgcattgggccgagcccgttaatctgatgtaatttttttttccttttcagttttatcggttgaggaggtggcggagttttcttctccgacccctgttttcgcaagaggatcgccggcagaccttgacaactgtattgctgctgcttctgtttacacgtgtcttttttttttgtggacaacgtataacttcgatgtatgtactctatatatccccattgctttgttgtctccaaatcgctgttttgttgttcgtaccaacagttctacatcgtcctcggtcctgtggccttctttactgttccacaactgtgtcagtgtttatctgcctatcatactagtagtatatcaactagttcaccaatctgtttcatgtaggagacgcgggagcgattcgtgcagcatgtcggttcataaaaacactattgatcggtggctgaaggtattggcttgcttgttctgttttccactttttctccagtgaggaggaggggttcggagttttcttccccgaccaccagttttcctggtttgacgaggcagcagagcaccagcgcaggcagggtagtagcggctcgaacaccgtcttctcggctcccgtgtggtagagttcctcgccgccatacattccgcttacagcgcaacagatgcggcggctcggctgtcgacgcctcgacggcaagccggccgtcggcgccggtggacgggaggtggggaggagagagcaaccaaccagcagggctgctaattttctagttgggcctggcccgttgatctggatgttatcggcttgtttcttttgttcctttttcttgttttgtttatttgttagcttgatcatttccgtcgcgcggtctctttcgttattcgaacatctcgggcgcagcccacaaggcggataacattttattattccaaacaaaatagaaatacacaaacaggtcagcttattttcttgggctttttgggtttggccaggtgcccccatgatatatgatatataagtctaattggtaggctgcgtttgtttgtgggtttgggaatgatattttgagtagcataactaaacatgaaaaatgaattaatttatttattaaaaaattatataaaaagtttttcgtggaacgcacagtttagcaattcaagaaagtagcctaagccgagaagtggcttaaaactcagcctagtctccgattttaaatgtatgttgctgttgtttttcactttctttttaatctaagttggttagtttctaagacatttattcactatattctcgttgttaattgaatgatactcccctgtcccgaaacataatgcgcaactaccactaacacaaaaccaagaaaaattactatcactttcttgtttggatcacgtcaataaatataatacatgtatccaataaaattaaaaatcttaagggtgaaagttttagaaaagaattaaaggagagggggagatgctagttaattgcacgtatgaatgcgcgctttatattactatgaaacatcgaaaaggtggttgcggagtatattttaaagaggacggagcgagtattattttcgtgaaagaataggatctcattttcagtttcaatgtgcaatgaatacagagcaacaatgtcacgttaactgtttaattactcctgtacacatgcaagtctaaaacgacttgtatctggagagtattactacaatggagttatgacaaatttgtgacactcaatttggcaatttgtcacattcctttcccattttgctgggcactgaaatttgtggttggaaacattttttttttatcaatacacaagtggtagttcccaacaactgccccattatcttgacccttttttggtgcctaatacatatatatccaacttggtaggtttcagatgaaggttttcatgtgaaatcagcaatgattgttttatgggagtacagctcgtattgctgcttgccactcgagcaggagatgacacgatgcatttaactccacattattaattgggcatttgggcaacttgatttgggagttaaaataccggaggcccataatgagggagcaaaatgatcaaagtaatgccttggacgtcgtcacctattcccatttctgaggcgcagcatggcacttactaattaacattagcaattggattggtacgagttgaattttatagtacttcataagtatatttgcagcctgttgtatttttctactatatttggtgtgaaaaaaaaatgcgataatcagtatggctttttgcatctttaaatgcagtgatggggataaaaagagatcatcatcttcttctgtaagtcttttttttaaaaaaaatatggccaaatatgttaataagagcatattacagtcctattgttacaagaacgagaatgtaaaatctgttaaaaataaaacgtagagacaccgcaccttatattgccacaagacatgcaaacacacaagtacaactataacactgagtcactgaccaaactagggtacatgcaaaacctgcatactccctctgtgctgtaaaaacctacacagaatttgatttttttttttacgtaacagatggagtataaatgatcaaccacttctcccttttttttctacgagtctcagtaagcacatcagcaatatatgcctaaaaatttatctccaaaattttgttttcggattcttgaggtgtaagattcctcttttcaatatatatatatatatatatatatatatatatatatatatatatatatatatatatatatatatatatatatatatatatatataagttgactcataataataataaaaagtgaatcaaccccaaactaccaacagaaatagaaaaaaaattgctcacccccttcctcagcgagcacgatccctcccctcctagcgcatgatacctcccccatgcgtcactcaatcccgtgcatgggaggcggattaggaacctgggcgctttcccactagtggagagcaagaatgacgagaagggtatttttaattttggaaagtaatcagataaattgttagagccaaattttttattaaaaaaatattaaattttaggattaaaaaccatattaaacatccattggcgatgctttaattctctcctcaaagaaaactgcaagtgctcttctactttcaagtttttagcattattaaaggctggaatgttacattccattatcttaaaaaaaaaagttcagcattagctctaggggtctcatattttcgcttatgcttatgtataagccaaaatttgaattttcaattttaaatttggagttaattttggggttgcttcatcgaagtttatttttcagtttttactttaaactgctaagaacacacacacacatatatatatatatatatatatatatgtgtgtgtgtgtgtgtgtgacactcatatggggcactatggtgcccgggcaccatggtatctaatgcacaaagtcacttaaattttttaaattgtgagtatatacctagttataataattcgatccatacctatacctatcaacaaaacaactcaaatttaactttatttcacaatccatgattacatacctaactaattatatgtatggatgctatatatctagaatcaaaatctaacgaaaacaagttcaaattcagttcaaacttactttgaactagttagtaaagtagttaatgttaataactaagtaattgaaaaagtttcatactcatttgaattgggtatatactcaatttcaacaatggttcccgggcaccatggagcaccaaatatatatatatatatatatatatatatatatatatatatatatatatatatatatatatatatatatatatataatttataaattattttcttatttgtaaatatgccatgaataagccaaatgatagggcagcaggacggtaaaccacatgactgattgactgcaagagcacacacccagtaaaccaccgaccaaatggtagaatataatgtgatatactagtactagtattgttctggagagaagctaacaagatagtagttgttgataagcagtcacaaaaggacatggaaagacaatggtccaagcatgtagaagcaactcagcaacgtctctctgctaaaagacatgctttggttgtagtggtggcttaaactactgctcagatcacttggactgctcctcatcatcaaccattcaaccctccaactttggacgtattatgttcagccgcacatatgcagggttaaacccttaaaaaaccggagacatgccaacacatcgaaggtgacggctgcctccactctttgctgagactaatatagtatattaggaccttctatccaggataatagttgacctgttccctccaactcttcacttaatgtttttttttagtttgttcttctttttccaagaaccttttcttttgaaggtcaatgggactcttgaatggagattagttagacacttgcatagcttaaggatattgttttttttggggggtaggatcattattgtgagatgctatatagctttgaccatggtcttaattagctctataatgcatcatatatagtgcacttccccaccactaagcaaccagtttgcagaggatagaaattgtttccattatccaaatcttctttgtttgtagtattaatgtaaagattaatcaaactctgaagcattagaacatatggattgtaatcatatcaactcgcgatgttgctcaggaaaactgtaccaccctattccagaagctagactattctgattgtatagaatcactatgaaaatgtacgaatatccgtctgggggagacctgtcagcgcaagtgcgcctatgtagaaccaataaaaaaaaccctcattcttgactaggggcttgtttagattgatttcatttcaaaccctatcattttttcggtaaagttgtcaaatatgtgcatccattttgtttcttaccaaactttgataaatatataagaaatcctaccaaaattttggtaatattgccaaaatgccagtaaggtttattttggctacaatctgaacaacccctagctttttacgagtaaattcactactatagaatttaacaaattgagaaaagtagtatttccttcgacgaaatctctgagataaatagcggagggttagttaacatcaccaaaattaggataacttacgatgaataagactagtatattgggaacgttggctggcagctgtggtgaggacatgttaacatcactgcaatttacaatataaatttgtcattactagctcttcatagtgctaaacttttgatatccagatcgatacttgatcgtcatccttgagtcctgtcaattgagttaagtaaaaaaattatatatactccttacatggatgttcgtcatctcccacattcatgcatcgatgcacaaaactacagacacttggcagataaaattttcattaactcaatagacacatgacgccatgatggtactgacaaaaataacaaacaaataaaacatgggcaaatggaataaactgcagtaggcattatggccagtgataagctcatcatccaagcacacagccaaaacaactcacaaaagaataccaactttgtatatcttaacatttcttacataacctatcgttttaacgttgttgataaactgtctgacgcatgctacattaataatcgatacagacattaactgcaagagaattttagttaatagtactaatttctagaagaccataaggctttaattctattggtcggcttcggatagatctatgtgacaaggtcttttgccaagtggaagacacacgctacgtggaatatacccatcccatacatacgttttagctatgtgcattgcattttgctgtggctagttgcactttaataaaacattggcttgcgttgaatcagatcgcaaatgatcacaaatgtgtgatttattctgacgatacacgatacatatatatatagttatatacccataatattcagagagtaaaatgatgctagtaatcgacgttgatgatttccacaccacaaaagggataaataattaaggtattggaagcaagtggtatatcaatatcacccttccctcctttctctgctactaggtacctagctatataggctgggcctttttatccaggattttgtgctttaattgatgactatggttttaaggagacgtggcacgtagaaataaattaagtggagcggcgtaagagcaagtttaatagtatagcccactactagctccaatttatttatagccaatctaatagtcaattcatacaatagttacttactatattattaatatatggtcccacatgtcatacacacattgcgtcttggagtccgtgctacagctagctacagatctgtagcccactactcttctctcacatcttttatctcattaaaatatgtttatagctgactaatagtctgctattgtacctgctctaatagcactctccatgtatagtactccatccattcctaaaaactttcgcggttgatcggcattgttttgactttgaccaccaataatattttttttagatggttatacaatgatgaacttaaaaaactcaagcttatgcttaggatgcaacatacttggtacgccttctttccaaatttttataaattctttggaaaaaagaccgagtgctcaaatttcgagtaacaaacactccctatgttctaaaatataagtgcttctgggagttttacccaagaacaaggtatatgcctcttgttaaataaggcatttgttgggggtaggagtttagtaggggataagactggaagtaaattgaatgagggtgattattgattggacaagtaatactttataagtgtttacattttgataaaaaaattaattcttcaagtgcttatattttaaatacaagaagcattgagattattatctaaaaaaaagaagcattgagattattcagggcagtcataaaaggttactgttgttttacctaactcatcgttcgctctatgacccataatcaagtgaaaaatgaatgaaataatcaaaatgctttatatctatgacttttatatatgtgttttcaatgatttgaaaactaatattgaaaaataaagtacgataaagaaaaccttaaaaccagcttcaaattttaagtttcgaaataaaagttttggttatggctgacaagccaataagaaaacaacgagtgaggtaaatgcatcaatagtctttaaaatgcaacatttgacaaaagaaaaaggaaaaaggaaatgcaaagtagaatcatatcctatgtgtaaattttacaactcctggatttgtagaacttttcgcctaaaacacatgattgagggcaaatctttccaagggacagcatgggctgtgtcctgtgtccaactcgttcctgcaccaccgcggcacacacaaggccacgtcgacgtcgggacccatgtgggcgcggcgcgtgtggcgttgccgcgtcctgcttagagcatgtacagtgacacgctacaagccagctataaacatattttaagaagataaataagaagagagaaaagtagcggactacagatatgtagccaattgtagcacggactttaagacacagtgtatgtataataggtgggaccaaatattaatagtgtagtatgtaaatattatataaatgagctattagattggctacagataaattgaagttagtagttagctatagtattaaacttgctcttaattagcagcgacgatggagcatgcaaacgtcgccgtcgccgtcgtcgtcgtcgtccgtctttatcgattgatctccacttgaaaattaatcagggatggctgcaccgccgcaggggagaaggcttcattaattaattccacgtcgaaattaatctcaggttgggtgttaacttcggaagttggaataatcctcctgtgtagtatgtacatggaggatgatggacgccatggtccaatgggcatcaatgcaccgccatgcatggaccggcttccatttgcatagaaattgaccacccaatccagtgcacatccaaggaaaaaaggcatgatttcgtgtcaaatcctagcctgttcaaaattattgaaaaaaaaaggggcctcagatcatttaccccgaatcatacttcggctatgttttagaagcccaaaattataagaaacaacggacgaaaattttagaaaacttgatttttccaatatctacctgctaaagttcatatgccgaattctagaattattgatttaaaaaactactcctatataagattctaagctatttggagaactggagattctgaaattgcgagatactcactccgttccaaaatactccctccatatacttttgatagtcatatttcattttagcacacagactaaggataagtaattctacttatcatccatttaaatatgctactagttattcctcgtaaacaagcgattcattaatatttacatttctcgatgcccatgtagccaatcctgtgtggaagaatggagagtcacgcattaaatccgagaaagtcactaagagaataggttttggattgtaatatgcctataaaaatattttttttcagatttaaaaatatgcctatcaaaagtagatgaagagagtataaggcacaaccacccttaaccaaaagatcaagaaaaacaattattatcatctcttagtttggatcaccctaataaatactacctctatctacttttgatagtcatatttcatcttgacagacaaaggataagtaattctaattatcatccatttaaacatactactagtcattcctcgtaaacaagcgattcattgatatttacatttctcgatgcctatgtagccaatcttgtgtggaagaatgaagagtcatgcattaaatccaagaaagtaattaagatgataggttgttgaagtgaaatatgcctatcaaaaataaaattttcaaatttagaaatatgactatcaaaaatagatggaggaagtataatacatgcatccaatagaattagagatcttgagcgtgaatgatttaaaaaagtaataatttaatggagaaaaggtgctagttaattgtatgcatgtatgcatgctggaacatttttaaaaaagtagttgtgttttatattatggaacgaagggaccgagggagtatctaattatataaagtagggacaaagctagctgaactctaaattacacagatcaattagagcacacctcgtcggggtctcacgatcgatctcagtgcccgaactgctcgcttccaagttccaactccgcgcttcgcttggccaagttgggtcaggctccacgccggattttgccgtgtctgtatccatcacgcgacgcggtttgcagagcccaccaccggtggcggagaaccgacgcggagaaagccggttgcactcgcgctgttacctgcgcattgcggcggcctcccgtgctccgatccgatatacgctcgtctgatgtggatgggagatgcaacgacgtcgttgaagaggtgagtcggacaaaacagtactgttctgtgacagtttttgcctaaaaacttggtggttcggtatagaaagttttgctaataacattgtgcttgtttggccgttatttttgtggttgcgggtatagccgtgagtagtagacgccagggtttcccaaaccgccggggccggggttaccgtaccccggcggtaagcacagtaatcgcggtaaccgtgaaaaaccgtacaaaaccataccgaatttatcaaaaattcaaattatttttaaaatttatttgaatttaaagaggttaccgtggtatttatattaccgtacccccgcggtaaccatgcggttaccggcggtaacgtaaaccctggtagacatggcttactactctaaaaatcatagccgaacaacttttttttctttttgaacggtcagtctgattagacttgtcttatattgatagaagggagtttaagtacacacagctaaaggccaaaagaaaaaaaaagtacaaattcgagtgcaaacaaacttgcacgtcaactctccttacacctcatggcaacattctcctgatgtgctttatgccggtgagtcccaccatcccaactcctattggatgcgattgattatttgatggattgttgcctctttccctctaaagattcccacaatcatttttctccagatttcccaagcaatggcaagaataccgaacaacctcttgtccttgttgaagatacacatatacatacaacaacattcacttgcacacaatatacgtgtggtattatgaaatgcacaacacatattcgaggataatgataaatctgcgaactcactaaattgttattgaaatgcatccgcccacataattttactcttatataagccgtttatttgttttttttttgtttgggcacatggaattaaccagagtgccaacgacaggcacatggacgaccatcttgcgatcgaggacggacagccctgatcgagaagacatgccacatcttgattcgattccactggagtaagtggccgggcacatcaaaagggccgtaacaaatacgtatcgatttctgtacgtactggagtacttccttttggcgaaacaagatcccgatcaatataccctccatctttccgtagcaaaagaaaggtaccgaaatgtatgtgcatcagtaccatttcacacaaaattctcttgctgatgaacaacgtacaccacatcctcccagagtccaaactgtggccgcgatcgcataatatctggtgctttggtgcagctcatttttgtccggtgaggattctctactataatgtataactactattatagtcactggttgtgagtcatactctcttattgttcgatctacacgttagtgtctgtagtgatagttgtagtgacagtgatattatgatagaggatgtgaacccacttgtgtcgtacgcagtcgtctctgcatgcatccatcgatccttaataatcaacggacgcttttgacgccatgcatggcttttgagggattcgatcgcctaaataattggggttcgtatagatctcgatactgccacagattttcctcatttggttctaatcaagaattttttttgtgatgaaaaacagtgagaacaagttgattcgatatgagaatccaactgcagccgaaatatgccaacctaatggcaaaggatatgtgcagcgcaaggttatgggctctgacctataagcgcgtgcacagacgaggtatcggattatatttgtcaatccaacctttgcttttggaagttgataaaaaatgccaaccaaaaacttttgcaatgttctttgtttatactctagctttgatgctccaggtgcaagtgcatgaattcggccatgttcttttctgattctggattctagattttcatttgcacgcttctaaagctactaaacgatacgtttcatataaaatactagagtatgcaaatttttcatgggatactttttaaagcaactttttcaactctatagcagttaatttattcatctgtatatatcctcaaatggttaccataaaaatcaaataatccatcgatttcagttatcacaaacaagggccttagcagcagaatttactagtgtcacaatcaaaatgtcaaacaagccccaagtcctcgcgcatctcttccaccctttctctgtggaagaatgcaaaaggatttggcaagtatatgtaagaataaagcaggggtctctctcactcgcttgaagccaaccttcagaaagcagtagtattttagagggaattcatgtgatacgatgacgaaatttctcacacacgtaagtgacaattcaaaattagttcaagttgttcttgaaagggaaacaattcgttgccgttccaaatattacggccatggtgagctgacctgtcagttttctcgcttgatagcaacgcaacaatatatatgcatgtcaacgacggagtacaaaataatcacgtactcctactaactcttcctctaaagattgtttctcatcttatatttcgaaccttcctccgtttggtcatggagtcacctttcaagtgaccgagtcatgtgaccaagcaatgtgacatttccattcacctagctagagtcaatttcatggctcatataagatctccattttatacccacgaactcttataacactacatttatcccttaatatttgatgctgattagttcaaaacataaaaaaaatataggaaaaatagtttaagataaaattaccatatcaaataagggaatatttcctacaacagcaatggcattttttggacgttgctatttgacaaaattttgagaggagcgtaaaattaaggaaaaattggttatatagcatcgaaagttcacgttttttattttatagcaccgaaagataccggttcactttaatagcacccaaagttcaccctgttcccatttttagcacttccgtcaattctcaatcgttttccgtccgtcttgatccagccacacacacaatataatgtttctacccctcacaagtacaagtagaatgcatgttaatgaggggtagaaacgtcatatcgtgtgcgtagctaggtcaataacgatcaagacggacggaaaaattgacggaagtgctaaaaatgggaacagggtaaactttggttgctattaaagtgaaccggtatctttcggtgctataaaaccaaaaacgtgaactttcgatgctatataaccaattttgcctaaaattaatgatatggtctgctccttccatttaaaagtcttaagcatattttttatattttttaataaatgagatggttatatttatattcgagactgaaatgtagagattatcttttcataatgtcacaatgctaaattaaagcgcaaaattaatgttatgatctgctccctccatttaaaagtcttaagcatattttttatattttttaataaatgagatggtcatatttatattcaagacttaaatgtagagattatcttttcatattgtcgcagtgctaaattaaattattgatccgaacccaagtagttatcttaatatatatttatatgttgtatatattagtgtagctttttttaatttgttacatgtgcattgagttgattttttcatggttttgattatagaaaatgagaaaattgtaatattgtgacctaaactttttggatagagggagtatgaccggtgaaatctccaaaactactgcagggtaggagtactcgtagtacttctaaccagcctgaccacattcaaacgcacagtagtacagtacttggaggacattcaagtcacagtacacaaatgtttccagcacaataaaactacttggaacagtactgtgggcagcagctctttgcaggccgcaggcgagtacagatggaccctcatcgaaacgaaacgaaacccatgccaagaacctgcgtgctctttgatgagccagtcattcctcgaggcatcttttcatcagatcagaattcagagcctcgcgagaaagaaaggctggcccaatcctgcagctgcacagatcccagcagctgcagctgtagctgtagtagtagctgtagtcgatcgacagtgtccgagccaatccatcgccgcaaacaagccaaggggaagaaatatatatagccctggccacgtactacgtactagcctctgccgatctgccatgggcgctagtatagccatgtgaccgtgcgagagtgcaagtgatgggtacagacgttgttagcaccaatctgggaggcttatctccaaacccccaaattctctccattccattgccgtccgtcgtgtggctgccgcacgctggaggggcagcggcaatcgctagatttacgagggtcccacggcgcagtggcacgacgacgcagcaccgtccgggattttcaacggcacccgaacctgggcgtatcaatcgctttgtctcccggaaaagagaacgacatgggatcgtattaccccaagcgtcgccgatgatcgccaaaagtcaaaaaaacgtatcaccgtccaccgaccgaaccgaggtcgctaccacgtactaccagtagtagtagtagtagtacgcggactcgcgaccagccagccgctcgggttgtctcctctttttttttttttcttgccgggatgggagcgtgcaccggtggctgcactcaccgtcaccggccagtagtctaggcgccacacgaagcggcggcctgcgtcgccgaaaggcgggggaaaaccccgaaaatacaggagaattctgcgtttcccgcgggcgcgagagcccgcgaccccgcgcacggtgagacagggaccacgaccccgcgcgaactcccccttcaggtggacgaccaacccagcccagccagccgcgcgccggtttgtggctttgccgaatccaacgcttgcacacaccaccgcggcgccgtatgccgggtcccccacttgcattccacccggtcgtcgcgtcgcgtgatcgcgtcacgtcccggcgcgccaggatacgggtgcttggctccgcctccggcttattatttaagcacgcgacgccgcggccatgtctagtctcctcggctgctactactactgccgttgtgcgcacaatgccaagcgacccactactgccctgcgtctgcgtgtgccgcgtatacgcacaagccaaagagaatttttaggcgggtagaaacaaaaatcagacccagtttcgcgcaaaaaaaaaaacaaagagaagcccgggggtaagagagagagagagaatttgggagatgtgagacggaagcaacaagcacatgagcgttttgtgattaggaacggacaaaacaaggtcataaggcggcctaatcaggattggaggagaggtctagtctccctttctagtttcccctacatgaccagcgttgccaccaggattgccacgctcgtgcgggccgcggcggcggcgagccggccattgcggctccaccgccggcccggcggcgaggatacgaggatggtggtgatcgtcggcgccacgggcaccgggaagaccaagctgtccatcgacgccgccaaggtgatcggcggcgaggttgtcaacgccgacaagattcagctctatgacggcctcgacgtgaccaccaacaaggtgagcctcgccgaccgccgtggcgtgccgcaccacctcctcggagccatccgccccgaggccggcgagctcccgccgtcgtccttccggtccctcgccgccgccacggccgcgtcgatcgcggcgaggcggctcgtgccggtcatcgccggtgggtcgaactccctcatccacgccctcctcgccgaccacttcgacgcctccgctggcgatcccttctcccccgccgccgccttccgccactaccgcccggcgctccggttcccgtgctgcctgctctgggtccacgtcgatgaggcgctcctcgacgagtacctcgaccgccgcgtggacgacatggtggacgctggcatggtcgaggagctccgggagtacttcgccacgacaaccgccgcggagcgcgccgcgcactccgggctgggcaaggccatcggcgtccccgagctcggcgactacttcgccgggcgcaagaccttctccgaggcgatcgacgacatcaaagccaacacccgcgtcctcgccgccgcgcaggtgtccaagatccgccgcatgtccgacgcctggggctggcccatccaccgcctcgacgcctccgacacagtccgcgccaggctcacgcgggcgggctccgccgccgagtccgcctcctgggagcgcgacgtgcgcggcccaggcctcgccaccatccgcagcttcctcgccgatcagtcaccgccaccgcgcagcgagggcaccaacgactacctgtacgccatggagacggaaccagagccgccgccgccgccgacgttgccgccgcggctgctccggttgccgcggatgcagtactgcgacatggtggggtgagctcgccgccgccgccgccgccgcacggcgccgcagtcacttcattgaaggcttttgggggttcgagggtttaggccgccaattttccagtgtcccggcggcgcccttctctgacactgctcggtgggcccagaaaaagtagccagtgacatagaaagaagagacaaaggtaattaacgtagagagagagaagctaagctatgcaactgatgagaagtgttcttcttcattgcagcagaatttgtgtactctttcttggagaggtggtgattcatcacatcgctctcctcctaaccgcggcactgtatgtatgtagtgagtagtactaatcatctaattatccaccgtgttcagaattttgagacagataatgagtacagtctagtatatgatttttcatcagtgtttgttgcagtgcaacgggtgacctgctctatttccggagctgaattttttttggtttggttttgtttgttttgtttgtttaattaatcctcctcctgctgctgctgctagtagtagtagtttgaggtggctaatgccatggtggatgcttgacatgttccatccattttccagctggttgttgttgggatgattggatgggtaatgccacgcttagtgtgtgattactgatcgagggggagaaggattgtgttgggcgtgtgggttggtgcctggtgttcttgctgttgccagctaggaacaaacaaattcgtccccgtctcctactcttttttctttctttctttctttctttctttctttctttctgttttttttcttttacccctcctctccagttttcccgtacggtcaaagagctggaattcagtggcattacgattttcactctcttttggattgttttctttcttgtttggattctacagcagcagtctaccgcatcagattttcagcatcgttttatactgtcgcggacttcaggcattggatactcgcttccagaagtttctggtcatttttttctttttctttttcaaaaaaaattgcacttcacatggtcggttggtacgcgtatgtgtacgttgtatgcagagttgtacattgttttatgcgtatgtataccttgtaggcgacacgtccgacataagccaggctttttatacacagtcatcgatcacctgccctcaaatcgccatgattagcagcaatgcaagtactgtgttttgctcgaagcggttctactgtaatataatgtcgcagtactataccactgctctatggtactgtactccctatttcagtatactccagtccagtacttttgcctgtatcatcgctgcagtatacgaatgccaagtctcctggataatcgcaagtaagtagattcttggggacggctcggcccaaatagaatgcagcatcgcaaccctgcagaagcccagcaactgcagtcaagctgtcatacggctatttcactactcctttcatttcatcctaaaatatactccctccgtttcacaatgtaagttattctagcattttccacattcatattgatgttagattcattaacatcaatatgaatatgaaaaatgctagaataacttacattgtgaaacggaggaagtaaggaattataccctttaaatttatatgaaaatataagtaattttgtaatcccaagacagtactttattcctcacttatcatcttttatatagtttatttttcacttatcaccttttgtattgatgggtttcccgtctaatcacttttttactactttgttcttccaaccatttgtatcgtgatttgttcttttactattatcttaatttttgtaaaaacaaatagtagaatcccttatattcacggacggaaggagtacttccttactagtcagaagggattgaaccggactactagttgtggttaacaacagaatgatagacctgcgtttgggctccgtcatcattagctttttgcatttttacttctgcttattgaaatataattggccaatttagtttgaaaaagaaaaaagaactgacgagcaaatgcaccgttatttgagccaatagactgacagagtatcagacagtttaagtgtgctgggccgcgtcagccttggccaacaatttcatatcctctgatcgtctcatccaatagtaggaaaggatgttcacaagagtgttcaagctacgctctaactttaccacatgaaggattcagatatcagaactcgtcactgtttcttgacatgatcaaatttcgtactgtgcaatatcacttccaggctttgcctccggcctattttgcaggattgctgtactggatgagacagtcaaggtatgggccagactaacgaaagggcctctcagtctcatccccagcctttcatgtactgcaatgtggaacatcaactgtaattacagaacacttgttgtacatctgagggaatgttttgtgctgttcttcccaatccaattgcaggagttagatatttggaagcttaagatagtcaatggatttctaaaaattacaatgtgtctgaaagattggtcaggctatccccttggagtgtgatcttgatgtcgtgtgctgcatgccacacgttcagagaaacattccccatgttggattttttgaaggttctcacatcaccaaatgaggcattcagaaagtacagtaaagtcacatctcgaggatgacaaaagacgttcgaaggataattgggtagggagttggcacaaatgtacactatctcatcaacgcagttctgcactagtttgaacaaacacactctcttgtgcgattacaacaccagcgacatgtccatgaaaaagaagagaacggacacgtccaaaaggcactcaacaatattgctttcgccaaaattcatatgaattaatccagcagatattttaaacatgatcagtatataggtatgctaataattactagtttcagttagtcagtagccacaagaagcaaatctggactatggagaactggaacggctggaagggcgcactgatcatgcatcaagccactcaagagtgaagaacatcatctagctctagccaaacggcactacctgtcaggaacaaagcctggagatactgatggttcagccaaaaaagataagcattttacctgaaaaataactcataaacctaacatggaatttctgaaatttgatgtccacaggaccacagcagaagtaaaatgactacttgtaccaccattctgcgtctgcaagagtaaaacattgacactacaggctggatggagacccgcatcagacatataatgcaaaccactggaaccaaatcaaccaattatgtgcaacatgtaaaattgtaaatcgtgaacatgaagcactattaagttttaactcttgatttacaaaataaaaaatcaatcataggaaatgatcagacagacaaaattgaagtcccagactcacctgcagcctaaaaacaccagggcatactgtcaatcaaataatccaataacaccagctccgaacacaaccgtgcataacttaaaaacctgattaccgactcaccatggatgtcatcagaatactaaattagtgcataattagattgctaagtgagtatggaaaaaggacgcaatgcaacaatcaagcagtctttcagctcctgcatagtgcacacaggtacacaactggtgttccaaatgtcaagaacgataagcagaagttcaaattattaatgcacttagcaaatcgttctaataagcagtgtcaggatatgactagtgaacacttcgtctcctccaaaagtgcaaaacagagatcagacgaaaaacagaagtatcagcattcgagaagcaagaatgatgtgcaccagcttttgcaaacaacagaatattgcaaaatgaacaaatatattgaacaaaggtatatgtaaaaatgaacaactaattctggaagaggtaattaatgccagctaacacctttcttaattgaaaattggcaatgattttgccgttctgttaaaaaaaattaatgcaagctatacttacaagcaggagattataacaaagcgcacccttgataactagtttgatttcctacctgaatttcactagctgagatttctttttctcttttcaaaccactttgttgcaccccaagtacactttcattttcttcggtatcaatgtccaactcaagacatgatatatgccctgcagagaaaccaaagctgcatctttttccctctatctatgcaatgcagaaagtagagcttaatacaaggaaatatcatcctcactaacactacaaaaccacatagtgatatcacagccaacaacttgcagagttgaagcgatttgcaccgaaagaaatatttcacagactgaaaccatgtacataacatgacagctaaccaaacatcacaccacatatgccacagggcacaaacatcgcatacgattccacctttcttctaattagaaaacctattcacaatcaaccataaaatctatatccatcctctgatctagaagaaccaacataattattggatggacatgttagccgtcagaagaaaaaaaagcaaaacatgggaacatctgaaaagttgctctcatttgcagacttcaccgcgctggcgccaatcacctctgcaagaggaaaacacacatgaagaaaagaaccaaattttttgggcgaaggaacacatcaaacgtatcgagcgatatctcacctcctcgacgatcttgtacgaatccaggttcacgtccgccagcgataatccgggatacagccgctgcaattcgaaccaaaaccgaacaaaaattgagcaccccccgatcgagacccaaaaattaggaatcatgaagcgcacgcggaggctccaaaatccttacatcaagctcgagccgcacggcgcgcgggcgcttcttgggccggcgcggcggcgccgtgccgcggatggcgatgaagtcggcgacgatctcctccctggtgagcgcaacggagaagcccctcttcttggcgaccaccggcaacggcgcaggcgggtgcagcagcgcctgccctcctcccgccgccgccgccgccttcttccccgcggcctccgatctcgacgcgtcgggcgccacggtggcggagcggcgtgtgcggaggttccaaggccgcgacggccgagaggcgccgccagcggaggtctcctgccccttctccggcgacggggtgtgcggctgcttcggaggcgaggcggaggcgggagcggagtccccgttcttggagcagcggaggaggcgatgggtgccccaaccgaaggtggtcgggaaggagaagctgtggaggcgagtgcgggtggcggagccggccgggggagccgccgagggggaggatttcgcctgcgccgtgtggtggtcggaggcggcggcggaggcggaggcggccatgaggaccatgagaagagggaggtgaggtgaggtgggtgcgaggagggaagaggaagaggaagccggaagaaagagagaaggcgagggtgatgttgcgggtcaggttttaaaaaagagagagggagagacgagacgagacgagccgagccgtgggcgtgtgggcgtgtggcgtatgcgttttttttttgggtttttccccgtctccgcgctcggcgcctcgtgtgattctgacggatggatccgtggatgggtaagcggtggcggaggcggtttttgggtgcagcggcggggccgcgattttggtggtgatgcgcgccgcagccgctgcgtgtgcgggagcgcgtcgtgtgatcgccttggggcggcgcgagcagggggcggacggcgcgcggccccgtcggcgtcgtcagaggttcggtggttttcgggttgctcctgctgtcaacgaggtacgattgcgttgcaacagacggttatctgacttattgcgcggattatcttacgtggctagcttctttgtttttattagggacgttcggctggcttgctgtacgtgacgtatatgtttttcttttgaatagcgcttagtgtttcttcttctcttctataaaatacttactgttaatagtttggtatagtgttttctatattgtataaaaaaataataaatcatggtaaaacaggttttcccgcgttttctttttcaaaacaaagtactaccttcatcccaaaataagtgcagttttgcactatttgtgtctcatgtttgaccattcgttttatttgaaatttttctacgattaatatttttattgttattagatgataaaacacgaatattactttatgtgtgactaacttattttaattttctcataaaatttttaaataagacagacggtcaaacgttgaacacggattcctacggctgcacttattttgggacggagagggtagttcacattacaaatacaacttacgagctataatgcctttatttgggtgagatcaccattcccgtaaaatcttaagcaaaatatggtgttctaaacattagttgaggagaactatggcaatttaaagtggagatcaaaatgagttcacggcaagaagctaacaaattaagaaagtacagcgcaccatagttgtcaaggcagacttaggccatgggcaatcaattgggtcacggtctggggccccaaacctgtggtaaacatataatggacaattatagatttttatcgtgtaaaacagatgtgcagcccaacatacataatgggccagccctagccttagtccatgttggtttcgctccctaatggttatgggctatgaatcaaatgttgcattgtggtgttattacaaccattttatgttattagctaaaagaatgtagttcttgttgtaatggagctactactatcgatgtgggtgttgctataatacactcatcgtctcgatgctatgagtcgctatgcgcaacactcgtgatcgtgtcattggcatcacgagacatagggccttttcactttgttgcccaaattaaccatttcaaattttggtaatgccaaattttaccacattttggcattaccaaatttttggtagaactagctttgtttggtttgatgtatttgccaaattttgtatagttctaagagaggaagcttctagaactgcagaaaaattggtaaagtagtaatggttgaagtatgtttaaagtagtaagaaggctaaaagtggcaacaaattaaacaagcccttaagtttttggttctatagtctagattgctttttgaaaaaaaaaatcaagtcaattaaaaaatatgccatgcaaaaaattaacaacaccacacagttttggtgacgacaatatcaacaagcaccttttgtaatttaggtgttgtataagtttttgtaaagaattctttaatttgcttatgttacttttatggaggattgaaagataaggatagaagtcagacgtataaattaaagcttgtaaggatgctagtttaggtaacgccacgctagagatatattggaagcaaataaaagcacacgtcatgtatctaaatgtatcctagagatgtcatccttttttgttctttttcttgtctcgttgaattcaaaggtaagtgttcatcatttccgacctttacaaaagcctaccaagcggacaacacagatgaccgatggggcatatgactatgtatgaagaacgtgaacctttgacaagttttgcctcttttttttttgaaaaatgaagtaatgttttagtgatgccagtttctactgttgtcgagatggtactcattgttacactatatatatactccatttcatagttacaagttctaatggcttgttctgtgaggttagaactcccataaagtcttaagcaaagtgtggcgttctatactagcaaatgtttctttagaacatggtaattcgaggtggagaaataagttcatgagaaccaggctatgttgattaagaaaccgtagtcaatcatggtttgtggccatgaaccaaatgcttcatcacaatgttaagagcaatattcttagccattttatacaagcagtagctaaatcaaagttgttcatgttgtaatagagttacaaccgaaaagatatggatgttgatataacatactcaccattctctggctatgagttgctatgtgtaacacatgattgtgcctatgacatcatatcttaagttttgattgtacaatttaaattgttttttctttaaaatgcaatgcatgaaagatgtggcaccgggcagttttggtggccccaatgttgactcgcactttttgtaattatgtgttacatggtttcgtaaagagtgctttaatatttgcttattttactcttacggacgtctagaagataaggatggaagccagacacgtcaattaaagctcgtagggatttagctcagttaacgccatagataaattggaagcaaataaaagtacacgtcatgtatccaaatatatcctggagatgccattcttttaattccttttcttatcttttagaactcaactcgaaacgtaagtgtttgtcgttccagcctttaaaaaaggctatcacgctgacgatacaggcgaccgacgaggcacgtgacacgcctacgaacatcataaacctgatacggatgcatacgtagacacatttcgtctgatttaatcttatgacaagaaaggtaaatacatgttcatactactcacatgtctcttacatactacaagagcaaatatctccgatcttttttctttaacaaagatgaacataaaaactggtaaacaaaaggagagagagaaaaaaaaaggcaaaataaaccggtgtgggcaaccccttcctcggccaccggatcacaatccgacggtccacacgggccatgtggctcgagaaacggggcaaatcggcgaccagaatccgcgggggcaaccgaaccgaactcccgcacggaggcggcgcggcgcaggagcacggcggagcggagggagtcggagtcgcgtccaaaaccaaaaggaaaccacggcattttcctcgctcccttctcttcttcctttctcttcccccacccttctctactctctcttcttcttcttcattccaatcgaagaagagaagcgaagagaagagggttaatccgcgctatatatagccgcctcatgcaatcgcaaacctaagctgctctgctccgcggcacacaacacgcattctggttaatcccctctctttgtctgcgcgtgtggttttcttgccaatggagtcctcgccggcggcgacggtgaccccggctgccgcagcaatgtcggaggcgccggcggtggcggcgccgaggccgagggaccctgggttgttcggaagcttcgacctccccgccgcctgggggtgccgcaggcccatggctttctgcagggaccttgacgccgccgccttggtcggctccgaacccaacgccgccgccgccgccgctgctgctggagacgccgtggagcccaagcgtaacgcctcccgatcgccgcccaaaggaggcgacgctcctgtggcggcggcggcggcgcaggaagctccgcggaagcagtggaacctgcggtatcggaagggcgggcgggacggcggcgaggacgcgctgcagaacaagaagctctggaacatggaagccgccggcggcggcggcggcggcggcgccagggcgagccgcgggttctcggtggagctgacgcgccaggagatcgacgccgacttcttcgcgatcaccggccggaaggcgccgcgcaagccggcgaagcggcccaggagcgtccagcgacaagtcgacgtgcgtgtgcagccatagatggagcacgatttcttcatccgccacccacgaattctctccttcttcttacttcttctttcgattgctgatcacttccctgctttctcttctccgcagtcgatttgccctgggaactcgctctgggaggtgagccgcgatcgctacaaggtgaacgaggtacgcacaaaagtccaaatctttcatctctttcgccactggttctgggagatttcgagttggtgaattcgattctgattcctgaactgctgcagaaggggggattctgagttgctccaagaaggaggagatggattttccgagaagcaagatcaaccattggcttatcgtagttatagacagagagagattcagactgtcagtcagaattgtttcagtgcatccatgcttatgctgttgatgatgaatcttgtgtagttttttacctgactgttggggttttgcttctcgctttcgtgaagcctctgcaaactcttctttcttttatgcctagttcggaaacagttaacagaaagaatttcaaactcttgatttctggatgtgagacatggatacatgataggttcttcgttaattctgggtggtatgaaatctttggcattggcttcaatccggtaattctgtgttgcatctcgaattgcagttgcagttcctagtagcttaggagtagaacttaaccaggtttatttatcagttctctagtttttgccagaaacacatatcgatttcttccatgtcggtcttccctgtcttttcaggtattgtacatgtctttcttgatttttttttatggattggcttcctgctttttatcagtatttggttacttgaccattcacttcagactgaactatgtttttgaagaaagcagaggattcatgctcagaaactgaagcagaatcacttgaaatgaatgttggattcatgcgaactcaggaccatttgactgttcaaacagtactccagattcatgctgagacttcagaggaaacatttacccaatcaggaaaaaaaacgctgaggtttcagaatgtgtaaacagttccaaggagaggggaaatgacatgagtaagtccaaacctcatgatttgccaatcattattctggtgtactcgaatgttttgctacctttggtattgattgctgaaagtgaccccttaaactatgacattacagatcctgggttttacaacccttttcctttgtcaactcttttctgtagttcacttttatcatttgtgcttgatgtcatagtagcacattgatcttgtttggatgagctcaactgaaaaggagtcaacgtgtcccttggacatttattttttgttgcaacgatggccttgataagctagttgtgggggccaatatatgacatgcgtatgcaatattgtgaatgtgtatatcttatgatggtactcgtgatcctaagtcatgatagtacagaagagattggctaaaatttatgagtgcagacaaaatttaatccttgatcgactctaattagttcactttggactttcggatggttttttaagggagtgaaagaggggcagtttaggcatagtccttcaaacaatttgaatgtaactctccttttttttttctatgctagaaatgtgttttatagctgtctagtgtagtctttctatagatgatattcctacgtcaacagataccctaattgttgcatatgctcttatgaattatctacaatggattcacaattcactctgttcctaaatgttgtttatgagatgctgcttgctaatattctattacatgctcgctacagcggatgaagcttccactagcacaagtgcacaaccgcacccatgatacacagctcttcaactgttcatgtctgggaaacatgtgctcctcctcctcatttcctgaatatttcttctcatattttttccaagagaatatgcgggagagttgcgttatcttggacaaacagatctatttcatttattcagaattaaatcaagcagacacttgctatccctcctttaattgatttcaacggtcctcattcagaaaaagatttagacaatttattgcctgcccatcataattaagctgagatcctgcttccaaacagttctttttcctctcttcatttattctacttttttgctgttttgctgccgatgagatcggaatgaacgattctcctcatgctgctctgcattcatccaaacttccaaagtaacagtattaaagtaattttactaattctttgtttcatattacatgttattttgactttaattaagatagataaagtttatagaaaattttagcaacatctacaacaccagtttagttttatagaaaccaatatttgatacatttcaataatatgatatgtttgttttgtattaaaaattttgttgtaattttttataaacttgatgaaacttaaaaatatttgaatagtaaaaaagtcaaagtgacttagagcaaccatactgttgcaaaaaagtagccttaaggtctttaaggtgaaccataacaattatggtattgaatatagtctaggccacaacaagaaataaccttggtggattagttcttttattatagtgtgctatctttatacattgtgaaaattgaaataacaagagtccagttgtgtgagttctattttatatgactagttggtccatatatattggtgatgtactaacaacgatggtcaattgctatagggtccaccttaatgctatgttgtggcaataaatattgaccttgcccttataatatgaaacggatgtagtagcgctagagaccatttggttaagtttctcatacaccagaaaccaatattcacaattggaaaacccgacacctgggtcggtgcttgcgaactaaatgaatttccaaaaccgcggaccggggaacgtaccgggtgtacgatttcccgctcttgcacttaaggaccgtttccttggaatttcatccgaacataagacaagtacgaccacatgggtggaatgggacacccctggctgagtaactagcttatcgggggagccatgatgctaagagacatgtggattcgccggggtggtgtttgtcacaccctgaagttctcctcctaagcctaaaattgaattaataagagaccctaagaaaataccggtgcaaagcaagagtaaaccctattaaatcaatgcaaataataatcggaattggcatgtggaatttttcttgagttctacatgtcgaaattcactaacaagatttttagtggaattttcagagctctcgaaataattttaaccatttaaaatcgagcatgcaatattttaaatcccagggaaattcttttcctccttttctttttttttccttttcccttcttttcctcttcttgggccgtcggcccagtccaccccgccgcgcgcgccctcctccttgtgggccggcccaagccgcccctccctctctccccgggacgccgacaggtgggccccacctgtcgggcccgtctccttcctccagccggcgccaccgcgcccgctaccgccgccgcgcccacgcctccgcctcctccgggccacgtcagccacgcccgcgcgtgcgccgcgtcccccgcgcccactcccctctctctcgcgcccgcgcccgcgcccaagatggccgggattcgattttcgaatcccgcctctctctcctcccccactccccacgttggccggcgaaatctcgcccctaccggccacgtccggggctcccctcccctatttaggcttccccgtcgccccctctcgctttttccccatttcgccgaactccctcgtgctccccatcgctcccgcgccgtgcaaccacccgccgccgccgtttccgttactccggcggccgctagggttgccgccgcaccgcgccgtcgccgccgtcgggttcgcgagggtaagctccaccccggccgcccctttcccgttgagtttcgtcgccggaattcgcatcccctcgcgctccggtaagttcaacctctaccgccgccttcggccatgaatgccggtcgccgtggttcatctccctctctctaatctctctctctcttccttccttagggcaccccgaagcccgtccgccggttgccgtcgtcctcccgtggcttgccgtcgccgttcgccgtcgtcttcctccgcgccggccaccctcggtgaggcttcctctcccatctattcccctccctctccttcctagccgccgcttagcgccgccgccttcgcgtcgcctttgcgccgtcgcctccgccgccggttgctgtcgccggcaacgcgttcgcgcgcgcgcgccgtcgccatcgccgtggccggtgggccggccttgagccaagccgagccgggtcgccgccgcccatccgatcaaccccgagggtgatctgggccgtcggtcccgtggaccggcggtggaccacccgcgtggtcccggtccacggtgaaccgtttccccccttgagtcgctgccgagtgggcccgcttgccggcgcccctttcctccctctcccgagccgctgaccggtgggccccgcatgtcggcgccgcgccttctcccccccgtgctgacatcagccctgggatttattgcgcaataaatgatttaaggtttttcttttatagtaataaacacagtgaatcttctaaaattcataactaattcatccgagctccgtttaagcccattcaagtctcagtaaatcaagaaaaatgtgtagaatccattaaaaatggttttgttccctgtttcagtagtcttatagcctgtttgtaatgtttaccttgtatgtcgctagattccggttcctccgacgctccggtgtacttcgaaatagtcgccgaggttcctccagcagcagagcaaggcaagtcatgcttgtcacttgaacatgttgatcctatatcgcaaatgctctattgttttccttcaaatattgcattgttttataatgtttctatggggtgtttacctattgtcatagccatgctattgttgtaccatgtctctttgtcagcttggggttataacatgactagagattggactagggattgcttagccatgcttagttcaactagtgcacaatggggagaatcctattaatgtttagactgttggttctaatggtaatgttggattagtgccaccgctttggtgttggttaattaaaataaatcacatggtgggctgtgggtgcatggttttgctggtcgcaccaatggcagttaaggaccggttcgcgggatgccctggaagaacttatcgtacttaccacaagccagcgtgggcaacggctgggcttgtagcgtagctttcctctagccgacgcatccaggcaagggtgggcatgatggagtttggatgggccctgcgacggcctatgcggcttccggattcacctaggcacgagaggggactgcccgctgccttgcgaggagtgggggtgaaacctgaggtgtggtgtgcttggttagagggggttatgcgaatggtcctgtcacggcctctttccggtatgtcgtggtggcatgtcggcgcacggaaacgtttcgtggggctgtgtcttgtgggtacagttgtacacctctgatcagagtaaaactattcgaatagccgtgcccgcggttatgggcggtcaaccagattcaccgtgattagtctcaccctagtgtaatcttttgaatttggatggtttagttggatggttgggcctgttgcaacgtgggatagcgttggacagtggatagttaatattaattaattattaccactgtttaaatctttcaacttctgcttttaaatgctcgctttatgcaaatgaaccactctagctcttctttgataattccctgcatcatacccctattccggtatgatttgctgagtacagtgggtagtactcggtcttgctctacttttcccaaccccagagtacgagtatgtgtcagatggaggtttctccgaggagtaggcttcgtccgtgccgtcgaggatgcctgtggagtggtgttcccgctgcagttctagtcaaggcttagctcctgttgtctttctttttttccgctgcatttatgtaagacttttatgatgtttataagacgtggatctgaatgtcaacattgtcgtttgtgtaccccggccggtcctggacggggattttaatgcacattctgtttggaattctattcgggaatttctgggcgtgacatgtcggggaggacccctgggcttcctggcacagtatggtctgggacctaatctggtgttggtctgggactcctctcgttggcatatggtgaacctatgtcggctttcgaaatgccttgtcatgaaagccttaaggtctctagtcgtggccgttctgcatggactggatgatccgggttagtaatgtcgtgtgggtaaagtgtaccccctctgcagaggttattaaaactgttcgaacagccgtgcccacggtcatgggcggatgtgaggtgattcctagcgtagttttgtttgactactgccttgtgaaatttgctgttgtggaatgggtttgatgtttggaaaatctgcggctgatgggatcagccaggcccgggtggccgtttgaaagctgttggccgggtgccaatcttgatcaattcaaaagactgaaacattgcacatactccgaccggacgagacgcactgtctcatccgtgtcgtttgagaagcactcccttagttgtttcagaaaagagtttaaataaaatcaatcgcaaaaacaacagcctttctttgaagcctgcattaaacacttatttcccatggcttgctgagtactcctgtactcacccttgctctatataaataatcccccccagttgctgaagaagatgaagcggatcccgctgacgaggagttcttccaggagcaagccggctacgatgagttttagggtttcggcctagttcccaagtcgcgcctgtgatgtgtggtccaagtcttggcttccgtttcccttttgtaatgcagttgtgagctcgggatctgtccgcagtccaacatgactgtactcctactctataataaagagacctctgttgctgtgatattctgtcttcctgtgataccagcactgtttcctgggactggtatcgattaacaggttaatttggagcgtcacgggctagttccgctcgggactagttcggggcgtgacaacaatactgctacgatacggtaacggtaaccacgtggtaactcaccaaattcaaacattttttttcaaaaacaaactcaattttttgataaatcttgttcagtttaatgtgagaaaaaaaaagaaaatgagagaaaagagaacattttgaccagagatgacgcggtggccttgcccgggatatactatccccgttgaccgttcctccttcccgtgcacgtgttagtatttcaccaacgaacatgcaattcgccgatcgcccaaacaagccaaagctttggaaggttgacgcttccacaattcaccaccatcgcgacgacaactcgcacccccatcccataaaacctctcgtacgcgacgcttttcttcccttcaactcctcgtttcaggcgatcgatcgatcgatcaaccggccgtgcggctgtgctgtgcttgcagattggtagtagtaaaacatctgaaggaattcgcatttgaccggagtacgatctacctgaggttagaacaatcctctcttcatactgagctactactagctggcatggttcaatttaagatactgatagtacaccacgtactcttcgaaaattactcgtgctactgttcaatcgggcaagtacgagtatagggagtatggttggttaactgatcaattcaatgatcaaaacatcactttcctttttttaaaagaaaatgaaaaaaaagactgcttctgattatgaatatgaacataatctatattttcttattaaaaaaaatgaacatagtctatatttggttttgtatttattttttatgaggccgagagtgtacagacccatcgtttctcttaataaacgaaacaacatttcgcttaataaacgaaacaacatatttgcaaaagaatagtaatttgtaaataaaacttttatatacgtattcgtagcgatctaaaagtaaaagctggaaaataaattttgatgaaaaaaaattcaaatttaaggttaataatttaaattttggttgacaatcataggcctgtaatctcattgcagtgtgactagcagtgacatgacaagcgtgcaaagggtgccaaaaagcttgtgtgacttgtgggcagcaacaagcaacaggactagagcatccaggagggtcggagtgcagctagcgcagtgcagtgttgtggctgctgccgctgtcactggccggtggggtcccgcaccgtttgccgcgccggggaaagagtagaccgagtccaggagcacagggccggacggcgtgaaaccacaccatcaaaactgacacgccgggcccacaccgaaaatccgatcgtacgaggacccgtgccgtgctgcatggacggacggtccggtcggtccctgacgcggtgggccccacccccaccccccctctcgccctcacggacatggctaacgccagtttccatccccgtttggtgggctggagattggcctcctcgcccgcgtggaccacacgtatcgcccctccacgtcgatgacttgtgggaccctggtgatctggggccccacccgtcggtgggagtaaaagggtaaagcgggtttcggatggcgtaaacctcgggcgccccgagtccgtggcatggaaatgacgagaatgccactcgggcaccacacgccacttcggcgctgcgagcgacggtaacaaaacgcgagcgcgaccccacctcctgtggcctcaaaaccttctctgccttttctctctctctctctctctgccgctcgtcgactcggccgccgccgccgcctctccgagcagcgccgccgcggctggtgaagacaagcagggccatggcggcgacggcagatccgcgggcgaagccgcccgcggcgacgtcgacgcaccacctcgagccgtgggggcagccgccgccgccgccgccaactcccgcgcaccgcttgccgccgacggtgctcccggtggtagcgttaccggcgggtggggacgccgccacgcgcgatcgtcgacgctcgtcgtctcaccgtaggggcgg

SEQ ID NO: 6955 - DNA, 17250 bp, Oryza sativa
agaaaaggaaaaaggattttccctggaattaacaattgcactttagtgatttttaattggttaaaaattatttctagagctctgaaaattccactaaaaatcctgttaatgaattttgacatgtagaactcaagaaaaattccacatgtcaaatccgattattatttgcattactttcttagggttttctcctgatttcaccagcattttcttagggtcaattataaattacaattttgacttgggaggaaaacttcggggtgtgacaaacctaccccccttaaacggaatctcggccccgagattcggtggagctggtgaagaggtacggatgggcggctttcaactcatcttccctttcccaggtcgcttcctcttccgaatgatgactccactgaactcggcaaaaccgggtgaccttgtttctggttctcctttcgctagtgtcaagtatgtgaaccggcttctccacatatgttaggtcctcttggatatcaatgtgttccgaatcagcctgttcttcaggtacccttaaacacttctttaattgggacacatggaacacgtcatggatgccgatcatagtggatggaagttctagctgataggcaacttctccccttcgttccaaaattttgtacggtcccacgaagcgtggtgccaacttgccttttgtctgaaagcggtgtactccccggagcggggtgacacgaagatacacgtaatctccggcctcaaaagttagctcccttcgacggttatccgcgtagctcttctgtcgagactgagcaatcctcaatctctccctgatgattctgactttctcttctgcttccgctaatacttctgttccgaacagctgacgttcgcctgtctgatcccagaagagaggtgtgcggcacttccggccgtatagagcttcaaacggtgccatctgtagactggcctggtagctgttgttatacgagaattccgcatatggtaagcttttgtcccaagctccaccaaaatcaagagcgcaagctctcaacatatcttccaagatttgattgactcgctctgtctgaccatcagtttgcgggtgataggccgtgctgaaatttaaacgggtccccatctcttcctgcagcttctgccagaactttgaggtgaactgactacctcggtcggatactatcttcttgggtaccccatgcaaacacatgatccttgcgaggtacaattctgccaatctctttcccgtataggtggtatgtactggtataaagtgagccaccttggtaagtcgatccacgactacccagattgaatcatgtcccgatgatgtccggggcagtcctgttataaagtccattccaatctcctcccatttccattccgggatttgaagaggttggagtaaacctgctggtctttggtgctctgctttcactcgttggcaaacatcgcagagtgcgacgaattcagctatttctctcctcatgctgacccaccaaaatttttccttgaggtcttgatacattttggtgctgcctgggtgaatggagtactgggtctgatgagcctcggtgagtatcagatccttcagttctttgtcgtcaggtacacacaatctttctcccatccagattgtgccatgctcatcttcatggaaatcccgagcctttccgactctcatgttctttttcagttctgctatttccggatcatttacttgagcggctctgacttgatccacgagcgtaggccgtgcctccaaagcggctacaaacccgtgttcaacaattcccatgttgagatgttcaaattcctgccgcaattcctcacacatgccctcgatgcatagggcagtgcagtaacttttccggcttaaagcgtctgccaccacattggctttacccgggtggtagtgaatactcatgtcatagtctttgattagttccaaccatcttcgttgtcgaaggtttagatccggttgggtgaagatgtatttcagactcttatggtccgtatatacttcgcagcggtttccaatcagataatgcctccagatcttcaaagcatgaaccactgctgccaattccaagtcatgagttggataatttccttcgtgtggacgcaactgccgcgaggcatacgcaaccactctgccctcttgcattaggacacatccaagtccgtgacgggatgcatcacaatagacttggaagtctttcgtctggtcgggcaggatcaaaaccggtgcggatactaatttccttttgagctcctcaaagctcttgtcgcactcagctgtccatttaaacttctcgtctttcttaagcaactgagtcatgggtcgggcgattcttgagaagttttcgatgaaacgacggtaataactagccagtcctagaaaactccgaatctgcgacacggtctttggtggggtccattttgtaactgactccacgttcgatggatcaactgccacaccctgggctgtaatgacatggcccagaaatttgacttccgtcaaccagaagtcacacttgctgaacttggcgtatagctggtgctccttcaacttctcgagtaccagacggagatgttgttcatgttcctcttcggactttgaatagataagaatgtcgtcgatgaacaccacaacaaacttgtccaaaaattctatgaacactttgttcatcagattcatgaagaatgcgggtgcgttggtaagtccgaaagacataaccgtgcactcatatagcccgtaccgagtggtgaaggccgtcttcggaatatcctcttcccggattctcagctggtggtagcctgatcgcaggtctatcttagagaacactttagctcctttcagttgatcaaataaatcgtcgattcgcggtaagggatatttattcttgattgtgacctcgttaagtgcgcgataatcgacgcacatcctcttcgtcttatcctttttctccacaaaaatgaccggagcgccccaaggtgaagtgcttggtcgtatgtaccctttctgcagctgttcatcaacttgcttcttgacctctgctaattcgttggccgccatcctgtatggtctcttgtaaattggagcggttcccggtgccaagtcaatccggaattcaatctccctcttgggtggcatggtagtgaggtcttcggggaacacttccggatactcgcagactatgggtatatcttccaattttctcaagttcttccccacggtgtccactgggatttccgtttcaatttgattcaaggagactccttgctttggtgagtctggtgatttgtacactacggtttctcccttctcgttggtcaaggtgactgtgcgactcgcacaatcgatgacccccttaaacttggtcagccaatccatcccaagaatgacatctaggtctttggattcgagaagaatgaggttggctagaaatggtgatctttggatttctattagcactgaagggctaaaactgactgaggttgaactatttcccggggtacgaaccctcattggtgtgctaagctcgtctttccttagcccatacattcccacgaatttctttgaaatgaaagaatgcgttgcaccagaatcaaaaagtactgttgcagggattgagttaacagggaacgtacccagtacgacctctggtgctgcttgtgcctcctccgcagacgcgtggttgacacgagcctggataaaccttggcccggcacgcctgggcttcgggcatttgtcagcgaagtggccaagctcgccacagttgaagcaggaccctggttttgctcccgtctccttcttggcttgcgcgggctgggctgactgtgccggtgccattggtgggcgtggagctgcaccgcggttgggctggcctccctggtggttctgactgccactagtgccctggtggaagttgctggagttgaacgggcggtgctggcggacgatcatggtggtaggtccaccctgctgtccgggagtgaagcgcggtcggtgctgactaccttggttggaccggaattgcgccgcctttcttttcctgtccattttgttgcgctgatcctcctggcggattgccttgtcaaccagcctctcaaagtcggcgtagtccccagatatcagttggttggtcagctcatcatccagacccgccatgaacttctcctgcttctcggcgtcggtgcggacatcctctggtgcatatcgcgcgaggcgattgaactcgtggaggtactctgtcacagtcatgttgccctgatggagcgcccggaattccctcttcttttgtgccacgaccccgtctggcacctgtgccttcctgaagctacggcagaactctgcccatgtgacttcagtacccggtgggcgggtggccatgtggttgtcccaccaagctgacgcaggaccctgaagctggtgtgtggcgaaagcgaccttctcctgatcattgcactgcaggagattcagcttcttctctatcgcatggagccagtcatttgcctccatagggttggtggtgctggagaaggtgggtggcctgacacgtagaaactcaggcaacttggactgggggggagggggaccaaactgctggtgctgctgttcggcgtgctgcatcatcctctgatgcatctgctggtgctgctgctgcatctgctgcatcatggctgccatcatctgagtctgatgtgccataacttgggcaagcgtcggattctcgggaagtggtggtggaccattgccagaatcaccgttggggtgcacaccatcagcgcgttcttcgccgttgctgccctcgcctgttgcgcggctaccagtcctggtgtagaccatctggagggaagagcagacggggaaaagaagaaaaacagatgctcaagaactaagctttattacaaaggaattaaaactgtaattgttctgatctgaattaaaaacacttaaaagggcaagcaaatatccttattaagacagccatatcataggcacatgatatcgaccgccgactgaccccaaacaagcaacctacacacacaaactaacaaacaaaaactagacagtcgatgaactagtggaaaaacgagcctaatgctcggaacggctcctgcggtcggtggagtcgaaggcgtcctcctgctcgtcacccggtccctctgagcgactcctggagcctgacggatcggtctcgccgctgccgctgggagtagcagacagccaacctccggtaccactggctgaacctctggcggctgatgctggagcgaaggagagagtgaacgcgggagttggagctggagctggagctggaggaactgcgggaactgccggagctgcgggcggaactggaggtgctgcgggagctgctggtggaggtgggttcctgggcgcaagctggatgcgcacgggtgcagtcgtcctcttacggggcgtagtgcggatccggactcctcctggtgctggaagacccttcaactgagcattctccttcttcaggcgcgctatctcgtccttcagagcgacgatcctcatgagcttcccatcattcaaggccttggtcgccttgtgcaggtccgagtgcatcctgtccaatcccctcatcacagcacacatgtgaccaaaggtggtgtcgttctcgccagctgtcggacggaaggagctgacgccatcaccatgggctcgacgggggtggtagcggtacgccgtgtcgtggaagatgtagtcgtggcgctcccgtaacctggccatcatcaagtaggctgcctcctgacaggcgtgatctgctgtgcctcctgatgcctcgaccgccatgttagcgaggcaagtccccacgtagccatggacctccaagcggacacggtaaggaagctcgccactgagcggtgggatggtcgtgtattccggcgcgtcggggtagcccactaccagtgtcatgcgtgccaactctgccacgaaatcaatcatgccttctccgcggtggttgggtgggtgaccggccatctagagaagacaaagaagtaggatcaatgcatgctcaaatccaaatttaaataaagcaataaagactcaaataaaggaatcaaataagagcaaaattttatgcatagatcattttacatgagcgcgaataaataagacagactcacataacgataaaataatgggaaattagatacataataataataacgaacaaagcataaataccttgcaacccatgataccgagctaggaccgaatgcatttcacccatcaaatcccaactgactgacgaataaatcccaataattttactaaaaccctagactgactcgttttgaaaaactcactttaaacgagcgaccaagatttttcccttgaaccacaagaacagatccccattttcccggaacaaatccaattgcgaagaacatatgcaatgaaaaaggattcagagggctcttaggtttctccatttggcttgtcctacggtcaaggtcggctctgataccaacttgtcacgcccagaaattcccgaatagaattccaagcagaatgtgtattaaaacccccgtccaggaccagccggggtacacaaacgacaatgttgacatacagatccacgtcttacaaacattataaaagtcttacagaaatgcagcggaaaacaaaagaaactggagctaagccttgacttgaacggcagcgggaacaccactccacaggcatcctcgacggcacggacgaagcctactcctcggagaacccgccatcggacacatactcgagctctgaggttggggggaaaagtagagcaagactgagtactacccactgtactcagcaagtcataccggaataggggtatgatgcagggaattaacaaagaagagctagagtggttcatttgcataaatactggcatttataaacaggaatttaatgcgaaaacagttgtaaaaattaaacagtattaaacatccgctgtccaacgctaacccacgttgcgacaggcccaaccatccacctaaactatccaaattcaacagattacactagggtgagactaatcacggtgaatctggttgaccgcccataaccgcgggcacggctattcgaatagttttactctgatcagaggtgtacaactgtacccacaagacacagccccacgacacgtttccgtgcgccgacatgccaccacgacataccggaaagaggccgtgacaggacccttcgcataaccccctctaaccaagcacaccacacctcaggtttcacccccactcctcgcaaggcagcaggcagtcccctctcgtgcctaggtgaatccggaagccgcatagaccgtcgcagggcccatccaaactccatcacgcccacccttgcctggatgcgtcggctagaggaaagctacactacaagcccagccgttgcccacgctggcttgtggtaagtacgataaattcttccagggcatcccgcgaaccggtccttaactgccatgggtgcgaccagcaaaaccatgcacccacagcccaccatgtggttcattttatttaaccaacaccagagcggtggtattaaaccaacattatcatataaacctatagtctaggttttaaatgagatccccaatgtgtgctagttgaactaagcatggctaagcaattcctagtccaacgtctaatcatgttataacccaagctaacaaaggagcatgatatccaaaagcatggctgtaacaataggtatccatcccatagtgatattataaaacaatgcaatatttgaaagaaaacaatagagcatttgcaatataggatcaacatgttcaagtgacaagcatgacttgccttgctctgctgctggaggtacctcggcgactatttcgaagtacaccggagcgtcggagggatcggaatctagcgacatacaaagcaaacattgcaaacaggctataagactactgaaacagagaacaaaaccatttttaatggattctacacatttttcttgatttactgagatttgaatgggattaaacggagctcggatgaattagatatgaattttagaaaattcactgtgtttattactataaaagaaatccttaaataatttattgcgcaatattaaccagggctgacgtcagcgagggggcgcggcgccgacaggcggggcccaccggtcagcgaccgggagagagagaaagagggtggcggcttgcgggcccaccggtcagcggcacgggaaaagaatggggcggcggcgccacgtggcgaccggaccggcggccccgatctacccaagggtagatcggacggcggcgcgggacctctcggccggggcgcgcgggcgcggcgcgagacggcggcgaccatggcgccggcggcgcggcgctcacacggcggcggcgcacatgcggcagcggcgcaaagcgacgaccgacggcggcggagagcggcggctagaggagaggaaggggaaaagaagggaggggatgcctcaccgagggtggccggcgcggaggaaggcgatggcggacggcgacggcaagccacgggaggacggcgtcggctagcggacgagcttcggcgtgccctaaggaaggagaagatagggattagagagagagatggaccatggcgatcgggatccatggccgaaggcggcggtagaggtggcgctcacccgtgcgcgtggagatgagggctccggcgacgaacctcgacggatgaggggtggacgaggtggacctcggccgcgcgaagctaacggcggcgacggcgtgagacggcggcgagcctagcggcggctagcggcggccggagtagcaaaagcggcggcggcgggtggttgcacggcgcggaggcgttggggagctcgggagaggtcggcgcaatggggaaaaagcgagagggggtgccggtgatgcttaaaaaggggatgggggaaccggacgtggccgggagcggcgggattcgacggccgacgtgggggagtggggaggagagagaggcgggattcggttttcgaatcccggccatctcgggcgcgggcgcgagcgggagagggaggggaacgggcgcggggaatgcggcgcacgcgcgggcgtggtcgacgtggcccgggagagacggaggcgtgggcgcggcgtcggttgcggcggtggcggcgcgagcgggatcggcgggaggagggagacgggtccgacaggtgggccccacctgtcggcgaccccgagaggagggaggcgggcggccggctgtcgggctgggcctcggcctgggccggcccagtaagggaggggaaggaagggagaagtgggccgacggcccacttgacaaaaaggagggaaaagagaggaaaaaggaaaagaaaaggaaaaaggattttccctggaattaacaattgcactttagtgatttttaattggttaaaaattatttctagagctctgaaaattccactaaaaatcctgttaatgaatttcgacatgtagaactcaagaaaaattccacatgtcaaatccgattattatttgcattactttcttagggttttctcctgatttcaccagcattttcttagggtcaattataaattacaattttgacttgggaggaaaacttcggggtgtgacatccctcatgataaagatgaagccgagcggatttcaaggcggagcaaactttatgttatgcatgaatctgagttatacaagaaaagcccttcaggaattctgcaacgctgcgtatctttagaggaagggagacaattgctgaaagacatacattctgggatatgcggaaaccatgctgctgcacgcaccattgtcggcaaagcttaccggcagggttttttctggcctactgcagtgtccgacgccgacaaaattgtgcgcacatgtgaaggttgccaatttttcgccagacaaattcatctaccagctcaagagttgcagactatcccgctgtcttggccgtttgcggtttgggggctcgacatggttggcccgtttaaaaaggcagttggcggttacacgcatctctttgtggccattgacaaattctccaagtggattgaagctaaaccggttgtcacaatcacagcagataatgctcgagacttcttcatcaacattgtgcatagatttggagtgcccaatcggatcattaccgataatggcacacaattcaccggtggagtttttaaagacttttgtgaagactttggaattaagatttgctatgcctcagtggcacaccccatgagcaatggacaggtggagcgagccaatggcatgatacttcaagggattaaagcgcgtgtttttgaccggctaagaccctatgccggcaaatgggtgcaacagctgccatcagtactttggtctttgcgaactacacccagtcgggccacaggccagtcaccttttttccttgtctatggggcagaagcaatgttgccgagtgaagttgaattcgagtctttgcgctttcgaaatttccgtgaagaacgctacgaagaggaccgagtggatgatttgcaccgattggaagaagcccgcgaagcagctttgattcggtcggctcgatatttacaaggattgcggcgctatcataatcgcaatgttcgatctcgtgcctttttagtcggtgacctggttttgcggaaaattcaaactacacgagatcggcacaagttatctcctctatgggaagggccatttattatctctgaagtcacccggccaggttcttatcgactcaagcgcgaagacggtactcttgtcgacaactcttggaacattgaacatcttcgtcgtttctacgcttaagtttatcattgtacttccctatcttgactgtcaacatcaagttttcttcttgaagttgtcagtcgggggctatcatcataataatggagtgtgattttttatcaatttaatttgcttacttggtctatcattgccttgtttgattttttctacttagtctgcgaggactgaaagtttttaatagcttctttgggttttaggctcaacaaagcttgataaaagcttttaagaaatcaaagacttggctagaactatcaagcacagcataaatacaccggtattgtacaaattgagcctccatttgttacattcatactcagtcagagtcagtcctttcatcatcagagttattattactcggctgaagatcgttgttgcggaattgctctacaacatcacttgcaatcttgtcagccgcactttgagcattactgataagatcaagagcagcttcttcacttgtcccgtctgcaaagccatcaatggtatcaatttcaatcctcgggtacaaggatttggtcatcgccaatgccatactagctcccatacttccagctttcttgatattcttgaagtatacatccggtgcaactctcagcttgtcaaagatttcggttgcgtcaagtgcactcggaccactgttattaaggaacatagcttggacaagtggtgtagcgacattggcgacttcgtctcttgctccttcaagtttcttgatcttaccaaccaggacgtcaaactgagcttgagatttgattttacggtctacaaaacacatttataataagaatttgctgcattaaaaagaggaaagttcagattgtcagctggcagtaccttcaacctccttcaaggctgagtccctttctgcagccagttctgctttgtcttttttcaaggcttctatttgcttctccatttgagccatcctggtggcttgcgctgtttgaaatccaaatgtttgaggatccagttatgacagcacaaatgggacagatctagagattaccttttgatgaaccactcagctcgaagttggagtcctgaagctgtgcaattcgatcccttaattccttctccgttttcttggcatgctccttggcctcgtgtagctgttccctaacggcttcaagagttcccaaatgtggaaccagcttttctaaggttgtggtcttggcctcattgcgaagatggatcctctgcacggtggttcatggattagttttgctaacgagacaataaagtcatcaaaggcagtcacctagaagacttacattcacaatgcgagtagcttctccaagtactttcttcagctggcacacttcctcatcttctttttggcgatttatgacaatgccagaaacttgagagttctcgtcccaccatttgagtaagataggaggacgagagtcatcagctgcctttatgcggagaatttcttcttcgtcgccgcctaatggacctgatgcattcccaagacattagacgaacaagctggagttattcagaacggcatcacttgagaatatgagttacctgaggatgtgcctagttgagcgtgaggtgatctttgctctttatccagagacccaatcaccgagtcattgccagcttttggtccttgggaagttgtcgcttgtgctccagcttcaggaatctcttgatttagacccacatccgactggtttccagtcaggggttcttgggttgttgcagtttcagttgcttccgactggtttccagtcggtggctggtcactcggatcggccttgtcatccgaagcatgggcgccagtcggctggtttttggcagtcggctggttttcggcagtcggctcagtgtctttggataaatttggctctgtcacagccggatcaggatcttttccagttggatcaatgtcggatggtttcctgcaaagtgtcctttcaacattcagcgtaatttctatgagagaagtatgtcaaagggaaatggtatcgagaggtttatacctggaagatgttctaatctttggcatttgacggccagccagttttttcctgggcatggtatgctttgggagtttgttgggcgttcccttgtccccagatttgttgctgtcatcgccctcgtcgtcattaagcaccagctttctcttgcgaggacctgtctgcccagccggtttggaggtttgaggttgtgggtctgacctgattgtcggccctccacttccctgaatggtgtgctggcgaggagatcggcgctgagcaattgggggatcagatttcatcaatacgtattcctgaatgagatgcttccacagttagctaactcaacatgaagatgaaattatgttttgaccttgggttgaagattttcagatacatacctgcggaggcggattgaatgcgttgtatggtacaactggcagttgatgtgagtagctgacgacaatagcgttcgagaatatcttgtacatcctctccttcatgatcttaaaatccagagaatctgggtcttcacggtttggatcgtgcttgccgtcaaattcaaatgctgtgcgggatctttctttgattggagctaatcggcacttaatgaaatgccgagtgatttgctctccctgtaagccttgctctttgagtttcagcatgcgttccatcagttctaaggcttgggcagcttcatctcccatgggaagagagttccatgtatcttggtatactgggggaagacaggagtactcaggaagagcgggctcgggattttgaatataaaaccagttggcgtgccatcctttgtttgaagtcttgaaaggcatggagaaatacttttggctcagagtgcctctcagttgaaatccagcccctccaactacgcatggtttgtttttgttcggttgaggcttaaggaaaaatattcggcggaacagagcaaaatgaggtctaatgcccaaaaaagcttcgcagacatggacgaaatttgcaatatggactatggagttcggattcaaatgatgtaagctgattccatagaaattcagtatcccacggaagaactttgaggttggaagagcaaatccgccataaaagaaatgagagaataccacgacctcgtgtgtatcgggggttggaaaggcttcaccgcacgctggccgccacccgatgatctccttgccagggagaacgccgtgcgccaccatctccttcaggttttcttccgtcacgtcggacggcgcccattggccttcaaagctttccttctcttccgccatcgatttttctcaaatgcgctgatttgattcgagggatggcttgggagaggtgaggaattgaggcggtggatcacgggaaggattttgatcacgttttgaaggtggatttgggtggattggtgaaccctagttcgccggcgcagctctttactgtagcgtggagtggggaaaatggcgagcgttccggcggggaagacgaagcatcgcttggatctcggatttcttgttaagggtatcggaagtgcaaatgggcctaggcctgaacagtacctcagcccaatacttttaacagcgtggcccattgtgttccttagggacttaggcattttttgctttggcaatttatgcgcacaatagtgttgcccaatgttgataaaatcctttttatgcggtcatataattctttagaattattgcaatgcagattaaaaggtgcctgacagaaaggtgttatactgctttttgttagctttattaggctacaaaagctgtcttggttaatttggaatgacttatttttatcatagtcacttccttggtatgttatatacctattttcattatggtaaatagtcatagcctaggctattagacttattcattaccataatttttataatacttggtgggtaatctttagaattttatattcggatgtctatcaagtgtgttcattcgtgaaccttttagagtgttaaccactcggatttcttttattatggctaaaaagcagtcggctagaatgcctctttaggcgccgcgtatgcttttgccatctgatgcacgattgtgctattattttgttctcaactatatgtttagtttgttaactaatcacatagttgggggctacacctaattaggtgcatctattcgatgcaccatattctttatcttttcgccctttacagtcttcgtcttcgctactcggcaggccttgacatgaaaagtttgaagcactcggactatttttgagatggctacgatggctgactgcaaaggtctcgggggctactgtggagattatggatatcccatatctacacggcgatggtatttggactgggtacaggatacctaatgtagatagaatatcttatctgtatctcgggtttgtttcttaacttgtgtatcaaggaaacaccctgagacttagtcggttacgactatatttcatctgtatttgcatattccgttagggatatagattatcttttgtaacacggactcctccccatatataaggggggtccgggtgcctctaggggcagatgttgattttccctaaatcatacaatcaataatacactcggcggattcatccccggacaggagtagggtattacttcttttataagaaggcctgaacctgtataaatcctttgtctccaaacccatacactttcctagcttgatagccacccccttttattattgccgaaatctagattcgacaaacccgaagttcgccgtcgcgttttgatctccggcgaagccctgctgctcctcccgtcatcgccctctgtcgccatcgactccattggattcgcagctgcgaagtgaagcccggccacccctccgttgtcgccgcacatcgccggaaagttgtcgccgccgtggacagtacctcgccgccctttgaagctcgtcgccggccatcttccgtcgctgtccgtcgtcgcgtaagtgttggtaagaatcgccgttgcctcctctttctcccggtgccctccgattgcattatttcgtcggcaatcgccgctcctttgtcgttcaccggtgtactttatccctagggtcttaattccatctaatctaatcttgtttggtcctagcgtcgagccggtcattgccgtgcaccgtacccgctgttgtccgctgctagccgccgcgtagccgttgccctagtgcacgttctgcagtcaccgcgccgctgtcgtgcatcgctatcggctgtgctgtcaccctaaccctagctttgtgtttccgctgagctgccgcctagccaagccaagtcgccctagtgccgccgtgtcgcagctgtgtgccgctttaacctagccgtcgctttagccgttgctcggtagtcaagttgtctagccgtaggtgcatccctaaattcctaccggtctatcgtttgtcgtaccggggcttttctgtgaatcgtttctagtccaccggattagccgcagccgttgttgagtcgttcgctcgttcgttcgaatgaggtgttccccgtgcttcgttcgttcgtccgtgttgagtcgtcctttagttcagagccgccggttccgttcgccggtttcggttgatcatttaggtgatcccgtgtcacgtagaattgactcgttgagtcggtatctcgtgaggcccgcttgccagatcaatccaagccatccgatcttagtcgactcggtcaatataaatcctctcctcttttcagtggcatattatttctttttaatatatgtcatctaccaaatatgatccaatcttttccggaggttgctttaatcttctgtctcagctataaatcatttgtaaatgatttaattaatttggaatagtctccgtttaataggtttaattggaattaaatcttgtaaaattcataataaattcatatgaaatcagaatgaggccgttcaagtctcataattcatctaaaaatatgatctacatgtttgtttactttttatgtattgtttatttggtttttattagtctttttcctcgttttgcgtgatagcttgtcgtttccgtcgttgcgaaggttcgcgagtgcgtcgggagtgttcaagaagattaattgaagaccgattattgcaaggcaagtcacacagatcctaaacacaatcctttgagcatgttgatcctatatttaaattctctatttatttcaactgtgcatttattttcgaatgtcactgggtggtgtgaacctattcctttgttatggcctgtttgcattgattactttaatccttgataccttgggttattataatttgactagttgagctttatatattggttcagctagatattagatgtgattgcttagccatgcttagaaacattagcacactgttgggataacttatgattcattattatttaatgatggtttaatggtagctcacgatggtcaatcgtgattgg

SEQ ID NO: 6956 - DNA, 953 bp, Oryza sativa
gaatgaacccggcctccaaaagtctagccacctcctcgcggatgaaggcttgacgttccggggcttgccgccgcactttctgccggaccggccttgcacccggccgcacggcgagacggtgctcaatcacctccctggggaccccgggcatgtccgctggtctccatgcgaagacgtcagcgtttgcccgcaggaaggagacgagcgcgtcttcctatttgccatccagaagaccaccgatccgtgtggtcctggatgggccgtcgcccaaggcaacctccttgaccgggacctcgtcgcaagtggccatccgctgcctcggggcggtgggggcagaggggccaagcctctcgtcaccaccctcgggcttggacgcagcagcgaggcggtccgcgcgctgctcaatgcaagcaagcgcgactttaaggtcgccacggacagagatggggccaccggggcccggcatcttcatctggaggtaggcgtagtggaccgccgccatgaacttcaccaacgcgggtctccctaggaccgcgttgtagggcagactgaggtccgccacatcgaagtccacccgctccgtgcggaagttggcggaaccaccgaaggtgaccgggaggtcgatatgacccagcggccaggtgtgccccggcgtcacaccgatgatcggctgggacggccggagcaccatccccggggccttgatggcgtcaaaggctgcgggggaaaggatgttgagggctgcacccccgtctatgaggacacgccccaacttcacattgcaaacggtgggggaaaccaccatcgcgatctgtcctccccgggcaacgcacggcgggtggtcggtctggtcgaaggtgagggcaacctccgaccaccgcgcccgccgcgtcgcctcatgggtaggggccgcggccagaagctctcgcttcatgtccttgaggctccggcga

SEQ ID NO: 6957 - DNA, 4430 bp, Oryza sativa
  unsure (1)..(4430): unsure at all n locations
aatatcatctcatcaaggcacattttagcgaaaatgaaatcgaaaatggagaaaatggcaaagtagatgtggtcacgtggtccatattggcattttaacgaatcgtgtttttggatggcattttagcgaaaccgcgtttcgagaatgaccaaatgtccattttctcnnnnnnnnnnnnnnnnnnnnnnntttggtaatctaagtatcggagatgaagaaggaatcgaaacggagttcgagatagagatcgtcccggaaacagagtaaagtcagctgaaatccgaatcggctacgatcaggatcggcagagtccgagttggatagggttagccaattgagttgaatctgacaatgtagcacgatatacgttgtcgggttaggttaacgagcttcatgaggattgtcgtgcatggatagagtcctaagaaggcaattgtatctattaattaggatattttatgtaatttccttagagatatgtttgggcaaaagtctgccacaaagacttatggtattttagagtttgttagagataagaatcgtgtccgatatagacatattttgtaatctcgggtataaatagaccccgagccccatgtaatcaaactaacacacgcatcgccacccttttaacttttgttttgtttcgacgagttcttactttcgggttgagctgcatcggttttgatcttcaacaagaggtaaaacttgttatggtggcttgcgttattaggattagtgcttccatctttatgatactctaatcttatttatgtaatttgtcgagttatcatatatcttacataatctccggcaatatcgctatctaaccgtcaatcggctaacgtctggtacgagaagtcagccgattaggttaaatactgatgttgacttagattatataggatatctactactctatgaaatatccaacggcttgattgtctagaaattgtccttctttttatacttatagctgcatcagttaggtttgatcttataagtcgtgattagaatctcaatctgctttttggttgccaattagggtagtatcggggtttcagccgattttacctgatttagctttatatttcattatgttaggatatcattacaataaaatatgttagcttctgtgtaatgtattttacttgctttaatatcgagtagtatcggagtattagccgatacgtgctagatctatctgatcggttatgctatgaacagatatatagtcttgttgttaatatatattttgatctaagtgatttatactgtctcggcatggcgaccgatctatcccaatcacttgatttaagtatatatcgacataaggactatatattattaatatctacagccgatcgagtagatttagttcttccgtacttattaacatttgccgatcgattcacatatgacatcggctcagagataagtgatatgtcatcggcaattagtcgatcggctatcgtttatgaatttaaccgcggtttctttatctttgtttcttgttgattgcaggatcaaatcaactggcacactcatacacctaaaggcaagcttttagacctgcattggagttaagcagatctcccaggccttgtgtttttacatcaacacgcgctgggatgagactcctctgactttgtgtagtacaactgcaaactgcacaaaggttgtgtttaaatctacgggtgaaaagttttggtgcatcacatcggatatacgggcacacatttgaagtattagacgtagactaataacaaaacaaattatagactccgtctgtaaactgcgagacgaatttattaagcctaattaatccgtcattagcaaatatttactgtagcacgatattgttaaatcatgaagcaattgggcttaaaagatttgtctcgtaatttacacgtaatctatgtaagtagttttttttatatttaatactccacgtatgtatagatctaaacattcgatgggcaaagtcaccggatatccgtggcggtgcgtggaacagttgggcccttcccaatttccattcaccctttcgccgcggcggcagcggccggcagccgagccgcgatcgaaagcaccaccacgatgatggccgcagcgagaacggcgttcgtctccggcgacctacttccactcaacgtctcctcctcggcgtcaatccccaccctggcaaaaacccaaggtatcaccaaatccatctcgttcggttctgggcgccgtcgccggccgcgagatccacagtccatacctaccaccaggcaagcctcctctgctatctagagatattttccgccatattgaaaaacatcacccgaaaaatccaacatatgtactattgctcagatttagtgataatattgatatgcagttcagatagctagtacatatttgcagtttaaagataatattattagtacattattgttccagtgcattgtgaaacatacttctcacaagaagaactatgatagattaccaaagtagttacaaaatatgatgtgcatagattgcgatggattttcttgtgctcagtatcccacctatttcatcttggaccagatagaatcgatgcagagggtggagctgaatatgtggatgggttgtcttgagcagatatcactgaatttgcgttggcaaagctgtaatctaggcaattttccacgctcactgcgccttccaataccttgacaaccatcgacatcgaaggccttctgctgctctcattttgcaagcaccacattgcgagcttcaacattttaatcacttcctcctggtggtgtgagaccatatcagtacttttcttatcaattatatcgatcaatacattgtctttagccttctctcgcaataaattgatgagctgaacgctttcctctggctgcgaaatatcgatatttttccttccacatattatttccaagagaacaactccaaagctgtagacgtcaactttttcagtgatctgtgatgttagccattcaggtgccagatatccaggtgtgcctctcatcacggtcactactttactttgatccctgtctattagtttggaaagtccaaaatcagccagtttggcattgaatttctcgtctaagagaatattttgtggtttgatatccaaatgagcaatttttcgcctgcattcctcatgaagataacataaacccttggtaatatccagaatgattctgcaccttgtgcaccaatcaagaggagcattgttatggcggtaatagatccacatatcgagtgaccctcttggcatatattcgtataccagaagcctatttgacttctcggcacaaaatccaatcactttgacaagattgatgtgctcaatgctgccaatagtctcaacctctgccaagaattccttctttccctgtctggcaccttccagacgtttcactgcaactctcttttcacctatttttccttcaaagactgatccaaatccaccttcgccgagctttttactgaaatcttcagtgcgttctcttaacttttcaaatgaaaaccgcattggcattccaggcaatatatcgaaatctaattcttcatctagtttttgatacttcctcctccttcgtacataaatgccaacaataataactaaaacaaggctactaattgctgcaagtgtagcccctaaacttaccttgatacgtttttgtgtaggggcagaagcggagggaggaagttgcactttgaggtaaacagaagagttgtaatggagcttttcaggttgtattgattgcaaggagaagacctctgtcacagacttacattctccatcggaatcattatggtaatacctgaagagtacagccctgcaggagcaattctttaagcaggcttgcttgcagtcatctctactttttgcattggttataatgctgccatcaaagtaataaacatcagtaagagttaagaattgatggtttttcatttcttgacaagatattggagtcactggtgcacaaccaagattagccttccgctcgtcaactggctggaagtagcttgaactagaattagtctgaagaggacagatgcattgcccacctgtgcatatcgcgtactccccgcatactgtggggaaagcacagttatccacgtcgattacatcatccatgtggattacatcagataccatggtccactcaaatccagaccactcatacaacctcaaatggccatcatactctaaccttatgtactgggtggacttagcttctggcagtgcaattcttttatctggctttcctgcctgtgtcgactgcagaaagatgctgaggcttccattcgtaaaggtaaccctcgttgggtcttttctgctcttgtttgtgtccaccaaatatttatagtatagctgtggtggtttggatccaacataggcatataaaccatctggg

SEQ ID NO: 6958 - DNA, 39710 bp, Oryza sativa
  unsure (1)..(39710): unsure at all n locations
tttttgaatgtcatcgagtgggaatgacctatttcctttgttatagccttttgttattgattacctatactttgtcacctggttaataattggattagctataacattatatggttttggctaaagtaattaggatgcttagccatgcttagagacactagctcatatgaatgggataattaatgattcattattacttaatgatggattaatggtagctcatgatggttaatcatgataggatgattaattaagatgtcaactaaaacatggtaacggtgggttgtgagcacatggttttgatggtcgtgctcatgacaattaaggaccggttcacaattttcggttgtgaaacattaaccgtgccaaccacaagccagcgtgggcaacagctttaccttttgtatagtgtggttcattgtggggcaccagactgagaagtggcggagataagcctacgggggtcgctggggagtccatggtgcactactttgaattgtgttatgcggagggtattgtcacaatctctattcgggtacttgtcaagtatcgcgacgcatggttgacatgatgttgaggttgtgtcttgtgggtatagtggtacacctctagccagagtaaaaactatccgaatagccgtgcccgcagttatgggcgggtctaacaatgtctttcgtgattagtctcacacctctcaccataataaatgatgctgtaattggtaataacttgcttagctcctggtttggagatagaactgtgcagccgggaatggttgtctagaaatgttgggcctatgcaacgggtatgttgtgtagcgttgaattaatattgtttaattaaatactttactgtttttctaaattctgaagtatttattgaatgccatttatgcaaatgagactatattatgccatcctttattatcccctgcacttgcatatttgctgcgtggcttgttgagtatgtcatatactcatcttgcaatcattcatcagagaaggagttctacagtgatgctgaaggtgtggaggattaggcgtagccctggtcaagctgcttgtgggatggagtcgcctgtgctctttattttattttccgctgcttagatctttattgtttgagaggaactatccatctctgtaatgactttttattcgcctcttaattagattaataattgcactctattatcaatttgttattgtgtgcctcagctgattcctggacgagggtttacacacatgtaagcgtttggagttttggatagaaattccgggcgtgacaagttggtatcagagcctccttaaccctaggttatgccaaatggttacctatagaagccctctaaaaatattgaaaaagtagaattattctcctctctttctcttttaattaaaccaagctaatggcacatgcagattatagtctcttcaattgttctcattcaaaatttactcattattcctgtgttgttggtattgtacatctattactgtactaatggcccatttaccagcaaaagttttacaacattatttattttcattcaatcatgttgaaatatcataaacttagcatgttgattttataacactcttttattttatgtcttttgaaacctgttattcaaaagtgcaaaatttgtgatcctgttttcaactgtttcaacttatcttgcaagattagtttactttatttacctttcactttgattttctgactttattcaatttaatccaaaaacttgtgctattaattggataaatgtcttaactccctcctttcacttgtctttagatgccgcgcttcaagcctgagtacttgtttggtattgagggatttgtccaagagctacgtccgatgtcctttaccataggattcgggactgcccctttgtatgcccagattcctcatgatcgtgatgaagagaagttccgtgtcaaggtcaccttgaatagtgatcgtgaagagatcccatcggtgatgttcgaaggctggagggggaagctatcctcatgcttgtcaggaggcggcaaggatcaccataggagagctccgcgaccgttacaatgatctgttggccgacactgagtatcgctactatcctcgtcaaccctagggaagtgaccgtgccagctatgttgatcctgaaggaattgagaatgatgctactacaagacatttggtcgagatgctgtgggccatggatgagtcccgcgctgaaatcgtgtcagctgctcaagctcgtgaagaccagaaccgtggtaagatctgcaagctggaggacaagctaggttgatcgtctggagaaggaactggccgaattgaagggagaagcgtcaccacagaaggccagggtttgtcttaccgcaaggaagagagctctttttgttccccgctacctgctggcgcccaaggttcgtatggtgacaagagaagctatcccagttccaatggatcctccggtcgttaatttaagttatgatgagaaagaagattcagagcgcactcactcaaaggttgagaggggtgctactcaagatgatggggacgagccgaacgagccttcaatcaactctgatgccaggaagacctagacgtcttgttaagtcgttgctttagttcgttgtgttagtttgcttgtttaagtttggttgtgtgtgagggtcttgcatgtggtttacatcattggtgggatgtaaatgcatgcgtttgtttgctttcgagtgttaggaagtttgagttaagtggtgtgagagtcttcagttttatgtaataatgaaactaagtttatatcaataaaagtcaagttagtagaaattaattccatgtcctaagtaggtttttcttttggttctcttcttgtgctcttgcctatgccagatggtgaacacccgcagcaatggaaatgggcccaacaacaacaacaacaacaaccaacaacaacaacaacaacaatggagagattcccacgcttgcccaagtcctagctcaacaggcgtagctcatgaacatgatgatgcaacaactccagaaccaacagaatcaggggaacaatcatgctcctccccagaacaagtgagcagaaattcttcgtgtgaggcttgccacttttttcagcactaccaacaccgatgcgcctacaaccggctgactcgtcagtccgttaccctgcagggatagcggaggatgtgctaggtaaaatacgaagatttcttcatgcccgatgactttgtggtgttggatatggaaacgggaaaaaatacgccgctcatcttggggcgtccattccttagcaccgcaggagccaacattgacatgggaacggggagtatccgtttcctatcaacgggaaggaggaaaagtttgagtttcagccaaggactgaacaatgctccatggtcaaaataaagtatgggccaaacccgcagaatatccgagtggtcgaagtggagcctcccaagatggatagcttggtaaagttcatgtaaaatttcctggagaaggaaacaacaatgcccaggaaccgttattggaagacgccggtaaaatcaagtacatcggccaagaaggtggaacagtcggctcagagaaagccgtctttcacaccaaaaccaaataaggtgtggaaggaaaagccaaagacgcccactctatcacctccatagacgggtggaaaatccacgaactgaaatgaaaggaggtacggtcttgcacgtcggacctaaaatgacgcgaccttcgccaactggtaaattgatatgtatccgcatgtttattttcaacaatttaaattccttgcatcaatgcatgtttggtttttaaaattgcatttaggattttttttttgaattttgaggaaattcttcaaatgaattttttagagcaaaccaaaataaaatttttaacgaaaattcactgtgccatgaccacactgaccgttagaacccaatggccgaaagtggggccggttgggcccaccaagggttcggtcgaacccactggttcggtcgaaccggccaggcaacggttacctgccacttttggcaaggtaatggctagcgggtcccacatgtaatttctgaccgttgtgggtaccctataaaagccagccggccgagagagggaattccaccccacttcaacatattttcattccctctccaaagtttgctcttgagttcattcaagctttgatagtttccctcaaattcaaacacttagctgcatatatacaagttgctttggtgaaactaaccggcgggtgaaactcttgttattctaatccctgccgagttagtccgttctagctccattatgcagaataaggaggcaattgtctcgtctgttcgaggggtccggctcttcgtcaagtcatcatgacgagtctagcgctcgttcatctgctaatgtctcgatggaggatgccgaagctccgcggcgtctcctgaacgacactgacctcgacctagtcgatgatcaggaaagaaaagcctactacatgctgagtgaccgggagtatgctcacacgcgagaatactctccagagctatttggatagctatggatgctgagtgaccgggagtatgctcacacgcgagaagataggtatggatgttgattttcgtgctatttggaaagctgttggttggcagagatttgctgtggtagatgagcctggttctcatttgcttactttgcaatttctgtgcactctgaaagaaatagaagatggaattttctttcgctttttccataaacagtatacacttacatggaaaggattaagtatacttcttggttttcacgattcctataaaattgatctccagaaagtaatttctgggttcgagaaaaataggttttgtgaagatatttctggtgctccaatttgcaagaaacctaggacgaataatatccataatcctacacttagactcatgcacaaatggattgctatgactttgtttcctagaggtgatcttaaacccattagggaggatgaattgattatcatgtttgccatggtttgaaaaatcaaaattgctcttgtgaaatgtatgataagacaatggttagaaagtataagattttctgctcctgttgagtgcacttctctgattactcggatagcaaaagggctaggggtcgttagtgaccagattgcttttatctcagccgcttgtccgtgtattgacgaaaattatttagtgcaaggacatattctgaaacatggagtagatggatctttaatatactttttccttgattgtacaaatgaaattccgttgccaaatgtggggtatcatttgtacaactgtagtgaactaaccattcccctgcagaccatagaagaatctcgtgctggtagagcatacagggagacacgcaacatgggaaggaacaaacaagaaagttcatcatcctctacacccgtgcagatgtatgaggcaggttaggaaccaactggggatgcacccggatggacccagactccacaccatagcatcggggtctcaagctgggcaagtgccaatgaggaccgatggcatgcacctcatcacatacaatgggaggacaaccaaccccccagatcaagtggagtacctccatctacaagtgaatgtcgctcgagttcctctcgttgggacttgggtgaaatcactaggagaatggatacccttgatatgcagacaggagagatccagtacaacctcacggaacacatagcacagacgcaagaatggtaacaaactgctgatgctcagttcgccaacttcaccaacatgatgcagcaatagcatgatgaccttcaagcgtacttccgcttctaggggttcaatccttatcaaggaccttgagcgaaagacaagcttggggggagactccccccactgaggtaacttgtatcacattgcatatttccctttctaattgcatatttgctttccaattgcattttataaacttgaaaacaatataaaaatttgcaaaatagaaaattccaaaaagataggataggtttgagtcattctagttaagataagctagttctctttagtaaaatgatgaatagttgctctgtgttatatctcttatatatgggttcataggtaagtgctctctcaaaggttaaatataagtagccaacaattatctgcgagcctgaggaaaatgagctgcacttgctaatttgagtctaggttgttgcgagatatgatatagtaaataagagttgcgatgatcctgatcctagtttgacttgaattccggatgttttgtttttttcaaaatgataaaaatgagagttcctcatttgatataaattcctacagagccaaaactgtgctatcatgattgaaccatatagattttggttacttgccattccattgaactttgtcaaactcttgtgacttgtggatacttctcatgctctatgatcaagatcatatacccacatttatgcacatgctaaactcctatactaggagctagcattataccattccattccatttccatactaccataaaaataaattctccatgctttcatgtgctttctttttctaaaaagaaaaaaattcttttggaaaaaaaaatagaaggagggaacggaatggatatgaaaaaataaataaagttatgctctcacaagcatgagcatgatgttgaaaaaaaagtgtagccatgccctctcctaatcaataaaagaaggatttttaggagaagaaagtaagcacaaaggagaagcattttctttattttccttcataaaccatttccaccttatatcacacaatttgcacgatcttgatcttgagtatgtttagttatctgctttagtctaagtttttgacttagtaataaatgtgaatgcaagtatgccatgtttgatccctaccgggctccacatatcaaaccttagagtaggaatcaaaaaggcaaaattggtgaggaattcatattgatacacttagagaaactgagtgaatcatttgaggaacttggctttctttgcaaattcatttgaaaacttccggaatgaaagttgaataaagattgggtaattggtgctctaattgctgttatgtttttcaaccgcccaaggcaaggagaagcagtgtctcatgggaatcaggggtaagggtaagccaccgtgccaaagattatttaatctgagagatagtacatataccttggacctgtacctttgagatatacagcatagtagcaactcctgatcaacaaccaagtttttatttccttttgtccttcactcgggacgagcaaaagttcaagcttggggggttttgttgacgatcgttatcgatcagtttcgaccgtcaatattaccaaaatagaggaaaactagtgatgcttgcaatgcatatacatgttagaataataatattccactagtattaggtttactaaccttttgcagagaataaccataaagtggaggagaatcgacatcaactcagatgataaatcaatcggacgatgtcgacgatcagacttatgtatgaatgggccaagaactcagaattgacactaattgggccgaaattcacaagtctacgaagtgaagcaatggaggaggccgccaaccaaaacttgagcttgttgggccggcccctggttcggccgaacgaggggattcggctgaacctcccgtggcgccgatgaatgcagggttttgatggacggctgggattgatccccaatgacggttggagggtattaccgaccattccaaccgtcacaaccgtcattacctgcctataaaagaagttaccattctcacttcacacacacacctcaagcaagagctctctcccattctctcaagttagtttagtgttattatgctaatggaataggaataaagtagaaatcgggagtccggaagcctttggaagagtggggattcggccgaacctcccgtggcgccgatggatgcagggctttgatggacggctgggattgatccccaatgacggttggagggtattaccgaccattccaactgtcacaaccgtcattacttgcctataaaaggagttgccattctcacttcacacacacacctcaagcaagagctctctcatattctctcaagcctttggaagagttcgggtatggctctagtagctttccttttctcttttgtaagctttgtactattattagaatactcttctttatacatttatggtattgaaatactgtccgagtatattaatgccaactttacattatgttcatgttatactgaatatgctgctagcttttctgggagatgctttggtgcgggtataatgtttgcttatgcaattactctatgtcataacgatgatattagagtactatctgatagtttagacgtggcatctagattacgggatatctcattatttggggttatatgctgcggatgagaggtgggccgctgatattgatagctcaataagggtattcctccacgcgtgtatatgatcctaagttaattctctagggagggtactcctccatatttagccccggttgtatggtcatgacgggctgtcgtaaggaactcggtagtcaggggtggcttcgcgaagtaccaggagggtatcggatagagggtattagctagtatatcagatcactagaatgtatgtatactatttatattagaagtataggaatagattatctttctcttttctttccacctagcttatataattttgtatgagaatgagtagcttaagtgcttgtgtgtcacactacccttggattatctcaacccctgcttaggatatgattatcacaagtaatatataaattattagtcaagttctctctacaagatcatcctatgggataaaataaatacgatacccttggaatactctcggtgaaatgctacaatggtatatccgtgcgcttgcggatgaactctgtaaccataatatactaggagtatttttgcgccattgctgggaattatatttctagtaatgtcgttaagaaacaccaacaccggccagatgcagccgtctcccacgccctcggctagccgtccgaggccgtcatgcttccggtgaccgcagtcacggtcaccaacaccgcagctgctgctgtcaaacgcccaccatcttgccgttgccatcctcacctcgcacccgactccttccccgccgccgacgtcgccaccgcctccacagtcacggctgccgtcgccgctgccaccgacgctagtcaccgcctccgcagacctcttctgtgccatcgccctctgccaccaagcagccagcaaacgccctgacgccgccgccatgttctccgtccgccgtggtcagccgacgccgccgctcaccgctgtcaactgttgagaccaccacctgccagcacccctgcaccggtatcgaggncaccacacctccgtgttcagcgcctncgcgccgtcgtgcccatcgccgacagattcggtcacctccgcaccagtcatcgtcgggctctacgaccgcgagttcgggccgtcgtggcatcggcgctgccagaaacctccccgccagatccgcgcaggatctggcgggctggtccactgccgccagtgcctgcaaacctctgccgccatccccccaaataacgccgcccgaacacactaccctgccgcggactaactccccgccagctccggccggacagcgcggatctgggcggtttccgcctcccgacatgagaagttcccctgcccttgtgcggaaagcggagcgaagccccaccgctgccatctatgccatcgcgcggctttgccgacgcccgctcgggtgtcggcgaggtgtagtaggagggatggaggacgggagacgacggcctgggcgcctcttgtgccccccgagaggaggtgacgtgagagtcgtgactacactcagtcacctgaattactgcatatgcatcgtcacaattggtgaaaatggtaatggtaattcacggccaaccggcattcgtttttgactttctcctggccgagccatatggtcgggccttcatttttgactttctactggccgagccatatggaaatggtaaacgactgaataaaatggaaatggtaaaaaatatggaaattgaaatagaaatggttttgccgttataccaatcgtttccgtatttaccttgttcttctgaaaatcaccgtttcttataatatggtaattaccgcatctctaaaaatgtcgatattcataagacatatttctacttgacccacagtttagagattgattgactcttcaatcaaatccctaacttgagtgcatggctaaaatggagttaatttgtaatttatatagtataagcttgaatttatttatacatataacatacttatgtaaagttaaatatatgttttacagtttaatatatgtttccgtatttgttaccggtttctgatatgtatcaatatgtttctgtccatattgttccgattcaggttttccgatattgtttttgttcctcacattaccattttttatttttgaaatggtttaggttgttttccgattgtttccgaccgctttcatccctactgcacacactgatcaagacactacagctccccagcaactcgtacccctcagtgcatctccctgcatacaaattgaattgattttccatgctaattgccagacaattaaaccggctattctacataatatggccagctcaaatgaaaccaaatattgaccaaattatggcacaaacaaagtaagatctagctagtccaatcagcggttccatgtgagaagcgtgtgcactagcttgaagatcacaccaaaaacaaaatgcccccgtttcccacttgtacctctccttgtgtgtcacatctacattttgtttgccttttttctttcaaatccatttgactattaagtagtaattgttgtttttttcatagtactcattattttttcaacttcctttgaatgtagttctttaaaaagtaaatgtgacaatctagtggattaaaagtatattaagtattcggatagttacataaacattttcttgaagtacgtgattacacattgtcaggttacggataagacatacctccaatcctacaatttactaaatataccggattggcaaacctcatatccaacgatatttttccgtatgcaataaggaaatatacaagatattatggaaaatatcctcacgggctgatgattatcaaagtcctactcggagaggatagggactattctatatcgtgcagggttcgttgtctccgagttctacttgaagactaaggcaattcatggtataaaaggcacaccgccagaggggctcaggatcatcgaatcatagcgccaacacacctaccatagtttacaaagccgaagaactcgagccgaagccgccgagagatcttgtcaatcaatctcgacaaggatctcgtcggtatcgtcggattcatctgttccctttttactctgtggttttctatatcaatctcatataaactggattagggctattacctcacgaggggcctgaaccagtataatccttgtctcttgtctactttgatatcgtatcgtatagatcctcgtaccaacgtacctcaatacacattttatccggtctacaggtatcccccatcgacagtggtgcgccaggtaggggactttggtgctcaaggttctgccgacatgacttcaagccgctccgacaacttcatctacatcggccccaatgcaggagatccaacctcaattccgatgatgtggactcaagtcggatccatcatctttccggtctactctgtgataccgatctcgtctggcccaatctctgttaggaacgagaacgtcgcagctacgactttacggaaaaggcaaatttatgtcatcagtgcctccctccgactgtacggaaaaggcaaatttatgtaattggctaggagacatcgtaaaattgcgtcgttgctgatggacaccacaaaattcgtgtaatttgctataggacacccgagacaatattttttatttccgagaaaaaagaggagagagaaattttaaaaaaggcaaagttgccctcagccctatctaacacccctaacccatcggcaaagcaggccaggtgccgacttcgacgactactggcgagccccggggtagcagcttcggcagtggctggcgagcttggcagtggcctcgatgatggtcggcaagcccggcagcagcggcttcgatggcagtggtggtggcggaggcaatggcttcgacggtggccgatggcggcagcggcgggttagacggcggttggtgagtggctctagaaagcacgcagcggaggcagctttgatgatggttcgcgagcccgacggcagtggcttcgaggcggaggtcaaggcgaaggccacagcgggtggtgacaaacggcttcgatgatggtcaacgaggccggcggctgcagttttgatggcagcggtgacggaggcagtggcgggcagcgctgggaagcaggcggggattagatagggccaagggcaattttgtctttttgaaatttctctctcccctttttgataagaaatgataaaaaattgtctcgggtgttctacaacaaattacataaattttatggcgtccatcagcagtgacgtgattttatagtgtcttctagccaattacataatttttgggtgtcctagggacaattttgcctacggaaaaacagacgtcgactacgacaacatctagggaacaacctcaagcggccaacctctggtgcaagaaccttgtgccttgaaggcgtgttccattggcactatgctgtagagacgtgggatgcatctctttttgggcaaatatgcaagtaccaactggaccggagcagcaaacagctagaaaagaagagggcatctcctctttcttgtgtgcgagtaggtgttgcggaagcaagaagctgtgcatagctaagagtggatgaaggctaaccaaggcggcacatgagctcaagagaggggctgggtgcagctaagcagcatgatcacaactggcgaggtgtatagccagaaaagactcgcacataatgcggtctttgatctagatgtagcccgtcagccctcttgctctcttcctcttctctcatctttttctgcttttcttccgtctctcttttcttctctttttttaagcaaggtgacaccaacttaaaaccttgatggaactcatcatgaaaatcttgtcgatcgccctcccccacacttggacttttatgtcatgagacgtcaaaaaccaagtgtctgagactgggatcttcataaagtatgttccaacatcaaggatctccaaaatgaatagttgatgtagctcccatgttcttaggcatcgtatgtccctcgttcttaatcttaacctgaaatggttactgaccaagaatacctgaagatgcatactattttagaactggttcttgcttttattggaaggaaaacgtaccaagataatccgggatatctcccgtagtgctttgtttatggtcacaagctcgaccatggagacatctagctgcaagattagtgccacaaaaaaaatacgagatttgcaatatttctgataaacaaaagcatccacaaccacacttctaatcatgttagaaatgaggaccataaggtggttgtggtcctcgtacaaagaagcggcactaatcggacaagactttggagattccttatgtgagtatcaatcctgaggaactttgaaagaaaaactttcatactcatttgtggagttctcatcctctagagttgatgtctcgaacttgtccttggcttgaaggttctccttgtcaaaagatgtgtcatgcaagatcagggttatttcttgaaaattgttgagaacaacatcttgagggctagagggacaagattttggcttgataggaggttgtgatggcggttctaggattggaagttcaaaagtttcaccggaatcaacttctttttcaatgaaatctgagacatcattttcaagaaatgattcgggggactcagatggcagaacagtcgtcacctcctttgcgtacttatctttaggcagaaagtcagtcaaggcaaatcttgactgcgagaatggcagtgagaattcattcccgcctaaagagaaattgaacctgcctactcgaggggtgttgatgagatgtttctcaatagggtgcccgattagaatattgaaatcctggacttcaaaaacatggaaatccaggataacctcgttgctatcatgaatgactggcatatcttggacaaccccaaatccttcaataatgctcccattgggatgcttgaagaatttgtcagttggtgtaattgtcttatcacttaggtatgcaaacgcaaaggattctgagacaatattgacaccgactattgggctgtagagaatcacaacattattcccctctaagtgacaaggaatgggccgaggagtggaatttatcggaattacttcagaagaaagctcaacctcctttagccattcgtcactcataatagaggtcaactctcgaactgtttccttaagaaactggaattctatcgagtcaggaggtagtgagggaacatatggttttctcttgctaaagtagttcaaggtgtttccgtaatcttcatcaagatcatccctcaacaagagagcacaacccggagtttgaatttcttcggtctcaatgggtcatggctcgggaagaggttctcgggtcgaatcaggagaagtagagacttcaactgatgcctcggggaggggctcattatattcgttcatgaaggaggtgttttttagaattcaatctagaattaccttcctttcaatcggagttttgtgcatgaatgatcctacagcagtgatgtctagatagattgcagactccttttctaaacccgaataaaaatgttgcagcagcacatgatcgggtatagatagggatggcattttcacccgtggggtcaggtccaggggacccgccctataggggtgggggtggggccatttttcaatccgcggggcttcatggccgggggagggcatccacccgtgggtgacccacggggccctggggtggtatgctacatcacaatacacagcccattctaggccgaataagtccgacttgctgaaatagtggcatataaaaggccaaaacctaaccctatcctcactttttcctttcccctcactccatcctcacagctagctgccactccaccatctaggcggcgtcgcaacgaggaccccgccgcaccgcgcactgcctccacacaccagcaggctcgacgcccgcgcatggccctccccatccggtctcatgtcgtcgtcgcatcagccacctgagcccggcgaccaggtaaaccgatgtggcgtgcgggtgggcgatggctagggttcacgcgtgcaagcgccaggcagcgagcagcgcaacgggctgctaggctgtcacaccctaaaaatcctaaatatataaattgttgtttaattggaattattagaatttattttaaaaacctaaaagagaagatctaattttaattaataaattccaatataaaatggggccagataaaatttcattaaatactttgcttaattctataattcctagatttttctgggatttatttgagctaaggaagtatttttaataaatggaattgcatttcatgaataatttaaattgaaaaaggtttttaaaatcctcttttggctttgggccgaaagtcctctctctctctctccctcggcccagtcggcccagtccggcagcagccgcccgcgcgcgtgtccgcccgctgacaggtggggcccacctgtcaggcctgtcgtcttcctccggccgcccgccgcccgaaccctagcgccgcgccgccgtcgtctccttccaaattcggccacctctttccgtttccggtgaaatcaatagaggggaaatgatcttcgggatcccctctatcttttctcttttggaatcgtcggctaaaatcgtttggaaatccgtggattcgagttcgattcggatcgatctctctcctccgaaccctagactttccttcgccgtcgccggtcgccgtgggccttcgccgccgccttccaacccctatataaggacccccaagcccgccgctacccgtcgccacccttgctttcgcctctcgccgtcggtagcgccctagccctgtgagacctcgcgtcaccgtcgtcgccgccagccgtgcgccgccgtcgctccagtcgtcgccgtcgctcggggaggtcgccatcgtggtcgccgtcgcgtcgccgtcctcgtccgcccctccgccgtcgctgtcgatcgccggaacaccgccgtcgtcgtcaagccgaaggtcgccgccgcttcttcctcgacgccgtcgccgtccgttgatcttccgccgttgctttggtcaccggtgagttcgccgtgccgtccgctacccgtgggtgctctccgttcgcgccgccgcgccgtcgttcgccggcgagtattgtcacatcctgatttttgtttcaggatttataaatcatttaataaattattattagaatttatattaaatgatctttaacttacaagtgaagttaaatgtgggaaataaaatttcctaaatataaagcatggatggatttaatttttattaaattctccatgattaagtcaactctctgaaatattctcggatttttcagagctcaattcctaaatgatacaaagaacagttcagtaattatttgatcattaatgatctaattatattttttaagagcttttcttgtttaaaaatccttaaattacaaattgttgtttaaaaggaattattagaaatgatcttaaaagcctaaaagagaagatctaattttaatttgttaaatctcaatataaaattgggctagataaaatttttttaaatactttgcttaattctataattcctagatttttctgggattaatttgagctaaggaaataattttaataaatggaattgcatttcatgaataatttaaattgaaaaaggtttttaaaagtctcttttggctttgggccgaaagccggcccaaaacctctctctttctctctccctccccggcccagtcggcccaggccgccgccgctctcctctctctctcgctgtcgctgacaggtggggcccgcctgtcggacccgtcttcctccttcggccgccgccgcccgaaaccctagcgccgcgccgccgccgtctccttcccaaattcggccgcgtctttcccgatccggtgaaatcttttgaggggaaacaatcttcgggatctcctcttccttttctcttatagaaactccggtcaatttcctttggaaataggcggattcgagtttgattcggattcgtttttccccgacctttccttctcgtcgccggcagccgtgggccttcgccgctgcctccttgcccctatataaggatctccaagtccgccgctacccgccgccaccctcgccttcgtccctcgtcgtcggaagagccctagcaccgtgagacctcgcgccgccgtcgtcgccgtcgctccagccgtgcgccgccgtcgtttcggtcgtcgtcgttgctcggggaggccgccatcgtggtcgccaagtcgtcgccgtcctcgtccgccgcttcaccgccgccgaagaccgccggagcaccgtcgccgccgtcgacccgatctccgccgccgcttcttcctcgtcgccgacgccgtccgttgcttttccaccgttgttttggtcaccggtgagttcgccgcgtcgccctctacccgttggtgtcctccgtttgcgtcgccgcgccgtcgttcgccggcgagcatgcgttgccgagccgccgccggtgctgacgtcatcgctgacgtctgtcacatcctgattttttcgtttcaggatttataaataatttaataaattaataatagaatttatgttaaatgttctttaatttacaagtgaagtaaaatgtgggaaataaaatttcctaaatataaagcatggatggatttaattttttattaaattctccatggttaattatactctctgaaattttctcggatttttcagagctcaattcctaaatgatacaaagaacagttcagtaattatttgatcattaatgatctaattatatttgttaagagcttttcttgtttaaaaatccttaaattataaattgttgtttaaaaggaattattagaaatgattttaaaagcctagaagagaagatctaattttaatttgctaaatctcaatataaatttgggctagataaaatttcattaaatactttgcttaattctataattcctagatttttctgggatttatttgagctaaggaagtatttttaataaatggaattgcatttcatgaataatttaaattgaaaaaggttttaaaagtcttcttttggctttgggccgaaagccggcccaacacctctcttctctctctccccggcccaagttggcccagtccgccgagccgccgctctcctctctctctcagccgctgacaggtgggccccacttgtcggtttcgtcttcctcctccggccgccgccgcccgaaaccctagccgagcagctccgccgccgctttccaaaattcggtcgatcctttccttctccggccgaattgatagaggggaaataatctcctcgatctcctcttccttttctcttatagaaactccggtcaatttcctttggaaataggcggattcgagtttgattcggattcgtttttccccgaagtttccttctcgccgccggccgccgtgggccttcgccgccgcctccttgcacctataaaaggacccccgagctctcctctacccgccgcctccctcgccttcgtctctagtcgtctgtagcgccctagcgccgtgccgcctcgcgccgccgtcgtcgccgtcgctccagccgtgcgccgccgtcgctccagtcggtcgccgtcgccaccatcgggttcgcaaggtcgtcgccgtccccgtccaccgcttcgccgccgccgaagaccgccggagcgccatcaccatcgtcgacccgatctccgccgccgcttcttcctcgtcgccggcgtcgtccattgatcttccgccgctcctttggtcaccggtgagttcgccgtgccgtccgctacccgttggtgccctccgttcgtgccgaagtgccgccgttcgccggcgagcatgcgagcttgcgcctcccgagccgccgccggtggtgacgtcatcgctgacgtcatcgtcgccctctcccgtgagccggtcgtggaccgatcgatctcggccgttcgtcccgtgaaccgctgccgtgcacccggtccaccgcaaaccctagccgctgacacaataatccttcttttccttttcaaaaataattcattattgcgtcataattcaattaaaatcaatataagtgttttaatccgatttaatctttaaaaattcataactaattcatttgaactcagtttaatgtggttcaagttgcaaaagttgtgtaaaataaagatctacatattaaaattgtccataaattgaattaaatttatttaattctttttaaatgggctttaattagatttaatcttgtaaaattcataataaattcatttgaagtcagaatgaggccgttcaagtctcataattcatctaaaaaaatgatctacatgtttgtttactttttatgtattgtttatttggtttttattagtctttttcctcgttttgcgtgttagcttgtcgtttccgtcgttgcgaaggttcgcgagtgcgccggaagtattcaagaagattaattgaagaccgattattgcaaggcaagtcacacagatcctaaacacaatcctttgagcatgttgatcctatatttaaattctctatttatttcaaccgtgcatttattttcgaatgtcactgggtggtgtgaatctattcctttgttatggcctgtttgctttgattactttaatccttgataccttgggtgattataatttgactagttgagctttatatattggttcagctagatattagatgtgattgcttagccatgcttagaaacattagcacactattgggataacttatgattcattattatttaatgatggtttaatgatagttcacgatggttaatcgtgattgattaattaattacttgccaactaaaacttgataatggtgggttgtgagcacatggttttgagagtcctgctcatgacaattaaggaccggttcgcgagctactgttgtgaaacattaaccgtgccaaccacaagccagcgtgggcaacggctttaccttttgtataacatgattcattgcggagcaccagactgagaagtggcggagataagcccacgggggtcgctggggagtccatgccttgtttataagggggtgattatgatccaggaatggtgcactttggtgagttgtgttgtgcaaagggtattgtcacagcctctattcgggtactttccagtatcgcgacgcatggtagacatgatgttgaggctgtgtcttgtgggtacagtggtacacctctggccagagtaaaactattcgaatagccgtgcccgcggttatgggcgagttgagcaatgtttttcgtgattagtctcacacctctcacaataattatggatgttatacctggtaataatttgcttagctcctggtttggagattagatctgtacagccgggtatggttgcttcagaatggttgggcctgagcagcatgggtgtgctgttcagtgttgattaaaatttctgattaattactccactgttttacttctcttaaatgttttgctaaaagctgcttttgcaaatgagcctatattatgccaacctttggtatccttgtgcacttgcatatttgctgtgtggcttgctgagtatgtcatatgctcaccttgcaataatcaatcaacctcagttgaagaaaaaggattcagaagaagaagacgtttagcttataccccagttgagctgcctgtgggagtggagccggagcttcgctagattttattttccgctgtaattttcttcctggtgaggactaagtgcctcataagtaagtatttatcgttttagttaatttgataaatctgtatattaaattgtcagtttgtgtacctcggctgattcctggacgaggattttatgcacaaataagttcggaaattactagtgaatttccaagcgtgacaacgtcatcgttgccattccccgtgagccggtcgtggaccgattgatctcggccgtccgttttggataggatcgatctcggccgtccgttcccgtgaaccgttgccgtgcgcccggtccaccgcaaaccctagccgctgacgcaataatcctccttttccttttcaaaaataattcattattgcgtcataattcaattaaaatccacataagtgttttaatccgatttaatctttaaaaattcataactaattcatcttaactcagtttaatgtggttcaagttgcaaaagttgtataaaataaagatctacatattaaaattgtccataaattgaattaaatttatttaattctttttaaatgggctttaattagatttaatcttgtaaaattcataataaattcatttgaagtcagaatgaggccgttcaagtctcataattcatctaaaattatgatctacatgtttgtttactttttatgtattgtttatttggtttttattagtctttttcttcgttttgcgtgttagcttgtcgtttccgtcgttgcgaaggttcgcgagtgcgccggaagtattcaagaagattaattgaagaccgattattgcaaggcaagtcacacagatcccaaacacaatcctttgagcatgttgatcctatatttaaattctctatttatttcaactatgcatttattttcgaatgtcaccgggtggtgtgaacttattcctttgttatggccaatttgcattgattactttattccttgataccttgggttattataacttgactagttgagctttacatattggttcagctagatattagttatgattgcttagccatgcttagaaacattagcacactattgggataacttatgactcattattatttaatgatggcttaatgatagttcacgatggttaatcgtgattggttaattaattacttgccaactaaaacttgataatggtgggttgtgagcacatggttttaagagtcgtgctcatgacaattaaggaccggttcgcgagctactattgtgaaacattaatcgtgccaaccacaagccagcgtgggcaacggctttacctttcgtatagcatggttcattgcagagcaccagactgagaagtggcggagataagcccacgggggtcgctggggagtccatgccttgtttataagggggtgactatgatccgggaacggtgcgctgtggtgggttgtgttatgcgaggggtaatgtcacagctcctttccgaggtaccgtggtggtactgaggcacatggtgacatgttgtggggctgtgtcttgtgggtacagtggtacacctctggccagagtaaaactattcgaatagccgtgcccgcggttatgggcgggttgagcaatgtttttcgtgattagtctcacacctctcacaataattatggatgttatacctggtaataatttgcttagctcctggtttggagttagatctgtacagccgggtatggttgttcaggaaggttgggcctgtgcagcatgggtgtgctgttcagtgttgattaaaatttctgattaattactctactgttttactactcttaactctttgctaaatgctgctttcgcaaatgagactatattatgccatcctttggtatccttgtgcacttgcatatttgctgtgtggcttactgagtatgtcatatgctcaccttgcaataatcaatcaacctcagttgaagaaaacggatccagaaggagaagacgtttggcttataccccagttgagctgcctgtgggagtggagccggagcttcgctagattttatttttcgctgcagttttcttcatggtgaggactaagtgcctcttaagtaagtatttatcgttttagttaatttgatgaatctgtatattaaattgtcagtttgtgtacctcggctgattcctggacgaggattttatgcacaaataagtttggaaattacgagtgaatttccgggcgtgacaagtatgcacgcccgagccgccgccggtggtgacgtcaccgctgacgtcatcgtcgtcgttccccgtggcctggtcgtggaccgttggatcttggccgtccgttttggataggatcgatctcggccgttcgtttccgtgagccaccgccgtgcacccggtccaccgcaaaccctagccgctgacgcaataaacccctttttccttttcaaaaataattcattattgcgtcataattcaattaaaatccatataagtgttttaatccgatttaatctttaaaaattcataactaattcatcttagctcggatttagttggttcaagtctctaaatttttctcaaattgagatctacatgttaaaaatatccacatgtactgttcatgcttgtttatgtgctgttttggtattttgctcttttctgtttagattccgacgtttccggagagtccgttttcgcaggagaagaatttgaagagttccaaggccagtaaggcaagtcacccagatcctaaacacaatcctttgagcatgttgatcctatatttatattctctatttatttcaactgtgcatttatttttggatgtcactgggtggtgtgaatctattcctttgttatggcctgtttgcattgattactttattccttgataccttgggttattataacttgactagttgggctatatatattggttcagctagatattagatatgattgcttagccatgcttagaaacattagcacactcttgggataacttatgactcactattatttaatgatggcttaatgatagttcacgatggtcaatcatgattggttaattaattacttgccaactaaaacttgataatggtgggttgtgagcacatggttttgagagtcgtgctcatgacaattaaggaccggttcacgagtttcggttgtgaaacattaaccgtgccaaccacaagccagcgtgggcaacggctttaccttttgtatagcatggttcattgcggagcaccagactgagaagtggcggagataagcccacgggggtcgctagggagtccatgccttatttataagggggtgattatgatccaggaaatgtgcgctgtggtggattgtgttgtgcaaggggtactgtcacagctcctttccgaggtaccgtggtggtattgaggcacatggtgacatgttgtggggctgtgtcttgtgggtacagtggtacacctctggccagagtaaaactattcgaatagccgtgcccgcggttatgggcgggtctaacaatgtctttcgtgattagtttcacacttctcaccataataaaagatgctataactggtaataatttgtttagctcctggtttggaatggtatattcctggtttggagatagatctgtacagccgggtatggttgttcaggatggttgggcctgagcagcatgggtgtgctgtttagtgttgattaaaattgatgattaattactctactgttttataattctcaaatgtttgctaaatgctgcttttgcaaatgagccctatattatgccattctttggtatccttgtgcacttgcatatttgctgcgtggcttgctgagtatgtcatatactcaccttgcaatcattcatcagaggaagagttctacagtgatgctgatggtgtggaggattaggtgtagccctggtcaaactgcctatggagtggagccgtctgcgtcgtttatcttattttttcgctgcttagatctttattgattgagaggaactatctacctctgtaatgacgttttattcgcttattaattagagtaataattgtactctattatcaatttgttattgtgtgcctcggctgattcctggacgagggttcacacacatgtaagcgtttggaattttggatagaaattccgggcgtgacataggcgagggcaagcaggcacataggcgagcagcaaagcaggtgacggccgacgggcaaacaaaaactcaggaggtgtcgatctaaatttctgtaatgtgttctttcattgtttggtaattatatatcccgatgacttagaacatgattctggtgctttctcagtttgatgatctttggtttgaacgcagaacaccatttctttggatagaatgtcaaagttataaattatttttgatgaaccactgattgttctgctatttttttttttgctaattgaatggtgcggacactcaatcggggccccggtcgggctagggctgcgggctgttttagccccgcaactaacctcgggggcggggggagaagttgggagtcgggggcgggggcgttccagcccaacccgccctcgacccgccctgttgccaatcctaggtatagataaggttgggccaaattgcactagattaggatgtgtttggatggagggattggctgggatagggtatggccacccaaattttggaggtgtttggatggtgggcggtactgggatatggccaccccctagggaatattccctccagatgccggctctgtgcatccggccaattcggccggacagggcggcccaggaccgcgcgcgactcatgcaagtgaagtggtcgcgtgccctcacctcctcccatccttttctctcttttttctcctctgttctcaccggttcacagtggcaaaccctagctctcctccctcattcagcggtgcaccaggcggggtggttcggcggagcgggtggccgcgccggggacgagcggtaggcggggcgggcggcaggtgtcggcggcaccaagtagtgatacgggttatcggaaaaaaggcaagacaaaatctgtctcgcagcttttccagtcaccattcacacatccaatggtagatgtgtatcaatggttcgctctctcgtgaagagagaacggaaacaatttcccctgaacagtattttgtctcatgccacgaatcttaaggcacgaacatagctgttcgaattcccgcaaataatggtaaggattttctcggtcaagaccagaaaaaggattttccttaatcatacgtattaattcagggcagatctcatagccagttgtataaataggctccgatgaaggaggtggctcgtaagattcgcctcgtggagcagatagctgaaaaattgatgatggctccttcggtcaagaaggttttactggaattcttctctagggtagcaggggtgatggtagaagatgaacaaggttcggagatagacagcaaccgttccccgacaacggcggcagaaatgcttgttggtatttattaacctcacagataaaatccgcaagcgcacagaaaataccgatgtagcacttcactgggagtattctcaggtatcgatttccatagggagcgtgtgtgtcaactccagatcaggttgatccaaggacacgaagctaatgataggcaaaggatagagaggaacagtgtctacggaaagcttaactttaatcctaacgcgatacttcgggcactggccagctcgctgctcctagatatcgctctactatgcacccgggcaaggaggacttcagtgatctcgagggttgtcaccacctctacacccacctcacacctactgtgggaagcggagcaaacaccggaaatcaactacctagacaccgcgtataagcagttaataacttactttaatgttagctataaactaaagcactcactatattttactggattatagtgaacgatgatcatgtccgctgattaggaactaaccaagacataattttcaccaagcaaaacaaaattactcaaaagatatttctattataatcagagtaattaacatggcaaaaaataagaagaggattaccgataactccagaactcctccgacttcttctactctactctccctaatcaagtataaaataaagttcaatagagcctcttataattcagcgcaagcttgcagtgtgtgtgtgtgaagtgagtgaggtgaggtccttaaatagggcaggtataacggttaggaaaacgtgacatgtcctttttgcccttcaaccgccattaggagctcatctggaccatacacgccaaaccctagcctgaacggctgagattgtggttcggccgaaccctggccaggcccaacaggcctgcactttggcctgttgcctctcctcctcctcttctatccatttttgtgtgtggaaggcccatttggtcgtattttaatgtagttcttggcccacttgtgatatggacaggaattctccttcacttaagtctatatttcatccaacttcgacggtttatcacctgcattcaaatgtacacaacacttgtggaatatgtcataattaaaccctatcactatgttggatgttttatttccttgatttatgcaggtattttgttaggagctaccataggcagcccccgattacgcaatgcgtatgtgtggacgacgggaggacgaggtcaatagcttcgcctccccggcgccgtgctgtgagatggaacagagagggagagattagagagaacagaggaaggagacagtagatgagattaaatttcttgcttggatttaaccataacaatccacggcttaagtagccttacatgctagcaaactttagctaacaaacttgctaattaaaagggataacagaaacaaattatcaagctgatcctaatccaccgaattcagtggcacgagatactattcctcgtccggcacggtgttcgtccgtccgcccgcaccgctgaaagggaattccccacataacatattggcggcataaaattggcatttagcaactgccaacagttaagttgagggacctccggtgaacttagtccttttaattattgggctgtgtcttctactttctacaaagcccacagatattttttcgggcagattggaaaaagttcactttgactccttcaaatagaggttcgttttgacccaataagtattgaaaccagtgcagaatgactccctcggtgattttgtgggtgattttcgctggcgtggctagttgatttggtctaacctgctgagtcatcatgtaaggcccacatgtcagtgtcacatatgtttccttctctcgttcctttttctctcctccctccactttctctctcaaccttttctctatgctccatgcatctccctcggtgatggcgagaactcttcctctctcgataatcatggaagctgcagccaagacggcgtccaagaaggaaggaagtgggcgacgagcagatccaagcagcgtggtggtccttccatactcccgcctcccgcgccacgccctcggtcgttgtgggcgtgctcccttgaggacgcgtcgccactgctgacgcaaccaacggagccgatgctggcgctgccgcctccgtctcaccttcttataagtcccaacgctaggactcgtgtttgtgctagatctgctggccgaagcaggcgagatagagaaactgctggggaaactgaagcctgctcgagtggatcctggtgacctccagaccttcctcggatcctctgcagcgacggaggagacaatggagttgcgcatgcgagcttcctcctctgccattggtgccagttcatcaaggacgcacgccgcaggcatgaagtagtgggtagcgtagatcgagtataggtacgtatccactggatgggtggtgatcagttcattcctatttcatagatcttgttggtaggctagtcagattttttttatctaaatctctctttttcgaactgcatgagtgcttaaagttttgaatttttcatggccaagttcatgtgtattgtgttgttttagttctaagtttcttgaaccatggttcttctctcctgtgttgtttttgtgtttttcagagccttgattacatcttttgatagcaaagttcaatgtagttgtgcagacattcgatagttgccgccaccgacagccgtatggtagacatcaacgagctcgacgagtgggcagctggcggcggctcaaccacttcggcacttgtgcccatcatccccaccgtgaagaggttgttctcgacggctcgctgaagagaaggtggggaagttcctgacaaactgggcccactctttttttttaattcatatgctgactgggctaacacgtatacaccacgtcaaccaaaaccgctatcaaaatagctgagagagtcgttttgcacggttttcatagttataggggtcgatatttttggttttacgtttaagggatacgaattagatctgacgtatatttgagggagtcaaattgaatttttttccaggtagattaggagcataggacttcattcaaatgtttcttgttttttttgggcttcactgctggagaaaccatttattctcccggttggtaacccctttagtcccggtttttcaaccgggactatgaatccgggactaaagatgcccatatttagtttcggttgaaataaccggggctaaagatccatttttgtcccggttggtaacaccaatcgggactaaatataccttatctttagtcccggttggggactaaagagagggtagcgacagttccatttggtctctttttttttcattgttttttagctggagtttaatccctgtattttctcccaaatcaagtgggatacatatcccaaatcaaacctcaaatcaaagtaacatcccaaaacattcccattacaaatcttaagttacttatacacacaaatcaaatatatcataaatcttaaaaaaattacacacaaaccaaatacatcacagattatacatctcaggtcatgtcacgtcccaaaacgactctaaaatacatcctctaaattatgcctagaataattaaaatccgtgtgaaagcctccaacaattaaaatgtgcaaagttaaaagtcaaataaggcttggaggatttttgtatatttcctaaaagcctaaaatgcgtaaataaattttagtggaattttcagagcacaaataataattattaagaaataaacaaagttaaaatggttttataaaaagaaaagctctaaaaagtcccctttccctccctctccctcttgggccggctcggcccatctacctacccctccctctcctctccccgcggcccatccggccttcccccgcgcgcgcgccgctgacgggcgggcccgcccgccaccctcgctgacgggtggggcccacccgtcatccccttcctcccgccgctcccgccgcctcgcccgcgccctagcggcgccgccgccgcgaatcccgccgcctcctgcgtccccgcgtgcaatcagtagggggaattattccccgtgattccctctccctttccccccacttttccctctctctctcgcgttcaaacgggcgaatttgcccccgcaaatctcgccggcgccattgatggcggccggacctcccgcgcctattccttccccgccggccggcctctccccctttcaaccatatataaaccctccccgcgcctcctccgaccgtttccgcctttcgccgcccttcctcctcgacggaatcgagctcgcgccgtcgctctctctctccgccgtcgccgtcgagctccggtccgccgtcgtcgtcaccccggaccatctcccaccccggcgtcgcctccttcggcttcgccgcatcctcggcgaccttgtccacccctccgtttcgctcgccgaccgccggaacgcccccgtccccgtcgacctgagccgcgccgccgccttcgtccgctccggctgccattccgtcgtcgccgtcgacctagggtgagccgtgaaccgccgcttcttttcccccttcccttcccctctctcggccgccgctccgccgtgcctatggccgccgccggcgaccataggggcgcgggtgcgccgcctccccccggctgtgccggcgtggccgccttcgggcgcaccgtgcggctgccgcgtggggcccggccgtcagccgcccgcgccctcgggtgcggctgacgcgtgggacccacggcgccggccggtgtgagcccgggtgcgcccggtccatcgtggaccgtgaggctgccgcgtgggccccactcccgtggacccggtccgcgcgcccctcccctcggctgacgcaataaaccttttttttaattaaaatttaaatgaagaaattcgcaaatattcatttaaagagcatataaacttcaaatggccaactcggaattggaccgttcaagtctctaatttttccttaagaagtcaagaacccatttttgtgctttgtttcagcttgtatatggagtttattagagtaaaagccttttcttttccgttggtcgtgtagacgctgcagcttcagaagatccgctcttcgtggaagttgaagccgacgtttgggaaagcgagcaaggcaagtcacatcatccttgaacatattgaatcccagtttataaaattattttgatttaaattattgcattatcgctttatttaaattcccgcgttatcactgttttatctagccatgcctatttacttttgttatgaccttattattgttattgttattatttccttgttcaccctagaataaacaaaaccccaactagtggacactctactcatggtaccactagtatgattttaggtagatgcttcgctggttaattaggcaacattatgtggttttacaactctagactttgggatattcatatcacctggacactatggaatggtttgattattgtggaattggattcacacctccccctctattcaaaaccctcaaaatggttttaggctgggctcggggtgcatggttttgatagtagcacctcggccatacaaggaccggtcttcgggcctctgttgcaaagcactaccgtacttccacatgtctagtgggtaaggcttagtttgtggctcagtctggttataaacaaaagtacacggatggagatggacgaagtcgggggtcgatggacatctctaggacaaatgaaggctacacgagctgcggcccggtagtcgagatgtcatggcacagggccggtgtcctgctgctcggggctcagtcctgactacctgtcacatcctgatttttgtttcaggatttataaattatttaataaattattaatagaatttatgttaaatgatctttaattttcaagtgaagttaaatgtgggaaataaaatttcctaaatataaagcatggatggatttaattttttattaaattctccatgattaattatactctctgaaattttctcggaattttcggagctcaattcctaatgttaataatacaaagagcatttcagtaattacccacatattaaattaatcattaaatggtctgattataattttgttaagtactttgagtgttcaagtattttcaagatttttcttggaattatttgagcataggaagtatttttaacaattcaaagatcatttcagtgattaatttaattggaaaagtatttaaaatccccttctccttttcgggccgaaataggaaaagttcagcttcagtcctcggcccattctcccattttttcggctggccttatccctcctccaaagtctgctttgtgtccctctttcaatcgggccaagaagtagaagcccagccgaaagtctagttggcctccctgcgctactgttcatcttccagctctggacagagcccgagccagccgagcctgtgcacagtgccgccttcttccaccaaatccggcctcctcgttgctcctctttccaaattagttgcgggaatggaatcctctcaatctcctcttccttttccccaagaaatccccaaaattttatatggaaatcctttccaatttcgcggttcaacctttcctttttccggcgaaccctacctaatccgtcgccgattccatccgttcccgagtcgttctctccctcttctggctatataaaggaccccctagtcctcctctttcgtttgccccctctcccgtggtctcccgtgcctcgtagcgccgccaccacgtgctccaccccgccgtcgtcgccggcgccgctccagccgccgtgcgccgtcgccccggccgtcgccggtcagtgccgtcgcctccctcagcttcgcaagggtgagagctaccccggccacccgttcttttgcgccgaaccccgccggaagtcgccgtcaccgtgaaggccgaaccgttgccatgttttgatctccggcgaagctttgccgtcgactccgtggtcgccggacctcgccgtatccactgtcggcatcgcagcagtgaggagaagcccggcagccatctccccgaagccaaaatccaccggagctccatcgtcgccgtcaaccctgtggagattatggatatcccatatctacacggcgatggtatttggactgggtacaggatacctaatgtagatagaatatcttatctgtatctcgggtttgtttcttaacttgtgtatcaaggaaacaccctgagacttagtcggttacgactatatttcatctgtatttgcatattccgttagggatatagattatcttttgtaacacggactcctccccatatataaggggggtccgggtgcctctaggggcagatgttgattttccctaaatcatacaatcaataatacactcggcggattcatccccggacaggagtagggtattacttcttttataagaaggcctgaacctgtataaatcctttgtctccaaacccatacactttcctagcttgatagccacccccttttattattgccgaaatctagtttcgacagttggcgcgccaggtaggggtagcgtcaagcttttcgccgatcagtgcaatgggttccgtctccggcatcgacgacctcgtcttcccacccgggcagacgtttcggttcggcagcctcgacttcgtcaccaacaacttcggcaagatctctctccttgactcggaatcaaaccagtcgggagagaaccggctttcagtcccgtttggattcccgaacgcggctgaaagctacttcaaaaccatctcaaccgagtcggcttcaaaccactcggccgagatcgcatcttctccaacgacaccagatcaagatgatggggcttacccaccagtcctgatgaagctccccgacgatttggtggccgtctccatcgcgacagcgtcttcttcccgtaggcctaggcggaagtcggcttcaacactgatttcgcctagcttcagggaagttggcgtcatcctccaaccactcggcacggtttcgacggatcagctagatggcgactacagctctcccaccgtcgactcgcgccccaccaacatcgtggagtacgacgagtttagctctcgctaccacgatccggatctcgacgacttcgacggaagcctagatgacaactacacccctctctactttggcgtcttcatggccaataacgagacggaggagcaacgccaagcccgggagaccgaagcgcgtcgcgagactgagcgccgccgactggaagaggagcatcaagcacaagaacaagaacgattacggcgtgagcagcaggagcgtgagcggaccgcgaaggaggctgaagatcgacggcagcgagctttggaagcagggcgccgggcgcgtgatctcatcggccagcaagatgttgaagggacgccggttttccgcacccctcaacagaatgcggttgccgcgatcacccttctcgacaccctcctcaaccaaaacgagctcaatcaatccgaccacgtcgtcaacatcttgaaccagacgaagaccatgattgcggcttcagtcccagttaactccgaaagcgtccacacgccgactggtagccgagtccctcacttccgatctcatgactaccgtcatccaagcctcagcatcaccggcgcaggatctaatcgcaggagcaggggtcacgacgagcggtccattcactcacctcccgaccaatatagggagcgccgagtggaacggcctcgctcaccacctcgtcgccgccccgtcgatcttcgcgacacaatcatacagcgccgagcagctcgaggccatcatcattcgccgaaccgccacgacgacgaccttgacggagtagcagccttcaccgacgatctgcgtcgagtggattggccagccggcttcaagccgactggaatagagaagtacgacggtaccactaatccagaatcgtagcttaccgtctacggtcttgcaatccgcgcagcaggaggagacaacaaggccatggcgaactatttaccagtggctttagcagattccgcccgatcttggctccatggattgccccgtggtacaattggatcttgggctgaattaagcgaccacttcatcgccaacttccaaggcaccttcgagcgtcccggcacacaatacgacctctacaacgtcattcagaagtccggagaatcccttcgagattacatccggcgattttctgaacaacgtaacaagatctccgacatcaccgatgacgtcatcatcgccgcattcaccaaagggattcgccacgaagaattggtcggcaagttcgggcgtaagccccccaggacagtcaagcttatgtttgaaaaagccaacgagtacgccaaagccgaagacgccgtcaccgcatcaaagcagtcgggtcccagttggaagcaaaacaagggtacgccggctacgggaggaggtggaagtaacaatcataaggaccgcaagcgtaagcctgcggaacttgttgcaaccgccagtcactcttctcgacagcgttcgcgcgtcaacacgttcgacaagatcatgaactcccaatgcccgcaccatcctaactccaaccacgtggccaaagattgtttcgtctacaagcaatttgcggatcaatacaccaagactgcacgaaagaactctgacgaagaacaaagcacgtcaaggaagaaggacgacggcgacaccccggcaggttttcaagatcaccgcaaggagctcaaccatatcttcggcggccccctggcttatgagtctaaacggaagcagaagttgactgaacgggagatcaatgctgttcagcccgacacgccccagtatcttcgttggtcagagattgcaatcaagtttgaccgctcggatcatcctgaccgagtggtccacccggggcggtaccccctggtactagacccagtggtccgtaatgtcaagcttcgcagaaccctcattgacggtggcagtgcactcaatatcctcttcgccaagaccttggatgatatgcagattcctcgctccgagctaaaaccaagcaatgcgcctttccacggagtaattccaggattatccgcaactccactcggccagatcaccctcccagtcacttttggcactcgggaaaacttccgcacagagaacatcagctttgaagtcgccgatttcgagacagcataccatgccatactcggacgcccggcgttagccaagttcatggccgtcccgcactacacttacatgatgatgaagatgcctggtccccgaggagtcctatccctacggagcgacatcaagcaagccgtcacatgcgacaaggagagttgcgacatggcccaaactcacgagatggcgtctgcccgagaggttatccgactggctgcagccacggcgagcgaaggagaagtgcccgctaccaagatttcaaagaatggagaaagcgaagccaagactaagaagattcccctagatccctctgatcctactaaaactgctgtaataggcgccgagttagattgtaaataggaaagcgcgctcatcacctttcttcagaacaataaagatatctttgcgtggaaaccatctgatatgcccggtattcctagagaggtgattgagcactccttacatgtcaaagaagatgccaaacctatcaaacaacgactccgccgatttgcacaagacaggaaagacgcgatcaaggaggaattaaccaagctgttagcagcaggcttcatcaaagaagtccttcatcccgactggctggcaaacccggttctagttcggaagaaaacagggcaatggcgcatgtgcgttgattatactgacctcaacaaatcctgccctaaagatccttttgggttgcctcgcattgaccaggtagtcgactcgaccgccggctgtgagcttctcagttttttggattgctactcggggtatcatcagatccgactgaaggaatccgactgcttgaagacttcattcatcacgccttttggtgcatactgctacgtcaccatgccgtttggactaaaaaatgcaggagcaacttatcaacgtatgattcagagatgcttctcaacacaaattggccgcaacgttgaagcctatgtggatgatgtagtcgtcaagaccaagcaaaaggatgatttgattttggatctagaagaaaccttcgcgagcatccgcgctttcaggatgaaattaaaccctgaaaagtgcaccttcggagtaccgtcagggaagctgcttggttttatggtgtctcataggggcatccaagccaacccggagaaagttactgctatcctcaacatgaaaccgccaagtacccagaaagatgttcagaagccgactggatgcatggcggcgctcagccgatttgtttcaaggcttggcgagcgggggatgcctttctttaagctgctgaagaaaacagataacttccagtggggacccgaagcacagaaggccttcgaagatttcaagaaactcctcaccgagccaccagtcttagcctcaccacacccgcaagagccgttgttgctgtatgtatcagccacctcccaggttgtgagcacagtcttggtcgttgagcgcgaggaagaaggccatgtccaaaaagtccagcgaccaatttattttgtcagcgaggtcctagccgactccaaaacgaggtaccctcaggttcagaagctgttatatggtattctaattactaccaggaagctatctcactactttcaaggtcactcggtaacggtggtcacatcatttccactcggtgatatactgcacaaccgcgaagcaaacggacgtattgctaagtgggctttggagttgatgtctttggacatatcattcaagccccgaatttcaatcaagtcccaagcgttagctgattttgtcgccgaatggaccgagtgccaggaggatacccccgcggagaacatggagcactggaccatgcattttgacggatccaaacgactttcgggcactggagcaggagtggttttgatttccccaactggagaaagattgagctatgtgctttggatacatttttcggcgtcccacaacgtcgccgagtatgaggccctccttcatggactacggattgcaatttccctagggataaagcgtctgattgttcgaggcgattcacagttggttgtcaaccaagttatgaaagagtggtcctgcattgacgacaatatgatggcatatcgacaagaggtgcgcaaattggaagacaagttcgagggactcgagctcagtcacgttcttcgacacaacaatgaagccgccgacagacttgccaattttggatccaagcgcgagacggcgccctcagatgttttcgtcgaacacctttatacaccgaccgtacctcatagagatactactcaagatgcggacactcatgacgtagctatggttgaagccgactggcgagagcccttcatacgatttttaacttctcaagagctcccttgtcacgcccagaaattcccgaatagaattccaagcagaatgtgtattaaaacccccgtccaggaccagccggggtacacaaacgacaatgttgacatacagatccacgtcttacaaacattataaaagtcttacagaaatgcagcggaaaacaaaagaaactggagctaagccttgacttgaacggcagcgggaacaccactccacaggcatcctcgacggcacggacgaagcctactcctcggagaacccgccatcggacacatactcgagctctgaggttggggggaaaagtagagcaagactgagtactacccactgtactcagcaagtcataccggaataggggtatgatgcagggaattaacaaagaagagctagagtggttcatttgcataaatactggcatttataaacaggaatttaatgcgaaaacagttgtaaaaattaaacagtattaaacatccgctgtccaacgctaacccacgttgcgacaggcccaaccatccacctaaactatccaaattcaacagattacactagggtgagactaatcacggtgaatctggttgaccgcccataaccgcgggcacggctattcgaatagttttactctgatcagaggtgtacaactgt

SEQ ID NO: 6959 - DNA, 1071 bp, Oryza sativa
caagattacacgcggtggacaagaatgaccgatctgtgaccggtctgacactaatcatatcgtcagcgcacagccgtgttcccacgacgcgctcacccccggcggaagtggaggtaggtatgggcagtcccatcggagtgtcattcgaacagcaaccgtgctgatctccgcccattctagagaaaaagaacagtccagtttggaaagagaagggtgcatgtggtatccccttgaagtataaaaggaggaccttgcccatggggtaaaggggattgattcttttcaagattaggaacttagaacgggggagaagagagctcacacttgtagctcattcatacatagatccaccaaaacacaggagtagggtattacgcttctgagcggcccgaacctgtatagatcgtcggtgtctcgtgttttctggctggcagacaatctttccatatacagagagagagagagagcttgagatttcaccctaagcccccggccggactggcaaagggtcgccggcctcgtcgccaccgccgtcctcgctgctggtgtcgccttcctcgtcggagctgggggcgaacgcgagccgaggggccgagccctcgaagccgttgacgatgtggtcagcagcatccccgacccgcgcgcgcgcctcgtcctcggtcccgggagggaactcctccagcgccatccatggggagaagttgggatcccgggcctggtaactcgccagcacgagttcgaccgccccccgggcgaggtccctcgaggatgccttaatggtcttctcgagctcctcggggagtcgctcgagaacccaagccatcctgttgaggtgcggagcgaggccttccagattggtggggggcaccgtcgtctggcctccccagaggcctgcttgccgaccggcgcgcttcatgcgggagaccgcgtcccaaagcatgccgggcccaatctcgcccgccaagcgaagggcctcggcctccccggtggaggagtccagcgcgcgctgcatgtcagcgacggtgtgttcggcagccgcgaggcgagcggctaagtcgctttcgcccgcag
